United States Patent Application Publication US 2023/0026259 A1 - sequence listing, part 38

SEQ ID NO: 125813 - DNA, 7260 bp, Homo sapiens
  Payload ID: 4649
  Gene Symbol: DOCK10
  Gene Name: dedicator of cytokinesis 10
  Uniprot ID: Q96BY6
  ENST ID: ENST00000258390
  CDS Start-End: 69-6629
aaggttggcgcggggaagaccggcgggaggcgcgccccgggcccgcggcgcgattggcgtgaccggcgatggccggtgagcggacccgcaggttcacccggagcctgttgagacctgggcaggcggccgagctccggcacagcgccgcgtccgccgccgcggtggcagtcagcagccggcagcagcagcggcaagaaaagcctaggcttctcgagcctttggattatgagactgtcattgaagaacttgaaaagacctaccggaatgatcctcttcaagatctcttgttcttccccagtgatgacttttcagcagccacagtttcctgggatatccgcacgttgtactcaacagtacctgaagatgcagagcacaaggcagaaaatttactggttaaggaggcttgtaaattttatagttcccagtggcatgtggtaaactacaaatatgaacaatattctggagacattcgacagctaccccgagcagaatacaaaccagagaagcttccttcacattcctttgagattgaccatgaagatgctgataaggatgaagataccacttcccactcgtcttccaaggggggtggaggagcgggaggaactggtgttttcaagtccggctggctctacaaggggaattttaacagcaccgtgaacaacaccgttactgttcggtcattcaaaaagcgctacttccagctgactcagttaccagataactcctacattatgaacttttacaaagatgagaaaatatccaaagaacccaaaggatgcatctttttggattcctgtacaggagtggtgcagaataacagactaagaaaatatgcctttgaattgaaaatgaatgatctgacctattttgtgctggcagctgaaacagagtcagatatggatgaatggatccacaccctcaaccgcattctgcaaatcagtcctgaggggcccctccaagggaggaggagcacagagctcactgatctgggtctggattcgctggataattctgtaacttgtgaatgcacgccagaggaaacagattcttcagagaacaacctacacgcagactttgcaaagtacctcacagaaacagaagatactgtaaaaacaactcgaaacatggagaggctaaatctgttctctctagatccagacatagataccttgaaacttcaaaaaaaagatctcttggaacctgagtctgtgatcaaaccatttgaagaaaaagctgccaagagaatcatgatcatctgtaaagccctcaactcaaatcttcagggatgtgttacggagaatgaaaatgatccgataacgaatattgagcctttttttgtgagtgtggcactttatgacctcagagacagcaggaagatttctgctgattttcatgtggatctaaaccatgctgctgtcagacagatgctcttgggggcttctgtggctttggaaaatggcaacatcgacaccatcactccaagacaatcagaagaacctcacatcaagggacttccagaggaatggctaaaatttccaaagcaggctgtattttctgtaagcaatccacattctgaaattgttttggtggccaaaatcgaaaaagtcttgatgggaaacattgcaagtggtgccgaaccttatattaagaacccagactccaacaagtatgcacaaaagatactaaaatccaacagacaattctgcagcaaattgggaaaataccgtatgccttttgcttgggcagtaagatcagtatttaaggacaaccagggaaatgtggacagagactcaagattttcaccattgtttagacaagaaagtagcaagatttcaactgaggacctagttaaactagtatcagattatagaagggccgacagaataagcaaaatgcagaccattcctggaagcctggatattgctgttgacaacgttcccttggagcatccaaattgtgtaacatcgtcctttatccctgtcaagcctttcaacatgatggctcaaacagaacccacagtggaggtggaagaatttgtttacgattcaacaaagtattgtcggccttacagagtatataaaaatcaaatttatatttaccccaaacacctcaagtatgatagccagaaatgcttcaacaaggcacggaatataactgtgtgcattgaattcaaaaattcagatgaagaaagtgccaagcccctgaagtgtatttatggaaaacctggagggcccctcttcacctcagccgcctacacagcagttctgcaccactctcagaatccggatttctcagatgaggtgaaaattgagctaccaacacaactccatgagaaacaccatattttgttttctttttatcacgtcacctgtgacatcaatgcaaaagctaatgccaaaaagaaggaggctctggaaacgtcagttggatatgcttggcttcctctgatgaaacacgatcagatagcttctcaagagtacaacatcccaatagcaacaagtctgcctcctaattatttaagctttcaagattctgcaagtggaaagcatggtgggagtgacattaaatgggttgatggtggcaaaccacttttcaaagtgtcgacatttgttgtatcaacagtaaatactcaggatccacatgtgaatgcatttttccaagagtgccaaaaaagagagaaagatatgtctcagtcacctacctcaaatttcatccgctcttgtaagaacttattgaatgtggaaaagattcatgcaatcatgagttttctgcctataattttgaatcagctcttcaaagttctggtacagaatgaggaagatgaaataactacaactgtcaccagggttctgaccgacattgtggccaagtgccatgaggagcagctggatcattctgtccagtcatatattaagttcgtgttcaagaccagggcatgcaaggagaggactgtacatgaggaactggctaaaaatgtgactggtcttttgaaatcaaatgactcaacaacagtaaagcatgtcctaaagcattcctggttcttctttgcaattatcctaaaatcgatggcacagcacttgattgacacaaataaaatccagcttccccggcctcagagatttcctgaatcttaccaaaatgaattggacaatcttgtcatggtcctatccgaccatgtgatttggaaatacaaggatgcacttgaagaaacaagaagggcaaaccacagcgttgccagatttctcaagcgctgctttacatttatggaccgagggtatgtgtttaagatggtcaacaattacatcagcatgttctcctccggtgaccttaagaccttgtgccagtataaatttgattttcttcaagaagtatgtcaacatgaacactttatccctttgtgtctgcccataagatcagcaaacattccagatcctttgacaccttcagaatcgactcaagagttacatgcatcagatatgcctgaatattcagtcacaaatgaattttgtcgcaaacacttcttaatcggaattctgctccgagaagttggctttgccctgcaggaagaccaagatgtcagacacttagctttagctgtcctaaaaaatctaatggctaagcattcatttgatgatcgatacagagagccaagaaagcaggcccagatagcaagtttatacatgcccctgtacggcatgctcctggacaatatgccaaggatttatctgaaggacctgtatccttttactgtcaatacatctaatcaggggtctagagatgatctaagcaccaatggaggatttcaaagccagacagctatcaaacatgcaaactctgtggatacatcattttctaaagatgttttaaattccatagcagcattttcatcaatagctatttctacagtaaaccatgctgactccagagcatctttagcaagtcttgactccaatccaagtaccaatgagaagagcagtgagaagacggacaactgtgaaaagatcccaagacccttgtctttgattggctcaactcttcgatttgacaagttagatcaagcagaaaccaggagtctcctgatgtgttttcttcacattatgaaaacgatttcgtacgagactctgattgcctactggcagagagctcccagcccagaggtgtccgacttcttcagcatcttggacgtttgtcttcaaaatttcagatacctaggaaaacgcaacataataagaaaaattgctgctgcatttaaatttgtgcagtccacccagaacaatggaactctcaaaggatccaatccttcctgccagacatcaggtctcttgtcacaatggatgcactccacttccagtcatgaaggccataagcagcacagatcacaaactttacctataattcgaggcaaaaatgcactttctaaccccaaactcttacagatgttagacaataccatgaccagcaactccaatgaaatagacatcgtgcatcatgtagacactgaggccaatatagctacggaggtttgcctcactattctggacctgttatccctcttcacacagactcatcagagacaactccaacaatgtgactgtcaaaattcattgatgaaaagggtctttgatacctacatgctctttttccaagtcaatcagtcagccacagcgctgaagcatgtgtttgcctccttgagactgtttgtatgcaagtttccttcagcgttctttcaagggcctgctgacctctgtggatcattctgttacgaagtcctaaaatgctgtaaccacaggtcacggtcaactcagacagaagcctcagcccttctgtactttttcatgaggaagaattttgaatttaacaagcagaagtcaattgtccggtcccacttacaactcatcaaagctgtgagccagttaatagccgatgctgggattggaggctctcggtttcaacattcgcttgcaattaccaataatttcgccaatggagataagcaaatgaaaaacagcaatttcccagcagaggtgaaggacctgactaagcgtataaggactgttttgatggccacagctcagatgaaggagcacgagaaggaccccgagatgctggtggatctccagtacagcctggcaaactcctacgcaagcactcctgaactacgcaggacctggctggaaagtatggccaagattcatgccagaaacggagatttatctgaggctgccatgtgttacatccatattgctgctctcattgcagagtatctgaaaagaaagggttactggaaagtggaaaagatttgcacagcatccctgctctcggaggatacccacccctgtgatagcaactcattactaacaactcccagtggaggaagcatgttctctatgggatggccagcttttttgagcattacaccaaacattaaggaagaaggagcgatgaaagaggattctggaatgcaagatacaccatacaatgagaatatcctggtggagcagctatacatgtgtgtggagtttctctggaagtctgagcgatatgaactcattgctgatgtcaacaagcccatcattgctgtctttgagaaacaacgagacttcaaaaaattgtcagatctctactacgacattcatcggtcatatctgaaagtggcagaggtggtgaattcggagaagcggctgtttggtcgctactatcgtgtggcattttatgggcagggcttttttgaagaagaagaaggtaaagagtatatttataaagagcctaagctgacaggtctgtccgagatttcccaaagattactcaagctctatgcagataaatttggagcagacaatgtgaagataatccaggattccaacaaggtaaaccccaaggatttggaccccaaatatgcctacatccaggtgacctatgtgacgccgttctttgaggaaaaggaaatcgaagaccggaagacagatttcgaaatgcaccacaacatcaaccgctttgtcttcgagacacccttcacgctgtcgggcaagaagcacggtggggtggcggagcagtgcaagcggcggacgatcctgacaacgagtcacctgttcccctacgtgaagaagagaatacaagtaattagccaatcgagcacagaactgaatccaattgaagtggcaattgacgagatgtccaagaaggtttctgagcttaatcagctttgcacaatggaagaagtggacatgatcagactgcagctcaaactgcaaggaagtgtcagcgtgaaggttaatgctgggccaatggcctatgcacgagcttttcttgaagaaaccaatgcaaagaagtaccctgacaaccaagtaaagcttttgaaggagatcttcaggcaatttgcagatgcatgtgggcaggcccttgacgtgaatgagcgcctcatcaaagaggaccagctggagtaccaggaagaactgaggtcccactacaaggacatgctcagcgaactctccacagtcatgaatgagcagattacgggcagggacgacctgtcaaagcgcggagtggaccaaacctgcactcgagtaattagcaaagcaactccggccctacccacggtctccatctcatctagtgctgaagtctgagggctctgcagcatcagacccacctctaagagaactttctgaatttgcagctaatctcggggaagagaaagataggtttaatttatttgaagttttcatggtgttaatatttttgtttacctcgctagcttcagaattttgccaacctctgaatttgcacattttgtataatttttttttctttgagcagtgttgatcaagccaggttgaatatttgccatgaaattccagtgaatgtgtagctcaaatgcaaaccctaagtttgctgtcagttattgtatggtcagtaccccagtcctagtacacatattttaaaggttaaagtgaatgtttttgtaacatttaagcatatttcagatgtaaataaaagattgtaaaatatacggtttttaccaaatttaaaagatcctttttagttaatactatgacagtactaaaaatatatgaataacatttcagataccattatattaaaatatttgtgtatgtgtacaaaagcgttgataaatactaatctttaaagtttgtggagttcctttatttgtaatatatgtgctcttaaaagcaatgggatgtgaaattatgaaagtattttattgttcatagaaataaaaaacacagttactttgca

SEQ ID NO: 125814 - DNA, 7288 bp, Homo sapiens
  Payload ID: 4649
  Gene Symbol: DOCK10
  Gene Name: dedicator of cytokinesis 10
  Uniprot ID: Q96BY6
  ENST ID: ENST00000409592
  CDS Start-End: 115-6657
atttccctttttaccaagaagaaagatttgttcagcctggtgacgcttcagaagagaagagtttaacgacattgatattttgaaatattttgtgactcaaattatagcaatacgatgagttttcgagggaaggtttttaaacgggagcccagtgaattttggaagaagagacgaactgtgaggagagtaaaccaagaagaaatccacagatttagttctcaagaaaagcctaggcttctcgagcctttggattatgagactgtcattgaagaacttgaaaagacctaccggaatgatcctcttcaagatctcttgttcttccccagtgatgacttttcagcagccacagtttcctgggatatccgcacgttgtactcaacagtacctgaagatgcagagcacaaggcagaaaatttactggttaaggaggcttgtaaattttatagttcccagtggcatgtggtaaactacaaatatgaacaatattctggagacattcgacagctaccccgagcagaatacaaaccagagaagcttccttcacattcctttgagattgaccatgaagatgctgataaggatgaagataccacttcccactcgtcttccaaggggggtggaggagcgggaggaactggtgttttcaagtccggctggctctacaaggggaattttaacagcaccgtgaacaacaccgttactgttcggtcattcaaaaagcgctacttccagctgactcagttaccagataactcctacattatgaacttttacaaagatgagaaaatatccaaagaacccaaaggatgcatctttttggattcctgtacaggagtggtgcagaataacagactaagaaaatatgcctttgaattgaaaatgaatgatctgacctattttgtgctggcagctgaaacagagtcagatatggatgaatggatccacaccctcaaccgcattctgcaaatcagtcctgaggggcccctccaagggaggaggagcacagagctcactgatctgggtctggattcgctggataattctgtaacttgtgaatgcacgccagaggaaacagattcttcagagaacaacctacacgcagactttgcaaagtacctcacagaaacagaagatactgtaaaaacaactcgaaacatggagaggctaaatctgttctctctagatccagacatagataccttgaaacttcaaaaaaaagatctcttggaacctgagtctgtgatcaaaccatttgaagaaaaagctgccaagagaatcatgatcatctgtaaagccctcaactcaaatcttcagggatgtgttacggagaatgaaaatgatccgataacgaatattgagcctttttttgtgagtgtggcactttatgacctcagagacagcaggaagatttctgctgattttcatgtggatctaaaccatgctgctgtcagacagatgctcttgggggcttctgtggctttggaaaatggcaacatcgacaccatcactccaagacaatcagaagaacctcacatcaagggacttccagaggaatggctaaaatttccaaagcaggctgtattttctgtaagcaatccacattctgaaattgttttggtggccaaaatcgaaaaagtcttgatgggaaacattgcaagtggtgccgaaccttatattaagaacccagactccaacaagtatgcacaaaagatactaaaatccaacagacaattctgcagcaaattgggaaaataccgtatgccttttgcttgggcagtaagatcagtatttaaggacaaccagggaaatgtggacagagactcaagattttcaccattgtttagacaagaaagtagcaagatttcaactgaggacctagttaaactagtatcagattatagaagggccgacagaataagcaaaatgcagaccattcctggaagcctggatattgctgttgacaacgttcccttggagcatccaaattgtgtaacatcgtcctttatccctgtcaagcctttcaacatgatggctcaaacagaacccacagtggaggtggaagaatttgtttacgattcaacaaagtattgtcggccttacagagtatataaaaatcaaatttatatttaccccaaacacctcaagtatgatagccagaaatgcttcaacaaggcacggaatataactgtgtgcattgaattcaaaaattcagatgaagaaagtgccaagcccctgaagtgtatttatggaaaacctggagggcccctcttcacctcagccgcctacacagcagttctgcaccactctcagaatccggatttctcagatgaggtgaaaattgagctaccaacacaactccatgagaaacaccatattttgttttctttttatcacgtcacctgtgacatcaatgcaaaagctaatgccaaaaagaaggaggctctggaaacgtcagttggatatgcttggcttcctctgatgaaacacgatcagatagcttctcaagagtacaacatcccaatagcaacaagtctgcctcctaattatttaagctttcaagattctgcaagtggaaagcatggtgggagtgacattaaatgggttgatggtggcaaaccacttttcaaagtgtcgacatttgttgtatcaacagtaaatactcaggatccacatgtgaatgcatttttccaagagtgccaaaaaagagagaaagatatgtctcagtcacctacctcaaatttcatccgctcttgtaagaacttattgaatgtggaaaagattcatgcaatcatgagttttctgcctataattttgaatcagctcttcaaagttctggtacagaatgaggaagatgaaataactacaactgtcaccagggttctgaccgacattgtggccaagtgccatgaggagcagctggatcattctgtccagtcatatattaagttcgtgttcaagaccagggcatgcaaggagaggactgtacatgaggaactggctaaaaatgtgactggtcttttgaaatcaaatgactcaacaacagtaaagcatgtcctaaagcattcctggttcttctttgcaattatcctaaaatcgatggcacagcacttgattgacacaaataaaatccagcttccccggcctcagagatttcctgaatcttaccaaaatgaattggacaatcttgtcatggtcctatccgaccatgtgatttggaaatacaaggatgcacttgaagaaacaagaagggcaaaccacagcgttgccagatttctcaagcgctgctttacatttatggaccgagggtatgtgtttaagatggtcaacaattacatcagcatgttctcctccggtgaccttaagaccttgtgccagtataaatttgattttcttcaagaagtatgtcaacatgaacactttatccctttgtgtctgcccataagatcagcaaacattccagatcctttgacaccttcagaatcgactcaagagttacatgcatcagatatgcctgaatattcagtcacaaatgaattttgtcgcaaacacttcttaatcggaattctgctccgagaagttggctttgccctgcaggaagaccaagatgtcagacacttagctttagctgtcctaaaaaatctaatggctaagcattcatttgatgatcgatacagagagccaagaaagcaggcccagatagcaagtttatacatgcccctgtacggcatgctcctggacaatatgccaaggatttatctgaaggacctgtatccttttactgtcaatacatctaatcaggggtctagagatgatctaagcaccaatggaggatttcaaagccagacagctatcaaacatgcaaactctgtggatacatcattttctaaagatgttttaaattccatagcagcattttcatcaatagctatttctacagtaaaccatgctgactccagagcatctttagcaagtcttgactccaatccaagtaccaatgagaagagcagtgagaagacggacaactgtgaaaagatcccaagacccttgtctttgattggctcaactcttcgatttgacaagttagatcaagcagaaaccaggagtctcctgatgtgttttcttcacattatgaaaacgatttcgtacgagactctgattgcctactggcagagagctcccagcccagaggtgtccgacttcttcagcatcttggacgtttgtcttcaaaatttcagatacctaggaaaacgcaacataataagaaaaattgctgctgcatttaaatttgtgcagtccacccagaacaatggaactctcaaaggatccaatccttcctgccagacatcaggtctcttgtcacaatggatgcactccacttccagtcatgaaggccataagcagcacagatcacaaactttacctataattcgaggcaaaaatgcactttctaaccccaaactcttacagatgttagacaataccatgaccagcaactccaatgaaatagacatcgtgcatcatgtagacactgaggccaatatagctacggaggtttgcctcactattctggacctgttatccctcttcacacagactcatcagagacaactccaacaatgtgactgtcaaaattcattgatgaaaagggtctttgatacctacatgctctttttccaagtcaatcagtcagccacagcgctgaagcatgtgtttgcctccttgagactgtttgtatgcaagtttccttcagcgttctttcaagggcctgctgacctctgtggatcattctgttacgaagtcctaaaatgctgtaaccacaggtcacggtcaactcagacagaagcctcagcccttctgtactttttcatgaggaagaattttgaatttaacaagcagaagtcaattgtccggtcccacttacaactcatcaaagctgtgagccagttaatagccgatgctgggattggaggctctcggtttcaacattcgcttgcaattaccaataatttcgccaatggagataagcaaatgaaaaacagcaatttcccagcagaggtgaaggacctgactaagcgtataaggactgttttgatggccacagctcagatgaaggagcacgagaaggaccccgagatgctggtggatctccagtacagcctggcaaactcctacgcaagcactcctgaactacgcaggacctggctggaaagtatggccaagattcatgccagaaacggagatttatctgaggctgccatgtgttacatccatattgctgctctcattgcagagtatctgaaaagaaagggttactggaaagtggaaaagatttgcacagcatccctgctctcggaggatacccacccctgtgatagcaactcattactaacaactcccagtggaggaagcatgttctctatgggatggccagcttttttgagcattacaccaaacattaaggaagaaggagcgatgaaagaggattctggaatgcaagatacaccatacaatgagaatatcctggtggagcagctatacatgtgtgtggagtttctctggaagtctgagcgatatgaactcattgctgatgtcaacaagcccatcattgctgtctttgagaaacaacgagacttcaaaaaattgtcagatctctactacgacattcatcggtcatatctgaaagtggcagaggtggtgaattcggagaagcggctgtttggtcgctactatcgtgtggcattttatgggcagggcttttttgaagaagaagaaggtaaagagtatatttataaagagcctaagctgacaggtctgtccgagatttcccaaagattactcaagctctatgcagataaatttggagcagacaatgtgaagataatccaggattccaacaaggtaaaccccaaggatttggaccccaaatatgcctacatccaggtgacctatgtgacgccgttctttgaggaaaaggaaatcgaagaccggaagacagatttcgaaatgcaccacaacatcaaccgctttgtcttcgagacacccttcacgctgtcgggcaagaagcacggtggggtggcggagcagtgcaagcggcggacgatcctgacaacgagtcacctgttcccctacgtgaagaagagaatacaagtaattagccaatcgagcacagaactgaatccaattgaagtggcaattgacgagatgtccaagaaggtttctgagcttaatcagctttgcacaatggaagaagtggacatgatcagactgcagctcaaactgcaaggaagtgtcagcgtgaaggttaatgctgggccaatggcctatgcacgagcttttcttgaagaaaccaatgcaaagaagtaccctgacaaccaagtaaagcttttgaaggagatcttcaggcaatttgcagatgcatgtgggcaggcccttgacgtgaatgagcgcctcatcaaagaggaccagctggagtaccaggaagaactgaggtcccactacaaggacatgctcagcgaactctccacagtcatgaatgagcagattacgggcagggacgacctgtcaaagcgcggagtggaccaaacctgcactcgagtaattagcaaagcaactccggccctacccacggtctccatctcatctagtgctgaagtctgagggctctgcagcatcagacccacctctaagagaactttctgaatttgcagctaatctcggggaagagaaagataggtttaatttatttgaagttttcatggtgttaatatttttgtttacctcgctagcttcagaattttgccaacctctgaatttgcacattttgtataatttttttttctttgagcagtgttgatcaagccaggttgaatatttgccatgaaattccagtgaatgtgtagctcaaatgcaaaccctaagtttgctgtcagttattgtatggtcagtaccccagtcctagtacacatattttaaaggttaaagtgaatgtttttgtaacatttaagcatatttcagatgtaaataaaagattgtaaaatatacggtttttaccaaatttaaaagatcctttttagttaatactatgacagtactaaaaatatatgaataacatttcagataccattatattaaaatatttgtgtatgtgtacaaaagcgttgataaatactaatctttaaagtttgtggagttcctttatttgtaatatatgtgctcttaaaagcaatgggatgtgaaattatgaaagtattttattgttcatagaaataaaaaacacagttactttgca

SEQ ID NO: 125815 - DNA, 592 bp, Homo sapiens
  Payload ID: 4649
  Gene Symbol: DOCK10
  Gene Name: dedicator of cytokinesis 10
  ENST ID: ENST00000435582
  CDS Start-End: 72-500
gagaaggttggcgcggggaagaccggcgggaggcgcgccccgggcccgcggcgcgattggcgtgaccggcgatggccggtgagcggacccgcaggttcacccggagcctgttgagacctgggcaggcggccgagctccggcacagcgccgcgtccgccgccgcggtggcagtcagcagccggcagcagcagcggcaagaaaagcctaggcttctcgagcctttggattatgagactgtcattgaagaacttgaaaagacctaccggaatgatcctcttcaagatctcttgttcttccccagtgatgacttttcagcagccacagtttcctgggatatccgcacgttgtactcaacagtacctgaagatgcagagcacaaggcagaaaatttactggttaaggaggcttgtaaattttatagttcccagtggcatgtggtaaactacaaatatgaacaatattctggagacattcgacagctaccccgcgagggtccataggaagatactgaagaaatagatgacttcaggctagaatggaaaatgtaagcctttacacactaggaatagaaatcagcactaacttggagatc

SEQ ID NO: 125816 - DNA, 1140 bp, Homo sapiens
  Payload ID: 4649
  Gene Symbol: DOCK10
  Gene Name: dedicator of cytokinesis 10
  ENST ID: ENST00000422684
  CDS Start-End: 1-1140
ctttgtgtctgcccataagatcagcaaacattccagatcctttgacaccttcagaatcgactcaagagttacatgcatcagatatgcctgaatattcagtcacaaatgaattttgtcgcaaacacttcttaatcggaattctgctccgagaagttggctttgccctgcaggaagaccaagatgtcagacacttagctttagctgtcctaaaaaatctaatggctaagcattcatttgatgatcgatacagagagccaagaaagcaggcccagatagcaagtttatacatgcccctgtacggcatgctcctggacaatatgccaaggatttatctgaaggacctgtatccttttactgtcaatacatctaatcaggggtctagagatgatctaagcaccaatggaggatttcaaagccagacagctatcaaacatgcaaactctgtggatacatcattttctaaagatgttttaaattccatagcagtaaaccatgctgactccagagcatctttagcaagtcttgactccaatccaagtaccaatgagaagagcagtgagaagacggacaactgtgaaaagatcccaagacccttgtctttgattggctcaactcttcgatttgacaagttagatcaagcagaaaccaggagtctcctgatgtgttttcttcacattatgaaaacgatttcgtacgagactctgattgcctactggcagagagctcccagcccagaggtgtccgacttcttcagcatcttggacgtttgtcttcaaaatttcagatacctaggaaaacgcaacataataagaaaaattgctgctgcatttaaatttgtgcagtccacccagaacaatggaactctcaaaggatccaatccttcctgccagacatcaggtctcttgtcacaatggatgcactccacttccagtcatgaaggccataagcagcacagatcacaaactttacctataattcgaggcaaaaatgcactttctaaccccaaactcttacagatgttagacaataccatgaccagcaactccaatgaaatagacatcgtgcatcatgtagacactgaggccaatatagctacggaggtttgcctcactattctggacctgttatccctcttcacac

SEQ ID NO: 125817 - DNA, 528 bp, Homo sapiens
  Payload ID: 4649
  Gene Symbol: DOCK10
  Gene Name: dedicator of cytokinesis 10
  ENST ID: ENST00000458608
  CDS Start-End: 11-139
gtgaccggcgatggccggtgagcggacccgcaggttcacccggagcctgttgagacctgggcaggcggccgagctccggcacagcgccgcgtccgccgccgcggtggcagtcagcagccggcagcagcagcggcactaaaatatgtttgctcaaaacagagggagatgaaaaactactggcagccagtacttcttaaaagaaaaagaagcatgttttacttctctggggtgaacataccaattaaaacgatgctgtgttgtgacagattactgagcaattaatgcctgtttgagcatcatgctagatgcttccgcgaaagcaacctcactgaggctggggcggccacacgttacagcaaaacaatccttcctcaaacttcctgcagcacccttcacgccgaggagcccagaaaccacagaaaacatttttttttctttgaatctccaagagttacactggaagaattagcttggcagaaagatctcaagattgaattctattggggatttcatactttcctcatttgt

SEQ ID NO: 125818 - DNA, 568 bp, Homo sapiens
  Payload ID: 4649
  Gene Symbol: DOCK10
  Gene Name: dedicator of cytokinesis 10
  ENST ID: ENST00000535663
  CDS Start-End: 1-568
ctacgacattcatcggtcatatctgaaagtggcagaggtggtgaattcggagaagcggctgtttggtcgctactatcgtgtggcattttatgggcaggctgtgggcttttttgaagaagaagaaggtaaagagtatatttataaagagcctaagctgacaggtctgtccgagatttcccaaagattactcaagctctatgcagataaatttggagcagacaatgtgaagataatccaggattccaacaaggtaaaccccaaggatttggaccccaaatatgcctacatccaggtgacctatgtgacgccgttctttgaggaaaaggaaatcgaagaccggaagacagatttcgaaatgcaccacaacatcaaccgctttgtcttcgagacacccttcacgctgtcgggcaagaagcacggtggggtggcggagcagtgcaagcggcggacgatcctgacaacgagtcacctgttcccctacgtgaagaagagaatacaagtaattagccaatcgagcacagaactgaatccaattgaagtggcaattgacgagatgtccaagaaggtt

SEQ ID NO: 125819 - DNA, 6625 bp, Homo sapiens
  Payload ID: 4650
  Gene Symbol: DOCK11
  Gene Name: dedicator of cytokinesis 11
  Uniprot ID: Q5JSL3
  ENST ID: ENST00000276202
  CDS Start-End: 64-6285
gcagtgagtccacccgcccgccgaggtccgcccgcccgccgagacccgcccgccgccgctgccatggccgaagtgcgcaaattcaccaaacggctcagcaagcctggcacggcggctgagctccggcagagcgtgtctgaggccgtgcggggctccgtggtgctggaaaaggccaaagttgttgagcccctggactatgagaatgttattgcccaaagaaaaacccagatttacagcgaccccctccgagatctgcttatgttcccaatggaagatatatctatctcggtgataggtcgtcaacgcagaacggtgcagtctactgtaccagaagatgctgaaaagagggcccagagtttatttgttaaagagtgtattaaaacctatagcacagattggcacgtggtaaactacaagtatgaggacttctctggggactttcgaatgttgccatgtaaatctttgagaccagaaaagattcctaatcatgtatttgagatagatgaagactgtgagaaagatgaggactcatcttctttatgttctcagaagggtggtgtgataaaacaaggctggttgcataaagcaaatgtaaatagtaccatcacagtaaccatgaaggtattcaagagacgatatttttacttgacccaacttcctgacggttcatatattctcaattcctataaagatgagaaaaattcaaaagaatcgaaaggttgcatctacttggacgcctgcattgatgttgttcagtgccccaaaatgcgccgtcatgcttttgaactcaagatgttagataaatatagccattatctggctgctgaaactgagcaggaaatggaggaatggttgataactttgaaaaagattattcagatcaacaccgacagtttagttcaagaaaaaaaggagacggtagaaacagcacaagatgatgaaactagcagccaaggaaaagccgagaacatcatggcaagtttggaaaggagcatgcatccggaactgatgaagtatggaagagaaactgaacaactaaacaaactcagtagaggagatggaagacagaatctcttttcttttgattcagaagttcagaggttggacttttcaggaattgaacctgatataaagccatttgaagaaaaatgcaataaacgtttcctggtgaattgccatgatttaactttcaatatcttgggccaaattggagacaatgcaaaaggaccacccacaaatgttgagcccttttttatcaatcttgccttatttgatgtaaagaacaattgtaagatttcagcagactttcatgtagacctgaatcccccatctgtccgtgaaatgctgtggggctcttcaacccaactggccagtgacggtagcccaaagggctcttcacccgaatcttacattcatggaattgccgaatctcagttacgctacatacaacagggaattttctcagtgacgaatccacatcctgaaatttttctagttgccagaattgaaaaggtactacagggaaacattacacactgtgcagaaccctatatcaaaaattctgatccagtaaagacggcccagaaggtgcacaggacagctaaacaagtgtgtagccgccttggacaatacagaatgcccttcgcttgggctgccagacccattttcaaagatactcaaggctctcttgatctggatgggagattttctcctctgtataaacaagacagtagcaagctttcaagtgaagacattctcaagttgctctcagaatataagaagccagaaaagaccaaactgcagattattcctgggcagctaaacatcacagtagaatgtgttcctgtggatttatcaaattgtattacttcttcatatgtgcccttgaagccttttgaaaagaattgccaaaatattactgtggaggttgaagagtttgttccagaaatgacaaaatattgttatccatttactatttacaaaaaccatctgtatgtatatcccctgcaattaaaatacgatagccagaaaacatttgccaaggcaaggaacattgcagtctgtgtggaattccgggattcagatgaaagtgacgctagtgccctaaagtgtatttatggaaaacctgcagggtctgtttttaccacaaatgcttatgctgttgtctcgcatcacaaccaaaatccagagttctatgatgagattaaaattgagcttcccattcacctacatcaaaaacatcatttgcttttcactttttatcatgtaagttgtgaaattaacacaaagggaacaaccaaaaagcaagacacagttgaaactccagttgggtttgcctgggtacctttgctgaaagatggtagaatcatcacatttgagcagcagctgccagtttccgccaatcttcccccaggctacttgaatctgaatgatgcagaatcaagaaggcaatgtaacgtggatattaaatgggtagatggtgcaaagcctttgttgaagattaaaagccacttagaatctaccatttacactcaagatctgcatgtgcacaaattcttccatcattgccagctgattcagtcaggctcgaaagaagttccaggggagctcattaaatatttaaagtgtttgcatgccatggagatccaagtcatgatacagtttctacctgtaattcttatgcaactcttccgagttctcacaaatatgacccatgaagatgacgttcctatcaactgcaccatggttctcttacatattgtatcaaagtgccatgaagaaggcttggatagttatctaagatcattcataaagtatagcttccgacctgaaaaaccgagtgctcctcaggcccagctgatacatgaaaccctggctactacgatgatagcaatattgaaacagtctgcagattttttatcaataaacaaattgctaaagtactcatggtttttctttgaaataattgcaaagtcaatggccacatacttgttggaagagaataagattaagcttccccgaggccagagatttcccgagacatatcatcatgtcttacattcactgcttcttgcaataattccccatgtgactattcggtatgcggagattcccgatgagtccagaaatgtgaactatagtttggctagcttcctgaagcgctgtttgacactaatggatagaggatttattttcaatttaataaatgactatatatctggattcagccccaaagatcctaaggttctggctgaatacaagtttgaatttctgcaaacaatttgcaatcacgaacattacattcctctgaacttgccaatggcatttgcaaaacctaaactgcagcgggttcaagattcaaatcttgaatacagtttatcagatgagtattgcaagcatcacttcttggttggtctacttctgagggaaacttccattgctcttcaggacaattatgagatcagatatacagctatctctgttataaagaatcttttgataaaacatgcatttgacacaagataccagcacaagaaccaacaagccaaaatagcacaattgtacctcccctttgttggactacttttggaaaatatacagcgattagcaggtcgagataccttgtattcttgtgcagccatgcctaattctgcatccagagatgagtttccatgtggctttacttcacctgccaatagagggagtctgagcactgacaaagacaccgcttatgggtcttttcaaaatggacatggaattaagagagaagattcaagaggttccctcatcccagaaggagcaacaggatttccagatcagggcaacactggtgaaaatacccgacagagttctacaaggagtagtgtatcccagtataaccgcctggatcagtatgaaatcagaagcctcctgatgtgctacctgtatatagtaaaaatgatttcagaagatactctcttaacttactggaataaagtatcacctcaggagctcataaacattcttatacttttagaagtatgcttgtttcactttagatatatggggaaaagaaacatagcaagggtgcatgatgcctggctgtcaaaacacttcggaatagaccgaaaatcgcaaaccatgcctgctcttcgaaacagatcaggagtaatgcaggcccggcttcagcatcttagtagcctagaaagttcatttacacttaatcacagttctacaacaactgaagcagacattttccaccaggcacttcttgaaggcaatacagctactgaagtttccctaacagtactagacaccatatcatttttcactcagtgcttcaagacccaacttttaaataatgatggccataacccattaatgaaaaaagtgtttgatatacatcttgcttttcttaaaaatggacaatctgaagtgtcgctgaaacatgtatttgcctcactgagagctttcatcagtaagtttccttcagcatttttcaaaggaagagtaaacatgtgtgctgcattttgctatgaggttttaaagtgctgcacatcgaagattagctcaaccaggaatgaagcatctgcacttttgtatcttttgatgagaaacaactttgagtataccaaaaggaaaacctttttgaggacacatctacagataataattgctgtaagccaactgatagctgatgtagcactaagcggaggatcaagatttcaggagtctttattcattatcaataattttgcaaatagtgacagacctatgaaggcaactgcctttcccgcagaagtcaaagacttgaccaagagaatccgcactgttcttatggccactgcccaaatgaaggagcatgagaaagaccctgaaatgctaattgatctccagtatagcttagccaagtcctatgcaagcaccccagagctcaggaaaacctggcttgatagcatggccaagattcatgtaaaaaatggagatttttcagaggctgcgatgtgttatgtccatgtagcagctctagttgcagagtttcttcatcgaaaaaaattatttcctaacggatgttcagcgttcaagaaaattactcccaatatagatgaagaaggagcaatgaaagaagatgctgggatgatggatgtccattatagtgaagaggtcttgctggagttgctagaacaatgtgtggatggcttatggaaggcagaacgttatgaaataatttctgagatttccaagttgatcgttccaatttatgagaaacgtcgtgagtttgagaaacttactcaagtttatagaactcttcatggagcttacacaaaaattctggaagttatgcatacaaaaaagagacttttaggcactttcttcagagttgccttttatggccaatctttttttgaagaagaagatggaaaggagtacatctataaagaaccaaagctcactggcctctcagaaatttccttgagacttgttaaactttatggtgaaaagtttggtacggagaatgtcaaaataattcaggattcagacaaggtaaatgccaaagagcttgatccaaaatatgctcatatacaagttacttatgtgaagccttactttgatgacaaagaactcacagaaaggaagaccgagtttgaaagaaatcataatatcagcagatttgtttttgaggccccttacactttatcaggcaaaaaacagggctgtatagaagaacagtgcaaacgccgtacaatcttgacaacttcaaactcgtttccttacgtgaagaagaggattcctattaactgtgaacagcagattaatttaaaaccaattgatgttgccactgatgaaataaaagataaaactgcagagctgcaaaagctttgctcctctactgacgtggacatgattcagctccaacttaaattgcagggctgtgtttctgtgcaggtcaatgctggtccattagcatatgcaagagctttcttaaatgacagccaagctagcaagtatccacctaagaaagtgagtgagttgaaagacatgtttaggaaatttatacaagcatgcagcattgcacttgaactaaatgagcggctaattaaagaagatcaagttgagtaccatgaagggctaaagtcaaatttcagagacatggtaaaagaattatctgacattatccatgagcagatattacaagaagacacaatgcattctccctggatgagcaacacattacatgtattttgtgcaattagtggtacatcaagtgaccgaggttatggttccccaagatacgctgaagtgtgaggaaatgcagatgtacgtgacaatgagactgacctttctcaggaatatttggagctgtgcaaatgttaaaatttaaagatttgatatacatggagtgtttcttctcgacaccaaaattttcatgtgttccaacagggtgcttacatatttgtaaataagcaacttgaaagtgcctggaaaattgcaccactgtgcttggtttgtacttttttaggtaaatctatatgctgaaaagtagagctcaaaaacagtagttcaatttgcttaattattgcttaaaataatggtactatgtaaaattgtataatggaatacaataaaaggtaaaacttatttgtaa

SEQ ID NO: 125820 - DNA, 6664 bp, Homo sapiens
  Payload ID: 4650
  Gene Symbol: DOCK11
  Gene Name: dedicator of cytokinesis 11
  ENST ID: ENST00000276204
  CDS Start-End: 75-6308
cgcgggccggggcagtgagtccacccgcccgccgaggtccgcccgcccgccgagacccgcccgccgccgctgccatggccgaagtgcgcaaattcaccaaacggctcagcaagcctggcacggcggctgagctccggcagagcgtgtctgaggccgtgcggggctccgtggtgctggaaaaggccaaagttgttgagcccctggactatgagaatgttattgcccaaagaaaaacccagatttacagcgaccccctccgagatctgcttatgttcccaatggaagatatatctatctcggtgataggtcgtcaacgcagaacggtgcagtctactgtaccagaagatgctgaaaagagggcccagagtttatttgttaaagagtgtattaaaacctatagcacagattggcacgtggtaaactacaagtatgaggacttctctggggactttcgaatgttgccatgtaaatctttgagaccagaaaagattcctaatcatgtatttgagatagatgaagactgtgagaaagatgaggactcatcttctttatgttctcagaagggtggtgtgataaaacaaggctggttgcataaagcaaatgtaaatagtaccatcacagtaaccatgaaggtattcaagagacgatatttttacttgacccaacttcctgacggttcatatattctcaattcctataaagatgagaaaaattcaaaagaatcgaaaggttgcatctacttggacgcctgcattgatgttgttcagtgccccaaaatgcgccgtcatgcttttgaactcaagatgttagataaatatagccattatctggctgctgaaactgagcaggaaatggaggaatggttgataactttgaaaaagattattcagatcaacaccgacagtttagttcaagaaaaaaaggagacggtagaaacagcacaagatgatgaaactagcagccaaggaaaagccgagaacatcatggcaagtttggaaaggagcatgcatccggaactgatgaagtatggaagagaaactgaacaactaaacaaactcagtagaggagatggaagacagaatctcttttcttttgattcagaagttcagaggttggacttttcaggaattgaacctgatataaagccatttgaagaaaaatgcaataaacgtttcctggtgaattgccatgatttaactttcaatatcttgggccaaattggagacaatgcaaaaggaccacccacaaatgttgagcccttttttatcaatcttgccttatttgatgtaaagaacaattgtaagatttcagcagactttcatgtagacctgaatcccccatctgtccgtgaaatgctgtggggctcttcaacccaactggccagtgacggtagcccaaagggctcttcacccgaatcttacattcatggaattgccgaatctcagttacgctacatacaacagggaattttctcagtgacgaatccacatcctgaaatttttctagttgccagaattgaaaaggtactacagggaaacattacacactgtgcagaaccctatatcaaaaattctgatccagtaaagacggcccagaaggtgcacaggacagctaaacaagtgtgtagccgccttggacaatacagaatgcccttcgcttgggctgccagacccattttcaaagatactcaaggctctcttgatctggatgggagattttctcctctgtataaacaagacagtagcaagctttcaagtgaagacattctcaagttgctctcagaatataagaagccagaaaagaccaaactgcagattattcctgggcagctaaacatcacagtagaatgtgttcctgtggatttatcaaattgtattacttcttcatatgtgcccttgaagccttttgaaaagaattgccaaaatattactgtggaggttgaagagtttgttccagaaatgacaaaatattgttatccatttactatttacaaaaaccatctgtatgtatatcccctgcaattaaaatacgatagccagaaaacatttgccaaggcaaggaacattgcagtctgtgtggaattccgggattcagatgaaagtgacgctagtgccctaaagtgtatttatggaaaacctgcagggtctgtttttaccacaaatgcttatgctgttgtctcgcatcacaaccaaaatccagagttctatgatgagattaaaattgagcttcccattcacctacatcaaaaacatcatttgcttttcactttttatcatgtaagttgtgaaattaacacaaagggaacaaccaaaaagcaagacacagttgaaactccagttgggtttgcctgggtacctttgctgaaagatggtagaatcatcacatttgagcagcagctgccagtttccgccaatcttcccccaggctacttgaatctgaatgatgcagaatcaagaaggcaatgtaacgtggatattaaatgggtagatggtgcaaagcctttgttgaagattaaaagccacttagaatctaccatttacactcaagatctgcatgtgcacaaattcttccatcattgccagctgattcagtcaggctcgaaagaagttccaggggagctcattaaatatttaaagtgtttgcatgccatggagatccaagtcatgatacagtttctacctgtaattcttatgcaactcttccgagttctcacaaatatgacccatgaagatgacgttcctatcaactgcaccatggttctcttacatattgtatcaaagtgccatgaagaaggcttggatagttatctaagatcattcataaagtatagcttccgacctgaaaaaccgagtgctcctcaggcccagctgatacatgaaaccctggctactacgatgatagcaatattgaaacagtctgcagattttttatcaataaacaaattgctaaagtactcatggtttttctttgaaataattgcaaagtcaatggccacatacttgttggaagagaataagattaagcttccccgaggccagagatttcccgagacatatcatcatgtcttacattcactgcttcttgcaataattccccatgtgactattcggtatgcggagattcccgatgagtccagaaatgtgaactatagtttggctagcttcctgaagcgctgtttgacactaatggatagaggatttattttcaatttaataaatgactatatatctggattcagccccaaagatcctaaggttctggctgaatacaagtttgaatttctgcaaacaatttgcaatcacgaacattacattcctctgaacttgccaatggcatttgcaaaacctaaactgcagcgggttcaagattcaaatcttgaatacagtttatcagatgagtattgcaagcatcacttcttggttggtctacttctgagggaaacttccattgctcttcaggacaattatgagatcagatatacagctatctctgttataaagaatcttttgataaaacatgcatttgacacaagataccagcacaagaaccaacaagccaaaatagcacaattgtacctcccctttgttggactacttttggaaaatatacagcgattagcaggtcgagataccttgtattcttgtgcagccatgcctaattctgcatccagagatgagtttccatgtggctttacttcacctgccaatagagggagtctgagcactgacaaagacaccgcttatgggtcttttcaaaatggacatggaattaagagagaagattcaagaggttccctcatcccagaaggagcaacaggatttccagatcagggcaacactggtgaaaatacccgacagagttctacaaggagtagtgtatcccagtataaccgcctggatcagtatgaaatcagaagcctcctgatgtgctacctgtatatagtaaaaatgatttcagaagatactctcttaacttactggaataaagtatcacctcaggagctcataaacattcttatacttttagaagtatgcttgtttcactttagatatatggggaaaagaaacatagcaagggtgcatgatgcctggctgtcaaaacacttcggaatagaccgaaaatcgcaaaccatgcctgctcttcgaaacagatcaggagtaatgcaggcccggcttcagcatcttagtagcctagaaagttcatttacacttaatcacagttctacaacaactgaagcagacattttccaccaggcacttcttgaaggcaatacagctactgaagtttccctaacagtactagacaccatatcatttttcactcagtgcttcaagacccaacttttaaataatgatggccataacccattaatgaaaaaagtgtttgatatacatcttgcttttcttaaaaatggacaatctgaagtgtcgctgaaacatgtatttgcctcactgagagctttcatcagtaagtttccttcagcatttttcaaaggaagagtaaacatgtgtgctgcattttgctatgaggttttaaagtgctgcacatcgaagattagctcaaccaggaatgaagcatctgcacttttgtatcttttgatgagaaacaactttgagtataccaaaaggaaaacctttttgaggacacatctacagataataattgctgtaagccaactgatagctgatgtagcactaagcggaggatcaagatttcaggagtctttattcattatcaataattttgcaaatagtgacagacctatgaaggcaactgcctttcccgcagaagtcaaagacttgaccaagagaatccgcactgttcttatggccactgcccaaatgaaggagcatgagaaagaccctgaaatgctaattgatctccagtatagcttagccaagtcctatgcaagcaccccagagctcaggaaaacctggcttgatagcatggccaagattcatgtaaaaaatggagatttttcagaggctgcgatgtgttatgtccatgtagcagctctagttgcagagtttcttcatcgaaaaaaattatttcctaacggatgttcagcgttcaagaaaattactcccaatatagatgaagaaggagcaatgaaagaagatgctgggatgatggatgtccattatagtgaagaggtcttgctggagttgctagaacaatgtgtggatggcttatggaaggcagaacgttatgaaataatttctgagatttccaagttgatcgttccaatttatgagaaacgtcgtgagtttgagaaacttactcaagtttatagaactcttcatggagcttacacaaaaattctggaagttatgcatacaaaaaagagacttttaggcactttcttcagagttgccttttatggccaatctttttttgaagaagaagatggaaaggagtacatctataaagaaccaaagctcactggcctctcagaaatttccttgagacttgttaaactttatggtgaaaagtttggtacggagaatgtcaaaataattcaggattcagacaaggtaaatgccaaagagcttgatccaaaatatgctcatatacaagttacttatgtgaagccttactttgatgacaaagaactcacagaaaggaagaccgagtttgaaagaaatcataatatcagcagatttgtttttgaggccccttacactttatcaggcaaaaaacagggctgtatagaagaacagtgcaaacgccgtacaatcttgacaacttcaaactcgtttccttacgtgaagaagaggattcctattaactgtgaacagcagattaatttaaaaccaattgatgttgccactgatgaaataaaagataaaactgcagagctgcaaaagctttgctcctctactgacgtggacatgattcagctccaacttaaattgcagggctgtgtttctgtgcaggtcaatgctggtccattagcatatgcaagagctttcttaaatgacagccaagctagcaagtatccacctaagaaagtgagtgagttgaaagacatgtttaggaaatttatacaagcatgcagcattgcacttgaactaaatgagcggctaattaaagaagatcaagttgagtaccatgaagggctaaagtcaaatttcagagacatggtaaaagaattatctgacattatccatgagcaggcaagtattaggatattacaagaagacacaatgcattctccctggatgagcaacacattacatgtattttgtgcaattagtggtacatcaagtgaccgaggttatggttccccaagatacgctgaagtgtgaggaaatgcagatgtacgtgacaatgagactgacctttctcaggaatatttggagctgtgcaaatgttaaaatttaaagatttgatatacatggagtgtttcttctcgacaccaaaattttcatgtgttccaacagggtgcttacatatttgtaaataagcaacttgaaagtgcctggaaaattgcaccactgtgcttggtttgtacttttttaggtaaatctatatgctgaaaagtagagctcaaaaacagtagttcaatttgcttaattattgcttaaaataatggtactatgtaaaattgtataatggaatacaataaaaggtaaaacttatttgtaattagaagtgaaagaaa

SEQ ID NO: 125821 - DNA, 6041 bp, Homo sapiens
  Payload ID: 4650
  Gene Symbol: DOCK11
  Gene Name: dedicator of cytokinesis 11
  ENST ID: ENST00000633080
  CDS Start-End: 1-5709
atgaaggtattcaagagacgatatttttacttgacccaacttcctgacggttcatatattctcaattcctataaagatgagaaaaattcaaaagaatcgaaaggttgcatctacttggacgcctgcattgatgttgttcagtgccccaaaatgcgccgtcatgcttttgaactcaagatgttagataaatatagccattatctggctgctgaaactgagcaggaaatggaggaatggttgataactttgaaaaagattattcagatcaacaccgacagtttagttcaagaaaaaaaggagacggtagaaacagcacaagatgatgaaactagcagccaaggaaaagccgagaacatcatggcaagtttggaaaggagcatgcatccggaactgatgaagtatggaagagaaactgaacaactaaacaaactcagtagaggagatggaagacagaatctcttttcttttgattcagaagttcagaggttggacttttcaggaattgaacctgatataaagccatttgaagaaaaatgcaataaacgtttcctggtgaattgccatgatttaactttcaatatcttgggccaaattggagacaatgcaaaaggaccacccacaaatgttgagcccttttttatcaatcttgccttatttgatgtaaagaacaattgtaagatttcagcagactttcatgtagacctgaatcccccatctgtccgtgaaatgctgtggggctcttcaacccaactggccagtgacggtagcccaaagggctcttcacccgaatcttacattcatggaattgccgaatctcagttacgctacatacaacagggaattttctcagtgacgaatccacatcctgaaatttttctagttgccagaattgaaaaggtactacagggaaacattacacactgtgcagaaccctatatcaaaaattctgatccagtaaagacggcccagaaggtgcacaggacagctaaacaagtgtgtagccgccttggacaatacagaatgcccttcgcttgggctgccagacccattttcaaagatactcaaggctctcttgatctggatgggagattttctcctctgtataaacaagacagtagcaagctttcaagtgaagacattctcaagttgctctcagaatataagaagccagaaaagaccaaactgcagattattcctgggcagctaaacatcacagtagaatgtgttcctgtggatttatcaaattgtattacttcttcatatgtgcccttgaagccttttgaaaagaattgccaaaatattactgtggaggttgaagagtttgttccagaaatgacaaaatattgttatccatttactatttacaaaaaccatctgtatgtatatcccctgcaattaaaatacgatagccagaaaacatttgccaaggcaaggaacattgcagtctgtgtggaattccgggattcagatgaaagtgacgctagtgccctaaagtgtatttatggaaaacctgcagggtctgtttttaccacaaatgcttatgctgttgtctcgcatcacaaccaaaatccagagttctatgatgagattaaaattgagcttcccattcacctacatcaaaaacatcatttgcttttcactttttatcatgtaagttgtgaaattaacacaaagggaacaaccaaaaagcaagacacagttgaaactccagttgggtttgcctgggtacctttgctgaaagatggtagaatcatcacatttgagcagcagctgccagtttccgccaatcttcccccaggctacttgaatctgaatgatgcagaatcaagaaggcaatgtaacgtggatattaaatgggtagatggtgcaaagcctttgttgaagattaaaagccacttagaatctaccatttacactcaagatctgcatgtgcacaaattcttccatcattgccagctgattcagtcaggctcgaaagaagttccaggggagctcattaaatatttaaagtgtttgcatgccatggagatccaagtcatgatacagtttctacctgtaattcttatgcaactcttccgagttctcacaaatatgacccatgaagatgacgttcctatcaactgcaccatggttctcttacatattgtatcaaagtgccatgaagaaggcttggatagttatctaagatcattcataaagtatagcttccgacctgaaaaaccgagtgctcctcaggcccagctgatacatgaaaccctggctactacgatgatagcaatattgaaacagtctgcagattttttatcaataaacaaattgctaaagtactcatggtttttctttgaaataattgcaaagtcaatggccacatacttgttggaagagaataagattaagcttccccgaggccagagatttcccgagacatatcatcatgtcttacattcactgcttcttgcaataattccccatgtgactattcggtatgcggagattcccgatgagtccagaaatgtgaactatagtttggctagcttcctgaagcgctgtttgacactaatggatagaggatttattttcaatttaataaatgactatatatctggattcagccccaaagatcctaaggttctggctgaatacaagtttgaatttctgcaaacaatttgcaatcacgaacattacattcctctgaacttgccaatggcatttgcaaaacctaaactgcagcgggttcaagattttttttcatttgcggtggaccgtttgacttcagtagattcaaatcttgaatacagtttatcagatgagtattgcaagcatcacttcttggttggtctacttctgagggaaacttccattgctcttcaggacaattatgagatcagatatacagctatctctgttataaagaatcttttgataaaacatgcatttgacacaagataccagcacaagaaccaacaagccaaaatagcacaattgtacctcccctttgttggactacttttggaaaatatacagcgattagcaggtcgagataccttgtattcttgtgcagccatgcctaattctgcatccagagatgagtttccatgtggctttacttcacctgccaatagagggagtctgagcactgacaaagacaccgcttatgggtcttttcaaaatggacatggaattaagagagaagattcaagaggttccctcatcccagaaggagcaacaggatttccagatcagggcaacactggtgaaaatacccgacagagttctacaaggagtagtgtatcccagtataaccgcctggatcagtatgaaatcagaagcctcctgatgtgctacctgtatatagtaaaaatgatttcagaagatactctcttaacttactggaataaagtatcacctcaggagctcataaacattcttatacttttagaagtatgcttgtttcactttagatatatggggaaaagaaacatagcaagggtgcatgatgcctggctgtcaaaacacttcggaatagaccgaaaatcgcaaaccatgcctgctcttcgaaacagatcaggagtaatgcaggcccggcttcagcatcttagtagcctagaaagttcatttacacttaatcacagttctacaacaactgaagcagacattttccaccaggcacttcttgaaggcaatacagctactgaagtttccctaacagtactagacaccatatcatttttcactcagtgcttcaagacccaacttttaaataatgatggccataacccattaatgaaaaaagtgtttgatatacatcttgcttttcttaaaaatggacaatctgaagtgtcgctgaaacatgtatttgcctcactgagagctttcatcagtaagtttccttcagcatttttcaaaggaagagtaaacatgtgtgctgcattttgctatgaggttttaaagtgctgcacatcgaagattagctcaaccaggaatgaagcatctgcacttttgtatcttttgatgagaaacaactttgagtataccaaaaggaaaacctttttgaggacacatctacagataataattgctgtaagccaactgatagctgatgtagcactaagcggaggatcaagatttcaggagtctttattcattatcaataattttgcaaatagtgacagacctatgaaggcaactgcctttcccgcagaagtcaaagacttgaccaagagaatccgcactgttcttatggccactgcccaaatgaaggagcatgagaaagaccctgaaatgctaattgatctccagtatagcttagccaagtcctatgcaagcaccccagagctcaggaaaacctggcttgatagcatggccaagattcatgtaaaaaatggagatttttcagaggctgcgatgtgttatgtccatgtagcagctctagttgcagagtttcttcatcgaaaaaaattatttcctaacggatgttcagcgttcaagaaaattactcccaatatagatgaagaaggagcaatgaaagaagatgctgggatgatggatgtccattatagtgaagaggtcttgctggagttgctagaacaatgtgtggatggcttatggaaggcagaacgttatgaaataatttctgagatttccaagttgatcgttccaatttatgagaaacgtcgtgagtttgagaaacttactcaagtttatagaactcttcatggagcttacacaaaaattctggaagttatgcatacaaaaaagagacttttaggcactttcttcagagttgccttttatggccaatctttttttgaagaagaagatggaaaggagtacatctataaagaaccaaagctcactggcctctcagaaatttccttgagacttgttaaactttatggtgaaaagtttggtacggagaatgtcaaaataattcaggattcagacaaggtaaatgccaaagagcttgatccaaaatatgctcatatacaagttacttatgtgaagccttactttgatgacaaagaactcacagaaaggaagaccgagtttgaaagaaatcataatatcagcagatttgtttttgaggccccttacactttatcaggcaaaaaacagggctgtatagaagaacagtgcaaacgccgtacaatcttgacaacttcaaactcgtttccttacgtgaagaagaggattcctattaactgtgaacagcagattaatttaaaaccaattgatgttgccactgatgaaataaaagataaaactgcagagctgcaaaagctttgctcctctactgacgtggacatgattcagctccaacttaaattgcagggctgtgtttctgtgcaggtcaatgctggtccattagcatatgcaagagctttcttaaatgacagccaagctagcaagtatccacctaagaaagtgagtgagttgaaagacatgtttaggaaatttatacaagcatgcagcattgcacttgaactaaatgagcggctaattaaagaagatcaagttgagtaccatgaagggctaaagtcaaatttcagagacatggtaaaagaattatctgacattatccatgagcagatattacaagaagacacaatgcattctccctggatgagcaacacattacatgtattttgtgcaattagtggtacatcaagtgaccgaggttatggttccccaagatacgctgaagtgtgaggaaatgcagatgtacgtgacaatgagactgacctttctcaggaatatttggagctgtgcaaatgttaaaatttaaagatttgatatacatggagtgtttcttctcgacaccaaaattttcatgtgttccaacagggtgcttacatatttgtaaataagcaacttgaaagtgcctggaaaattgcaccactgtgcttggtttgtacttttttaggtaaatctatatgctgaaaagtagagctcaaaaacagtagttcaatttgcttaattattgcttaaaataatggtactatgtaaaattgtataatggaatacaataaaaggtaaaactt

SEQ ID NO: 125822 - DNA, 593 bp, Homo sapiens
  Payload ID: 4650
  Gene Symbol: DOCK11
  Gene Name: dedicator of cytokinesis 11
  ENST ID: ENST00000632573
  CDS Start-End: 1-121
tgcacttgaactaaatgagcggctaattaaagaagatcaagttgagtaccatgaagggctaaagtcaaatttcagagacatggtaaaagaattatctgacattatccatgagcagctttgaagacttaagtcgatattacaagaagacacaatgcattctccctggatgagcaacacattacatgtattttgtgcaattagtggtacatcaagtgaccgaggttatggttccccaagatacgctgaagtgtgaggaaatgcagatgtacgtgacaatgagactgacctttctcaggaatatttggagctgtgcaaatgttaaaatttaaagatttgatatacatggagtgtttcttctcgacaccaaaattttcatgtgttccaacagggtgcttacatatttgtaaataagcaacttgaaagtgcctggaaaattgcaccactgtgcttggtttgtacttttttaggtaaatctatatgctgaaaagtagagctcaaaaacagtagttcaatttgcttaattattgcttaaaataatggtactatgtaaaattgtataatggaatacaataaaaggtaaaacttatttgtaa

SEQ ID NO: 125823 - DNA, 6097 bp, Homo sapiens
  Payload ID: 4651
  Gene Symbol: DOCK2
  Gene Name: dedicator of cytokinesis 2
  Uniprot ID: Q92608
  ENST ID: ENST00000256935
  CDS Start-End: 81-5573
aggaaggaagtggggccctgcggcgcccagccaccccctgacggcttccccacgggaggacgcgaggccccggcccagccatggccccctggcgcaaagctgacaaggagcggcacggcgtggccatatacaacttccaaggcagcggagccccccagctctccctgcagatcggcgatgtggtgcgaatacaggagacgtgtggagactggtataggggatacctcataaagcacaaaatgttacagggcatttttcctaagtcatttatccacatcaaggaagtgacagttgagaaaagaagaaatactgagaacatcattcctgcagaaattcctctggcacaagaagtgacaacgacactttgggaatggggaagcatctggaaacaactctatgtggccagcaaaaaggagcgttttctccaggtgcagtccatgatgtacgatctgatggagtggaggtcccagcttctctcaggaaccttacccaaggatgagctgaaggaactgaagcagaaagtcacgtccaaaattgactatggcaacaaaatccttgagcttgatttgattgtcagagatgaagacggaaatatcttggaccctgataataccagtgtcatcagcttgttccatgcacatgaggaagcaactgataaaatcacagagcgtatcaaagaagaaatgtcaaaagaccagccagattatgcaatgtattcccggatctcctcatcccccacccatagcctctatgtgtttgtgagaaactttgtgtgcagaattggggaagatgctgagctcttcatgtctctctacgaccccaacaagcaaacggtcataagtgagaactacctagtgcgatggggcagccggggcttccctaaggagattgagatgctcaacaatctgaaggtggtcttcacggatcttggaaacaaagacctcaacagggataaaatttacttgatttgtcaaatagtccgggtcggcaagatggatcttaaggatactggtgcaaagaagtgcacgcagggactgaggaggccctttggggtggcagttatggatataacagacatcatcaaggggaaagcagagagtgatgaagaaaagcagcacttcattccttttcacccggttacagctgagaatgacttcctacacagcctgctgggcaaagtcatagcctccaagggggacagtggagggcaaggcctctgggtgaccatgaagatgctggtgggtgacatcattcagattcgcaaggactatccacacctggtggacaggaccaccgtggtggccaggaagctgggattcccagagatcatcatgccaggggatgtcaggaacgacatctacattactctcttacaaggtgactttgacaagtacaacaagaccacacagaggaatgtggaagtcatcatgtgtgtgtgcgcggaggatggcaaaacgctgcctaatgcaatttgcgtgggagcaggggacaagcccatgaatgagtatcgctccgttgtgtactatcaagtcaaacagccacgctggatggaaacagtcaaggtggctgtccctattgaagacatgcagaggatccatctgcgattcatgtttcgacatcggtcatctctggaatctaaagataaaggagaaaagaactttgccatgtcctatgtgaagctgatgaaagaagatgggactactctacacgatggattccatgacttagttgtcctcaagggggacagcaagaagatggaggatgccagcgcatacctgacccttccttcttatcgacaccatgtggaaaacaagggggccacgctgagcaggagctccagcagtgttggggggctttctgtcagctcccgggatgtgttctccatttccaccctggtgtgctccacaaagctcactcagaatgtgggcttgctgggtttgctgaagtggcgtatgaagcctcaactgctacaggagaatttagaaaagttgaagattgtggatggagaggaagtggtgaagtttctccaggatactctggatgccctcttcaacatcatgatggagcattctcaaagtgatgaatatgacatcctcgtctttgatgccttgatttacataataggactcattgcagaccggaaatttcagcatttcaacaccgttctggaggcttacatccaacagcatttcagtgcgaccttggcttacaagaaattgatgacagtgctgaagacttacttggatacctccagcagaggggagcaatgtgagccaatcctaagaacgctgaaggctttggaatatgtgttcaagttcattgttcggtcgaggacattattttcacagctttatgaaggcaaagaacagatggagtttgaagaatccatgagacggctctttgaatccatcaacaatctgatgaaaagtcaatacaaaactaccatccttttgcaggtggcggctttgaaatacatcccatctgtcctgcatgatgtagaaatggtctttgatgcgaagttactcagccaactcctgtatgagttctacacctgcatccctcctgtgaaactccagaagcagaaagtacagtctatgaatgagatagtccagagcaacctctttaaaaagcaagaatgccgggacattctgcttcctgtcatcaccaaagagctgaaggagctgctggagcagaaggatgacatgcaacaccaggtcctggagaggaagtactgcgttgaattgctcaacagcatcttggaagtccttagctaccaggatgcggccttcacctaccaccatatccaggagatcatggtccagctgctgcggacagtgaaccggacagtcatcaccatgggccgggatcacattctgattagtcactttgtggcatgtatgacagccatcttaaaccagatgggtgaccagcactactccttctacattgagaccttccagaccagctctgaacttgtggacttcttgatggagaccttcatcatgttcaaggacctcattggaaagaacgtgtaccctggagactggatggccatgagcatggttcaaaacagggtcttcctgagagctatcaacaagtttgcagaaaccatgaaccagaagttcctagaacacacgaactttgagttccagctgtggaacaactattttcatctggcagtggcttttatcacccaggattctctgcagctggagcagttctcacacgccaaatacaacaaaatcctgaataagtatggggacatgagacggctaattggcttctccatccgtgatatgtggtacaagcttggtcagaacaaaatctgcttcatcccaggcatggtaggacctatattagagatgacacttatccctgaggctgagctccggaaagccaccataccaatcttcttcgacatgatgctgtgtgaatatcaaagaagtggggatttcaaaaagtttgaaaacgaaatcatcctgaagctggaccacgaggtagaagggggccgaggcgacgagcagtacatgcagctcctggagtcaatcctgatggaatgtgctgcagagcacccaaccattgccaagtcggtggagaacttcgtgaacctggtcaaaggcctcctggagaagctgctggattaccggggtgtgatgacagatgagagcaaagacaaccgcatgagctgcaccgtgaacctgctgaatttctacaaagataacaacagggaggagatgtacataaggtacctgtacaaactccgcgatcttcacctggactgtgacaattacacagaggctgcctacacgctccttctccacacctggcttctcaagtggtcggatgagcagtgtgcatcacaggtcatgcagacaggccagcagcacccccagacacaccggcagctgaaggagacgctctacgagaccatcataggctactttgacaaaggaaagatgtgggaagaggccataagtctgtgcaaggagctggcggaacagtacgagatggagatctttgactatgagctgctcagccagaacctgatccagcaggcaaaattctatgaaagcatcatgaaaatcctcaggcccaaaccagactactttgctgttggatactacggccagggattcccctccttcctgcggaacaaagtgttcatctaccgcgggaaggaatatgagcgaagagaagatttccagatgcagctgatgacccagttccccaatgcagagaagatgaacaccacctctgccccgggagatgatgtgaagaatgccccaggccagtatatccagtgcttcactgtccagcctgtcttggatgaacatcccaggttcaagaataagccagtgcctgaccagattataaacttctacaaatccaactacgtgcaaaggttccactactcccggcccgtgcgcagggggaccgtagacccagagaatgagtttgcttccatgtggattgagagaacctccttcgtgactgcatacaagctgccggggatcctgcgctggtttgaggtggtgcacatgtcgcagaccacaattagtcctctggagaatgccatagaaaccatgtccacggccaatgagaagatcctgatgatgataaaccagtaccagagtgatgagaccctccccatcaacccactctccatgctcctgaacgggattgtggaccctgctgtcatgggaggcttcgccaagtatgagaaggccttcttcactgaagagtatgtcagggaccaccctgaggaccaggacaagctgacccacctcaaggacctgattgcatggcagatccccttcttgggagctgggattaagatccatgagaaaagggtgtcagataacttgcgacccttccatgaccggatggaggaatgtttcaagaacctgaaaatgaaggtggagaaggagtacggtgtccgagagatgcctgactttgacgacaggagagtgggccgtcccaggtctatgctgcgctcatacagacagatgtccatcatctctctggcttccatgaattctgactgcagcacccccagcaagcctacctcagagagctttgacctggaattagcatcacccaagacgccgagagtggagcaggaggaaccgatctccccggggagcaccctgcctgaggtcaagctgcggaggtccaagaagaggacaaagagaagcagcgtagtttttgcggatgagaaagcagctgcagagtcggacctgaagcggctttccaggaagcatgagttcatgagtgacaccaacctctcggagcatgcggccatccccctcaaggcgtctgtcctctctcaaatgagctttgccagccagtccatgcctaccatcccagccctggcgctctcagtggcaggcatccctgggttggatgaggccaacacatctccccgcctcagccagaccttcctccaactctcagatggtgacaagaagacactcacacggaagaaggtcaatcagttcttcaagacaatgctggccagcaaatcggctgaagaaggcaaacagatcccagactcgctgtccacggacctgtgagctgctgctgactagggctgcatgggagagccagggaggggagtttctggaagaggaaagccatgcgtggaacatcgaagcctcagagagtgggagactgtccccatcagttgtccttacttagaggagacagagaggccaatcaggtcccagagcttgaatgctaacaagcccagcatcccctggggctgtgatcatggtggatgaggaagcctcaacgtagattcctgaactcaaggtaccagcaagaatgccttctcccagtgtgctctccccaacatcctaggcacagctttcataacccagtttcttaggtgtaagaaactgtttttatctcatttattaagtctcagaacttaacagaaaaggaagccttttaaatattctttttaattttattttagattaacagttttgtactttacatttttttatacaaccaaccagtttcttttctagccaatcatctctgaagagttgctgtttcttactgacaataaaaaatgttctcttggttcgaataa

SEQ ID NO: 125824 - DNA, 446 bp, Homo sapiens
  Payload ID: 4651
  Gene Symbol: DOCK2
  Gene Name: dedicator of cytokinesis 2
  ENST ID: ENST00000433448
  CDS Start-End: 1-168
ctgtggaacaactattttcatctggcagtggcttttatcacccaggattctctgcagctggagcagttctcacacgccaaatacaacaaaatcctgaataagtcagaacaaaatctgcttcatcccaggcatggtaggacctatattagagatgacacttatccctgaggctgagctccggaaagccaccataccaatcttcttcgacatgatgctgtgtgaatatcaaagaagtggggatttcaaaaagtttgaaaacgaaatcatcctgaagctggaccacgaggtagaagggggccgaggcgacgagcagtacatgcagctcctggagtcaatcctgatggaatgtgctgcagagcacccaaccattgccaagtcggtggagaacttcgtgaacctggtcaaaggcctcctggagaagctgctggattaccggggtgtgatga

SEQ ID NO: 125825 - DNA, 631 bp, Homo sapiens
  Payload ID: 4651
  Gene Symbol: DOCK2
  Gene Name: dedicator of cytokinesis 2
  ENST ID: ENST00000519628
  CDS Start-End: 1-486
aaatacatcccatctgtcctgcatgatgtagaaatggtctttgatgcgaagttactcagccaactcctgtatgagttctacacctgcatccctcctgtgaaactccagaagcagaaagtacagtctatgaatgagatagtccagagcaacctctttaaaaagcaagaatgccgggacattctgcttcctgtcatcaccaaagagctgaaggagctgctggagcagaaggatgacatgcaacaccaggtcctggagaggaagtactgcgttgaattgctcaacagcatcttggaagtccttagctaccaggatgcggccttcacctaccaccatatccaggagatcatggtccagctgctgcggacagtgaaccggacagtcatcaccatgggccgggatcacattctgattgatgcagctgatgataggactgaaccgattgggtgctacggagtattaaatgtgatagtatctgccaagggttagcacagggctgctcacgggatcagtgctcagtaaatgctagttatcatgcaatccttattgttagtttcattattatctgtatgataaattgattgtagtgtcatctgcaaataggtaaataaagcattatacattgccaaaacaa

SEQ ID NO: 125826 - DNA, 5656 bp, Homo sapiens
  Payload ID: 4651
  Gene Symbol: DOCK2
  Gene Name: dedicator of cytokinesis 2
  ENST ID: ENST00000524185
  CDS Start-End: 37-3132
cttccccacgggaggacgcgaggccccggcccagccatggccccctggcgcaaagctgacaaggagcggcacggcgtggccatatacaacttccaaggcagcggagccccccagctctccctgcagatcggcgatgtggtgcgaatacaggagacgtgtggagactggtataggggatacctcataaagcacaaaatgttacagggcatttttcctaagtcatttatccacatcaaggaagtgacagttgagaaaagaagaaatactgagaacatcattcctgcagaaattcctctggcacaagaagtgacaacgacactttgggaatggggaagcatctggaaacaactctatgtggccagcaaaaaggagcgttttctccaggtgcagtccatgatgtacgatctgatggagtggaggtcccagcttctctcaggaaccttacccaaggatgagctgaaggaactgaagcagaaagtcacgtccaaaattgactatggcaacaaaatccttgagcttgatttgattgtcagagatgaagacggaaatatcttggaccctgataataccagtgtcatcagcttgttccatgcacatgaggaagcaactgataaaatcacagagcgtatcaaagaagaaatgtcaaaagaccagccagattatgcaatgtattcccggatctcctcatcccccacccatagcctctatgtgtttgtgagaaactttgtgtgcagaattggggaagatgctgagctcttcatgtctctctacgaccccaacaagcaaacggtcataagtgagaactacctagtgcgatggggcagccggggcttccctaaggagattgagatgctcaacaatctgaaggtggtcttcacggatcttggaaacaaagacctcaacagggataaaatttacttgatttgtcaaatagtccgggtcggcaagatggatcttaaggatactggtgcaaagaagtgcacgcagggactgaggaggccctttggggtggcagttatggatataacagacatcatcaaggggaaagcagagagtgatgaagaaaagcagcacttcattccttttcacccggttacagctgagaatgacttcctacacagcctgctgggcaaagtcatagcctccaagggggacagtggagggcaaggcctctgggtgaccatgaagatgctggtgggtgacatcattcagattcgcaaggactatccacacctggtggacaggaccaccgtggtggccaggaagctgggattcccagagatcatcatgccaggggatgtcaggaacgacatctacattactctcttacaaggtgactttgacaagtacaacaagaccacacagaggaatgtggaagtcatcatgtgtgtgtgcgcggaggatggcaaaacgctgcctaatgcaatttgcgtgggagcaggggacaagcccatgaatgagtatcgctccgttgtgtactatcaagtcaaacagccacgctggatggaaacagtcaaggtggctgtccctattgaagacatgcagaggatccatctgcgattcatgtttcgacatcggtcatctctggaatctaaagataaaggagaaaagaactttgccatgtcctatgtgaagctgatgaaagaagatgggactactctacacgatggattccatgacttagttgtcctcaagggggacagcaagaagatggaggatgccagcgcatacctgacccttccttcttatcgacaccatgtggaaaacaagggggccacgctgagcaggagctccagcagtgttggggggctttctgtcagctcccgggatgtgttctccatttccaccctggtgtgctccacaaagctcactcagaatgtgggcttgctgggtttgctgaagtggcgtatgaagcctcaactgctacaggagaatttagaaaagttgaagattgtggatggagaggaagtggtgaagtttctccaggatactctggatgccctcttcaacatcatgatggagcattctcaaagtgatgaatatgacatcctcgtctttgatgccttgatttacataataggactcattgcagaccggaaatttcagcatttcaacaccgttctggaggcttacatccaacagcatttcagtgcgaccttggcttacaagaaattgatgacagtgctgaagacttacttggatacctccagcagaggggagcaatgtgagccaatcctaagaacgctgaaggctttggaatatgtgttcaagttcattgttcggtcgaggacattattttcacagctttatgaaggcaaagaacagatggagtttgaagaatccatgagacggctctttgaatccatcaacaatctgatgaaaagtcaatacaaaactaccatccttttgcaggtggcggctttgaaatacatcccatctgtcctgcatgatgtagaaatggtctttgatgcgaagttactcagccaactcctgtatgagttctacacctgcatccctcctgtgaaactccagaagcagaaagtacagtctatgaatgagatagtccagagcaacctctttaaaaagcaagaatgccgggacattctgcttcctgtcatcaccaaagagctgaaggagctgctggagcagaaggatgacatgcaacaccaggtcctggagaggaagtactgcgttgaattgctcaacagcatcttggaagtccttagctaccaggatgcggccttcacctaccaccatatccaggagatcatggtccagctgctgcggacagtgaaccggacagtcatcaccatgggccgggatcacattctgattagtcactttgtggcatgtatgacagccatcttaaaccagatgggtgaccagcactactccttctacattgagaccttccagaccagctctgaacttgtggacttcttgatggagaccttcatcatgttcaaggacctcattggaaagaacgtgtaccctggagactggatggccatgagcatggttcaaaacagggtcttcctgagagctatcaacaagtttgcagaaaccatgaaccagaagttcctagaacacacgaactttgagttccagggtttttccagaactggaatgtgacgaagggcttgctggaagaatccacttctgtggaacaactattttcatctggcagtggcttttatcacccaggattctctgcagctggagcagttctcacacgccaaatacaacaaaatcctgaataagtatggggacatgagacggctaattggcttctccatccgtgatatgtggtacaagcttggtcagaacaaaatctgcttcatcccaggcatggtaggacctatattagagatgacacttatccctgaggctgagctccggaaagccaccataccaatcttcttcgacatgatgctgtgtgaatatcaaagaagtggggatttcaaaaagtttgaaaacgaaatcatcctgaagctggaccacgaggtagaagggggccgaggcgacgagcagtacatgcagctcctggagtcaatcctgatggaatgtgctgcagagcacccaaccattgccaagtcggtggagaacttcgtgaacctggtcaaaggcctcctggagaagctgctggattaccggggtgtgatgacagatgagagcaaagacaaccgcatgagctgcaccgtgaacctgctgaatttctacaaagataacaacagggaggagatgtacataaggtacctgtacaaactccgcgatcttcacctggactgtgacaattacacagaggctgcctacacgctccttctccacacctggcttctcaagtggtcggatgagcagtgtgcatcacaggtcatgcagacaggccagcagcacccccagacacaccggcagctgaaggagacgctctacgagaccatcataggctactttgacaaaggaaagatgtgggaagaggccataagtctgtgcaaggagctggcggaacagtacgagatggagatctttgactatgagctgctcagccagaacctgatccagcaggcaaaattctatgaaagcatcatgaaaatcctcaggcccaaaccagactactttgctgttggatactacggccagggattcccctccttcctgcggaacaaagtgttcatctaccgcgggaaggaatatgagcgaagagaagatttccagatgcagctgatgacccagttccccaatgcagagaagatgaacaccacctctgccccgggagatgatgtgaagaatgccccaggccagtatatccagtgcttcactgtccagcctgtcttggatgaacatcccaggttcaagaataagccagtgcctgaccagattataaacttctacaaatccaactacgtgcaaaggttccactactcccggcccgtgcgcagggggaccgtagacccagagaatgagtttgcttccatgtggattgagagaacctccttcgtgactgcatacaagctgccggggatcctgcgctggtttgaggtggtgcacatgtcgcagaccacaattagtcctctggagaatgccatagaaaccatgtccacggccaatgagaagatcctgatgatgataaaccagtaccagagtgatgagaccctccccatcaacccactctccatgctcctgaacgggattgtggaccctgctgtcatgggaggcttcgccaagtatgagaaggccttcttcactgaagagtatgtcagggaccaccctgaggaccaggacaagctgacccacctcaaggacctgattgcatggcagatccccttcttgggagctgggattaagatccatgagaaaagggtgtcagataacttgcgacccttccatgaccggatggaggaatgtttcaagaacctgaaaatgaaggtggagaaggagtacggtgtccgagagatgcctgactttgacgacaggagagtgggccgtcccaggtctatgctgcgctcatacagacagatgtccatcatctctctggcttccatgaattctgactgcagcacccccagcaagcctacctcagagagctttgacctggaattagcatcacccaagacgccgagagtggagcaggaggaaccgatctccccggggagcaccctgcctgaggtcaagctgcggaggtccaagaagaggacaaagagaagcagcgtagtttttgcggatgagaaagcagctgcagagtcggacctgaagcggctttccaggaagcatgagttcatgagtgacaccaacctctcggagcatgcggccatccccctcaaggcgtctgtcctctctcaaatgagctttgccagccagtccatgcctaccatcccagccctggcgctctcagtggcaggcatccctgggttggatgaggccaacacatctccccgcctcagccagaccttcctccaactctcagatggtgacaagaagacactcacacggaagaaggtcaatcagttcttcaagacaatgctggccagcaaatcggctgaagaaggcaaacagatcccagactcgctgtccacggacctgtgagctgctgctgactagggctgcatgggagagccagggaggggagtttctggaagaggaaagccatgcgtggaacatc

SEQ ID NO: 125827 - DNA, 4654 bp, Homo sapiens
  Payload ID: 4651
  Gene Symbol: DOCK2
  Gene Name: dedicator of cytokinesis 2
  ENST ID: ENST00000520908
  CDS Start-End: 165-4133
aaaagacacagttaacaggcaagcagccatcttatctcctgtctgagccactctttcttccacttttgtcaccctttcaagtcactaccgagcaggctgagcagatgcacttatccaagatgagtagaatgcaatttgcgtgggagcaggggacaagcccatgaatgagtatcgctccgttgtgtactatcaagtcaaacagccacgctggatggaaacagtcaaggtggctgtccctattgaagacatgcagaggatccatctgcgattcatgtttcgacatcggtcatctctggaatggggacagcaagaagatggaggatgccagcgcatacctgacccttccttcttatcgacaccatgtggaaaacaagggggccacgctgagcaggagctccagcagtgttggggggctttctgtcagctcccgggatgtgttctccatttccaccctggtgtgctccacaaagctcactcagaatgtgggcttgctgggtttgctgaagtggcgtatgaagcctcaactgctacaggagaatttagaaaagttgaagattgtggatggagaggaagtggtgaagtttctccaggatactctggatgccctcttcaacatcatgatggagcattctcaaagtgatgaatatgacatcctcgtctttgatgccttgatttacataataggactcattgcagaccggaaatttcagcatttcaacaccgttctggaggcttacatccaacagcatttcagtgcgaccttggcttacaagaaattgatgacagtgctgaagacttacttggatacctccagcagaggggagcaatgtgagccaatcctaagaacgctgaaggctttggaatatgtgttcaagttcattgttcggtcgaggacattattttcacagctttatgaaggcaaagaacagatggagtttgaagaatccatgagacggctctttgaatccatcaacaatctgatgaaaagtcaatacaaaactaccatccttttgcaggtggcggctttgaaatacatcccatctgtcctgcatgatgtagaaatggtctttgatgcgaagttactcagccaactcctgtatgagttctacacctgcatccctcctgtgaaactccagaagcagaaagtacagtctatgaatgagatagtccagagcaacctctttaaaaagcaagaatgccgggacattctgcttcctgtcatcaccaaagagctgaaggagctgctggagcagaaggatgacatgcaacaccaggtcctggagaggaagtactgcgttgaattgctcaacagcatcttggaagtccttagctaccaggatgcggccttcacctaccaccatatccaggagatcatggtccagctgctgcggacagtgaaccggacagtcatcaccatgggccgggatcacattctgattagtcactttgtggcatgtatgacagccatcttaaaccagatgggtgaccagcactactccttctacattgagaccttccagaccagctctgaacttgtggacttcttgatggagaccttcatcatgttcaaggacctcattggaaagaacgtgtaccctggagactggatggccatgagcatggttcaaaacagggtcttcctgagagctatcaacaagtttgcagaaaccatgaaccagaagttcctagaacacacgaactttgagttccagctgtggaacaactattttcatctggcagtggcttttatcacccaggattctctgcagctggagcagttctcacacgccaaatacaacaaaatcctgaataagtatggggacatgagacggctaattggcttctccatccgtgatatgtggtacaagcttggtcagaacaaaatctgcttcatcccaggcatggtaggacctatattagagatgacacttatccctgaggctgagctccggaaagccaccataccaatcttcttcgacatgatgctgtgtgaatatcaaagaagtggggatttcaaaaagtttgaaaacgaaatcatcctgaagctggaccacgaggtagaagggggccgaggcgacgagcagtacatgcagctcctggagtcaatcctgatggaatgtgctgcagagcacccaaccattgccaagtcggtggagaacttcgtgaacctggtcaaaggcctcctggagaagctgctggattaccggggtgtgatgacagatgagagcaaagacaaccgcatgagctgcaccgtgaacctgctgaatttctacaaagataacaacagggaggagatgtacataaggtacctgtacaaactccgcgatcttcacctggactgtgacaattacacagaggctgcctacacgctccttctccacacctggcttctcaagtggtcggatgagcagtgtgcatcacaggtcatgcagacaggccagcagcacccccagacacaccggcagctgaaggagacgctctacgagaccatcataggctactttgacaaaggaaagatgtgggaagaggccataagtctgtgcaaggagctggcggaacagtacgagatggagatctttgactatgagctgctcagccagaacctgatccagcaggcaaaattctatgaaagcatcatgaaaatcctcaggcccaaaccagactactttgctgttggatactacggccagggattcccctccttcctgcggaacaaagtgttcatctaccgcgggaaggaatatgagcgaagagaagatttccagatgcagctgatgacccagttccccaatgcagagaagatgaacaccacctctgccccgggagatgatgtgaagaatgccccaggccagtatatccagtgcttcactgtccagcctgtcttggatgaacatcccaggttcaagaataagccagtgcctgaccagattataaacttctacaaatccaactacgtgcaaaggttccactactcccggcccgtgcgcagggggaccgtagacccagagaatgagtttgcttccatgtggattgagagaacctccttcgtgactgcatacaagctgccggggatcctgcgctggtttgaggtggtgcacatgtcgcagaccacaattagtcctctggagaatgccatagaaaccatgtccacggccaatgagaagatcctgatgatgataaaccagtaccagagtgatgagaccctccccatcaacccactctccatgctcctgaacgggattgtggaccctgctgtcatgggaggcttcgccaagtatgagaaggccttcttcactgaagagtatgtcagggaccaccctgaggaccaggacaagctgacccacctcaaggacctgattgcatggcagatccccttcttgggagctgggattaagatccatgagaaaagggtgtcagataacttgcgacccttccatgaccggatggaggaatgtttcaagaacctgaaaatgaaggtggagaaggagtacggtgtccgagagatgcctgactttgacgacaggagagtgggccgtcccaggtctatgctgcgctcatacagacagatgtccatcatctctctggcttccatgaattctgactgcagcacccccagcaagcctacctcagagagctttgacctggaattagcatcacccaagacgccgagagtggagcaggaggaaccgatctccccggggagcaccctgcctgaggtcaagctgcggaggtccaagaagaggacaaagagaagcagcgtagtttttgcggatgagaaagcagctgcagagtcggacctgaagcggctttccaggaagcatgagttcatgagtgacaccaacctctcggagcatgcggccatccccctcaaggcgtctgtcctctctcaaatgagctttgccagccagtccatgcctaccatcccagccctggcgctctcagtggcaggcatccctgggttggatgaggccaacacatctccccgcctcagccagaccttcctccaactctcagatggtgacaagaagacactcacacggaagaaggtcaatcagttcttcaagacaatgctggccagcaaatcggctgaagaaggcaaacagatcccagactcgctgtccacggacctgtgagctgctgctgactagggctgcatgggagagccagggaggggagtttctggaagaggaaagccatgcgtggaacatcgaagcctcagagagtgggagactgtccccatcagttgtccttacttagaggagacagagaggccaatcaggtcccagagcttgaatgctaacaagcccagcatcccctggggctgtgatcatggtggatgaggaagcctcaacgtagattcctgaactcaaggtaccagcaagaatgccttctcccagtgtgctctccccaacatcctaggcacagctttcataacccagtttcttaggtgtaagaaactgtttttatctcatttattaagtctcagaacttaacagaaaaggaagccttttaaatattctttttaattttattttagattaacagttttgtactttacatttttttatacaaccaaccagtttcttttctagccaatcatctctgaagagttgctgtttcttactgacaataaaaaatgttctcttggttcgaa

SEQ ID NO: 125828 - DNA, 1753 bp, Homo sapiens
  Payload ID: 4651
  Gene Symbol: DOCK2
  Gene Name: dedicator of cytokinesis 2
  ENST ID: ENST00000540750
  CDS Start-End: 164-1171
tacttctccagcctccctgatgagggaaaaatgctttctctaagcaattctgattttaattaataccaatccaggggatgtcaggaacgacatctacattactctcttacaaggtgactttgacaagtacaacaagaccacacagaggaatgtggaagtcatcatgtgtgtgtgcgcggaggatggcaaaacgctgcctgtggctgtccctattgaagacatgcagaggatccatctgcgattcatgtttcgacatcggtcatctctggaatctaaagataaaggagaaaagaactttgccatgtcctatgtgaagctgatgaaagaagatgggactactctacacgatggattccatgacttagttgtcctcaagggggacagcaagaagatggaggatgccagcgcatacctgacccttccttcttatcgacaccatgtggaaaacaagggggccacgctgagcaggagctccagcagtgttggggggctttctgtcagctcccgggatgtgttctccatttccaccctggtgtgctccacaaagctcactcagaatgtgggcttgctgggtttgctgaagtggcgtatgaagcctcaactggaatccatgagacggctctttgaatccatcaacaatctgatgaaaagtcaatacaaaactaccatccttttgcaggtggcggctttgaaatacatcccatctgtcctgcatgatgtagaaatggtctttgatgcgaagttactcagccaactcctgtatgagttctacacctgcatccctcctgtgaaactccagaagcagaaagtacagtctatgaatgagatagtccagagcaacctctttaaaaagcaagaatgccgggacattctgcttcctgtcatcaccaaagagctgaaggagctgctggagcagaaggatgacatgcaacaccaggtcctggagaggaagtactgcgttgaattgctcaacagcatcttggaagtccttagctaccaggatgcggccttcacctaccaccatatccaggagatcatggtccagctgctgcggacagtgaaccggacagtcatcaccatgggccgggatcacattctgattggagcttgctgcaactgcggattcccatcctccaccccacactctctgattcagtggctttggggctgaaacccagcaacaagtttccatagacacccaggaggttccgatgcagatggtccacgaccacgctttgggagcactgtctagggcctacatcttcaatgtaaaccctcacgatgcccttggctgagtggaactcagtgacaatcgaacattccactgagacctaatatccttcagatgagtctggcatctggaaggcagcatgctgtggaatctggcttgttggaagacagaactgtgttctgctgtggccgttgcaattactatttccagaataattgtgcaagtgcctcgcctctctcagcttcaattgcctaatctgaatgttgagcaagtgcctgacccttcctgagcaacagttccttcatctgtaacatgggggtactttaatcaatctcatcattgtgaggattaagtgtgaaaacaaaaggtacttcaagtgatcagtaaataatggatcctcggtaagtggtagctctcttctttctttcccttaagtttcagcccaacagatctctttcgtcagctgttatcattgtaaaaatcatcagttaaaggcaaataaactggcctccaattatgagg

SEQ ID NO: 125829 - DNA, 8755 bp, Homo sapiens
  Payload ID: 4652
  Gene Symbol: DOCK3
  Gene Name: dedicator of cytokinesis 3
  Uniprot ID: Q8IZD9
  ENST ID: ENST00000266037
  CDS Start-End: 24-6116
gcggggccgcgcccggcacggccatgtggacccccacggaggaggagaaatacggcgtagtgatatgcagctttcgaggatctgtccctcaagggttggtcttagaaataggagaaacagtccagattcttgaaaaatgtgaaggttggtacagaggagtttcaacaaagaagccaaatgtgaaggggatctttcctgcaaattacattcacttgaaaaaggcaattgtcagtaatagggggcagtatgaaactgtggttccacttgaagattctattgtgactgaggttacagcaactctacaagaatgggcaagtttgtggaaacagttgtatgtgaaacacaaagtagatcttttctacaaactacgccatgtgatgaatgaacttattgacctgcgaaggcagctactgtctggtcacctgactcaggatcaggtgcgggaggttaagcggcacatcaccgtgcgcctggactggggtaatgaacatttgggcctggacctggtgcctcggaaggactttgaagtagtggactcggaccagattagtgtctcagatctctataagatgcatttatctagccggcagagtgtacagcaaagcacatcccaggtagatacaatgcgcccacgtcatggggaaacatgtcggatgccagtgccacatcacttcttcctcagcctgaagagtttcacttacaatactattggggaagataccgatgtcttcttttccttatatgacatgagggaaggcaagcagatcagtgagcggtttctggtaagactgaacaagaatggtgggccgaggaacccagagaagatagaacgaatgtgtgccctttttacagatctgagcagcaaagatatgaagagagatttgtatatcgttgcccatgtgatccgaataggccggatgctcctgaacgactcaaagaaaggtcctcctcacctgcactacaggcgaccatatggctgtgcggtcctaagcatcttggatgtcctacagtcactcacagaagtaaaggaagaaaaggattttgttcttaaggtttacacgtgcaacaacgagagtgagtggtcccagatccacgagaacatcatccgaaagtccagtgccaagtactctgcccccagcgccagccatggtcttatcatttctctgcagcttcttcgtggagacatggaacagattcggagagaaaatcccatgatatttaataggggattggcaattacaagaaaattgggatttcctgatgtcattatgccaggtgatatccgcaatgacctgtacctaaccctggagaagggggatttcgagagaggaggaaagagtgtacaaaagaatattgaagtgaccatgtatgtgctttatgcagatggagaaatcttgaaggattgcatcagcttgggttcaggagagccaaataggagttcctaccactcctttgtcctctaccacagtaatagtcctcgctggggagaaattatcaaattgcctatccccattgaccggttccggggctcccacctgcgctttgagttcagacattgttccacaaaggacaaaggggaaaagaaactctttggctttgcattctcaaccctgatgcgtgatgatggcaccaccctctcagatgatattcacgagctttatgtgtacaagtgtgatgagaatagcacgtttaataaccatgctctgtacctgggcctgccctgctgcaaagaggactacaatggctgccctaatattccttctagcctcatcttccagcgcagcaccaaagagtctttcttcatctccactcagctctcctctaccaaactcacccagaatgtggacctcctagctctgctgaagtggaaagccttccccgaccggatcatggatgtactagggcggctgcggcatgtcagtggggaggaaattgttaagtttctgcaggacatcttagatacactctttgtgattttggatgataatacagagaagtacggcctgttggtttttcagtctctggtgttcatcatcaacctgctccgagacatcaagtattttcactttcgacctgtgatggacacgtatatccagaagcactttgctggagctctggcatacaaggagctcatccgctgtttgaagtggtatatggactgctcagcagaactgattcgacaggaccacattcaagaagctatgcgggccttggagtaccttttcaagttcattgtacagtcacggatcctgtactcacgagccacttgtggaatggaagaggaacaattcagatccagtatccaagaacttttccagtccatccggtttgtgctcagtctggacagccgaaactcagaaacactcctttttactcaggctgcactcctcaattctttcccaaccatctttgatgagcttctgcaaatgttcaccgtgcaagaggtggcagagtttgtgagagggacactggggagcatgcccagcactgtgcacattgggcagtcaatggacgtggtcaagctgcagtccattgccaggacagtggatagccgcctgttttctttctcagaatcccgccgcatcctgcttcctgtggttctccatcacattcaccttcacctgaggcagcagaaagagctgctaatttgctcagggattcttggcagcatcttctccatcgtcaagaccagctctctggaggcagatgtcatggaggaagtagagatgatggtggagagcctcctggacgtgctcttgcagactctgctcaccatcatgagcaaatcgcacgctcaggaggcggtaagagggcagcggtgcccgcagtgcacagccgagatcactggcgagtatgtgtcctgccttctctcactgctccgccagatgtgtgacacccatttccagcacctcctggacaacttccagagcaaagatgaactcaaggaatttctgctgaagattttttgcgtgttccggaacctgatgaagatgagtgtcttccctcgggactggatggtaatgagactgctcacaagcaatattatagtcactactgtccagtacctgtcctctgcactgcacaagaatttcacagagactgactttgactttaaggtgtggaattcttactttagcctggcagttctattcataaatcagccaagccttcagctagaaattatcacctcagccaaaaggaagaagattctagataagtatggggacatgcgtgtaatgatggcctatgaactgttcagcatgtggcagaatttgggtgaacataagatccactttattccgggaatgattggtccttttctgggtgtgacactggtcccacagccagaagtacggaatatcatgattcccatctttcatgacatgatggactgggagcagagaaaaaatggcaacttcaaacaggtggaggccgagttgattgacaagctggacagcatggtgtcagaagggaaaggtgacgagagctacagggagctcttcagcctactaacccagctgtttgggccctaccccagcctgctggagaaggttgaacaagaaacatggcgcgagaccggcatttcctttgtgacctcagtcacccgcctcatggaacgtcttcttgactacagggactgcatgaaaggagaggaaacagagaataagaagataggctgcactgttaacctgatgaatttttacaaatctgagattaacaaggaagaaatgtatatccgctacatccataagctttgtgacatgcacttgcaggccgaaaactacacagaggccgcatttaccctgctcctttactgtgagctgctgcagtgggaggaccggccactacgggaattcctccactacccatcgcagacagagtggcagcggaaggagggactgtgccggaagatcattcactacttcaacaaaggcaagagctgggagtttgggatcccactgtgcagggagctggcgtgtcagtacgagagcctctatgattaccagagcctcagctggattcggaaaatggaggccagctactatgacaacattatggagcagcaacgcctggagcctgagttctttcgggtcggcttctatggcaggaagtttcctttctttcttcggaacaaagaatacgtgtgccgtggccatgactacgagaggctggaggccttccagcagaggatgctcagtgagtttccgcaggctgtcgccatgcagcaccccaaccatcctgatgacgccatcctacagtgcgatgcccagtacttgcagatctatgcagtgacgcccattccagattatgtggatgttctgcagatggatagggtaccagatcgagtcaagagcttctatcgcgtcaacaatgtgaggaagttccggtatgacaggccttttcacaaaggccccaaggacaaggagaatgaattcaagagcctgtggattgaacgtaccacactgaccctgacccacagcttgcctggcatctctcggtggtttgaagtggagaggagggaactggtggaggtgagccctctggagaatgccatccaagtggttgagaataagaaccaggagctacgctccctgatcagccagtatcaacacaagcaggtgcatggcaacattaacctgctaagcatgtgcctgaatggtgtcattgatgcagctgtcaatggaggcattgcacgctatcaggaggccttctttgataaagattacatcaacaagcacccaggagatgctgagaagatcacccagctcaaggagcttatgcaggagcaggttcatgtccttggagttgggctagcagttcatgagaagtttgtgcacccagaaatgcggcctctgcataagaagctaattgatcagttccagatgatgcgggccagtctctaccatgagtttccaggtttggataagctaagtcctgcatgttcaggcaccagcaccccacggggaaatgttctggcatcccatagccccatgagtccggagagcatcaagatgacccaccggcacagccccatgaacttgatgggcacaggccgccattcatcatcctctctctcctcacatgcgtctagtgaagcaggaaacatggtgatgctgggtgacggctccatgggtgatgctcctgaggacctgtaccaccacatgcagctcgcgtatcccaaccccaggtaccaaggctcagtcaccaacgtctctgttctgtcctcgtcccaggcaagcccttcttcctccagcctgagttccactcactcagcaccatcccagatgattacctctgccccttccagtgcccgaggctctccctctctgccagataagtaccgccatgcccgtgaaatgatgttgttgctgcccacataccgggaccgcccaagcagtgccatgtatccagcagccatcctggagaacggacagccgccgaatttccagcgagccctgttccagcaagtggtcggagcctgcaaaccctgcagtgatcccaatctgtctgtggctgaaaaaggtcattactccctacactttgacgccttccaccaccctctgggtgatacccccccagccctccctgcccggaccctgcgcaagtctcctctccaccctatcccagcctcccccacaagcccccagtcaggtctggacggcagcaactctacgctgtccggcagtgccagcagcggcgtgtcctccttgagtgagagtaactttgggcactcctcggaggccccacctcgcactgacaccatggactccatgccaagtcaggcctggaatgctgacgaagatcttgagccaccctacctccctgtccactacagcctctctgagtctgccgtcctggactccatcaaggcccagccatgccgaagccactcagccccagggtgcgtcatccctcaggaccccatggacccgcctgcgctgccgcccaagccctaccacccccgcctgccggccctggagcacgatgagggggtgctgctgcgtgaagagactgagaggcctcgaggcctgcaccgcaaggctccattgcctcctgggagcgctaaggaggagcaggcccgcatggcctgggagcacggccgaggggagcagtgaggggcaacgaggcggctgggatgccgccctcagtaagcagcttgccaatcactccaggtctgaaaagcaagtcccccagccccaccccagggagccagagaggcttgcactcaggagagaaccacccccaagtctccgttctactgccgtgaactcatgtgttgccatgtacagaggccacagcagcatgaagggttgtggcttccctttttatttttttacatttccatttctatgggttttcctttctttcctttatgcagtagatgctttcttcctcctgcagttctggaccatgtggagctacatggagaaattgcacagacagaatcactttgccacactgcagggcccaggagtgggagcccaggccctccctccagggtagagatgcaccgaatggaaattgcactaaggacctcttcctttgctgtatggacagaagagttcatggttgcattcagggattgcaaggaccatatagacatgtcacaggtggaaaaagggccacaagccgttttgcacaaatgcctgcccacctgcccctcttccatccaggagtgtgctactgaggggctggctggaccaacctgctggctcaggcatgtgactggcctaactgcatgcccagggcactgccagggttcaatgggccagccgtctcctactccaccttggatttttctctccatcacatcatttctgaccatttgctcccttccattcttgaaacacctcatgccccacaggagccccagtggtgactggatctgcaagggttatctcccgccctctggggtttgagtggaggtatggagccagagaggctatcctagctaccttcctcctagggggagctggtccccttcctatgtggtagagagactggtgtaagagtgtggggtgtggcaggcgccggaaatcctcaaagctttcagaagcatccagaatgcctaccatcagctcctgaatcagggattttcagcactacctctgagccatggggttggctgcccagccaggcttccaggccctgaggacatgtggtcaggttcagcaggctcctgggtaaagagggtgggagggggcttctccttttggaagcagatagccatgcaggtagaattgtcatctcccaagtggccacatacagcaacccactccaggccatggggaccaccactcagggttcggggctggcaggagggtagtttctccagtctccccagtctgttggtgtctttataggaaactataaagcagagcagtggtgtctttagaggaaactcattcaagtcagggcactgattttcctctcagtttattatttggggggatagggtcaggtgggtatagtagtactttaccagggtgcttttaagttactttaaaaaaagcctacaaaatattttttttcttttatttgctcgagttcacattaatgatggtcacaaggctgccttgttgggcaggcgtattgcccccagttcctcttctgctggcctgtatgacctccacagccaggccctgggcccaagccccttgtcccttctccactgcccctctttccagacagtaaaggccatggtcagtgtgtttttctcttgtaaacaaaccccagcttgtttaacagaaatgctaataacctactgggaaagatggaggtctaaattacctccagggtttttctgggggtttatcaccagtgtgggtcccttctgataccaccaggttcactccaggcagagtggggcggaaggctgctgaggatatgggtcagttacagcagccctcacctcaaagggctggcctgcttctcagcctacattcatttgcaagcttcaatctctggaccatctggtgttcacaggtgttagagggttaggggttaggggctagttttggatttgattcataggtaggagggcttagattttaaggcacttctgaaagtcaatccctggacaaggcagtcatcacataagaacagctaccttctccacttggtggcacaagaggtagggaggggagtatgggttcatttggcttcgcattatgcaaggtgaaaccgtttgttttccctctccattttccctaactaaatgaaaaggacacattctgaaatcccttttgttggagaataagtcagtctgaggggaaatgggaggccagagatgagaaccctttgaaaagattgtaaaatactgattttcattctttcaagcttatttgtaaatacctatttgaatgctgtgtatttgtacaggaatttgagcaaaaaatgtatagagtgtgatgtccaattggtattcagcactataaatgtgtttttaacctcccgcattctgtgcttatttaaaacaaggaaacttctaaccatttcttttgtgtattcatgtttaaagaaaaaaagtgatttaaaaatgatcttacctgtaccagaaaagcaaagttaaaggaaacaaaatttgtaccattgtcccaagaggtattttactgtatatattgtggtagcatgttcaaaatccaacaagtaatgtgaattttagatgtaaatatctgccacttgattttttttccccctttccccacttccttgactgctgtgatgtgaattaaagataaatacgtgatactga

SEQ ID NO: 125830 - DNA, 673 bp, Homo sapiens
  Payload ID: 4653
  Gene Symbol: DOCK4
  Gene Name: dedicator of cytokinesis 4
  ENST ID: ENST00000428053
  CDS Start-End: 21-161
attgcagtaaaattgcttggatgaagatgcattccactgagagtctactaaagaaaattgagcgggaaacatggcgggaaagtggcgtttcattaattgctactgtaactcgtctaatggagaggttgttagattacagaacttctataagactgaactgaacaaggaggagatgtatatacgctacattcacaaactctatgatctgcatctcaaagcacagaactttacagaagctgcatataccctcctcttatatgacgagctactggaatggtctgatcggcccctcagggagttcctgacctaccccatgcaaacagaatggcagcgcaaagagcacctgcacctcaccatcatccagaactttgacagaggcaaatgttgggagaatggcattatcttgtgccggaagattgcagagcagtatgagagttattatgactacagaaacctgagcaagatgcggatgatggaagcctctttgtatgacaaaattatggaccagcaacgtcttgaaccagagttcttcagagttggattttatggaaaaaaatttccatttttcttaagaaataaggagtttgtgtgtcgagggcatgactacgagaggctggaagccttccaacagagaatgctgaacgagttcccccatgccatcgccatgcagcac

SEQ ID NO: 125831 - DNA, 5999 bp, Homo sapiens
  Payload ID: 4653
  Gene Symbol: DOCK4
  Gene Name: dedicator of cytokinesis 4
  ENST ID: ENST00000445943
  CDS Start-End: 1-5999
ttattgccagtttccgaggaaccgttccatatggcctgtcattggaaattggagatacagttcagatcctggagaagtgtgatggctggtacagaggatttgccttaaaaaacccaaatatcaagggtatatttccttccagctacgttcacttgaaaaatgcctgtgtaaagaacaaaggacaatttgaaatggttattcccactgaagactctgttatcacagaaatgacatcaacattaagagactggggaaccatgtggaaacaactctatgtgcgtaatgaaggcgatctcttccaccggctgtggcacatcatgaatgaaatcctggacctgaggcggcaggtgctggtgggccacctcacccacgaccggatgaaggacgtgaagcgccacattactgcccggcttgactggggcaatgaacaactgggactggacctggtgcctaggaaagagtacgcaatggtggatccggaagacatcagcattactgagctctaccgattgatggaacatcgacatcggaagaaagacaccccggtgcaggccagcagtcaccacctctttgtccagatgaagagcctcatgtgttccaacctgggagaggagctggaggtcatcttctcactctttgacagtaaagagaaccggccaatcagtgagagatttttcttgaggctgaatagaaacgggcttcccaaagcccctgataaaccggaacgacattgctccctctttgtggatttgggcagcagtgagctaagaaaggacatttatatcaccgtgcacattatccgaatcggtcgaatgggagcaggagaaaaaaagaatgcctgtagtgtccagtaccgacgaccctttggctgtgcagttcttagcatcgctgacctgctaacaggagagacaaaggatgacctcattctgaaagtatacatgtgtaacacagagagtgagtggtaccaaatccatgagaacatcatcaaaaagctgaatgcacgttataacttgactggctccaatgcaggtttagcagtttccttacagctattgcacggagacattgaacaaatcagaagggaatattcatcagtattttctcatggagtatccataacaaggaagctgggattttcaaatattattatgcctggtgaaatgaggaatgatttatatatcactattgaaaggggagaatttgagaaaggagggaagagcgtggccagaaatgtggaagttacgatgttcattgtagacagtagtggccaaaccctgaaggattttatctccttcggctctggggagccaccagccagtgagtaccactcctttgtgctttaccataacaacagtcccaggtggtctgaactgctgaaacttcccattcctgtggataaattccggggtgcacacatccgcttcgagtttcggcattgttccacaaaggagaaaggagagaagaagttgtttgggttttcttttgtccctctgatgcaagaagatggtaggactcttccagatggcactcatgagctcatcgtgcataagtgtgaagaaaacacaaatcttcaggatactacccgctacctcaaacttcccttttccaagggcattttccttgggaataataatcaagccatgaaggccacaaaggagtccttttgtattacatcttttctctgttccacaaaactcacacaaaatggtgatatgcttgatcttttgaaatggagaacccacccagacaagatcactggctgtctctctaaattaaaagaaattgatggctcagagatagtaaagtttctgcaggatacactggataccttatttggaattttagatgaaaattcccaaaaatatgggtctaaagtgtttgattctttggttcacataataaatttgctgcaagatagcaaatttcatcattttaaacctgtaatggacacttacattgagagtcattttgctggggcacttgcatacagagatctcatcaaagtgctcaaatggtacgtggaccggatcacagaagcagagcggcaagagcatatccaggaggtgctgaaggcacaagaatacatttttaagtatatagttcaatctcgaaggctgttttcccttgccactggtgggcaaaacgaagaggagttccgctgctgcattcaggagcttctcatgtcagtccgtttctttctttcgcaagagagcaaagggtctggagcattatctcagtcacaggctgtgtttctgagctctttccctgccgtgtactcagaactgttgaagctctttgatgtccgggaagtagccaacttggtccaggacaccctgggcagtctgccgaccatcctgcatgtggatgattccctgcaggccatcaaactgcagtgcattggcaaaaccgtggaaagccagctttataccaacccagattcccgatacattcttctgcctgtcgtgttacatcacctccacattcacttgcaagaacagaaggacctgatcatgtgtgcacgtatccttagcaacgtattttgtcttatcaagaaaaatagctcagaaaaatctgtgctggaggaaatagatgtgatagtggccagcttgctggatattctgctgaggaccatattggagatcaccagccgacctcagccatccagctcagcaatgcggttccagttccaggatgtcactagaacaggctttctgaatagggagtcttcacatggcagtactacattgagcaccttttcagtctgtgcagacacatatggaaaagtgcccatgacaagtagacacactggggagtttgttgcttgtctcctgtccctattacgacaaatgacagatagacattatcaacagcttcttgatagttttaatacaaaggaagaactaagggatttcctgctgcagatatttactgtgttccgaatattgatacgcccggagatgtttccaaaggactggactgttatgcgcttggttgctaacaatgttattattacaacagttctatacctctcagatgcacttcgtaagaacttcttaaatgaaaactttgattataagatctgggattcctacttttacctcgcagtcatttttataaaccagttgtgtctgcagttggagatgttcacaccttccaagaagaaaaaggtgttagaaaagtatggtgacatgcgggtaacaatgggttgtgaaattttcagcatgtggcaaaacctaggagagcacaagcttcattttatccctgccctgattggccccttcctagaagtgaccttgataccccagccagatcttcggaatgtcatgattccaatttttcatgatatgatggactgggagcagaggcggagtggcaactttaaacaggtggaagccaagctaattgacaaactggatagcctgatgtcagaaggcaaaggtgacgaaacataccgcgagctcttcaacagtataattccactatttggtccctatcctagtctactaaagaaaattgagcgggaaacatggcgggaaagtggcgtttcattaattgctactgtaactcgtctaatggagaggttgttagattacagggactgcatgaaaatgggagaggtagatggcaaaaagattggctgcacagttagccttctgaacttctataagactgaactgaacaaggaggagatgtatatacgctacattcacaaactctatgatctgcatctcaaagcacagaactttacagaagctgcatataccctcctcttatatgacgagctactggaatggtctgatcggcccctcagggagttcctgacctaccccatgcaaacagaatggcagcgcaaagagcacctgcacctcaccatcatccagaactttgacagaggcaaatgttgggagaatggcattatcttgtgccggaagattgcagagcagtatgagagttattatgactacagaaacctgagcaagatgcggatgatggaagcctctttgtatgacaaaattatggaccagcaacgtcttgaaccagagttcttcagagttggattttatggaaaaaaatttccatttttcttaagaaataaggagtttgtgtgtcgagggcatgactacgagaggctggaagccttccaacagagaatgctgaacgagttcccccatgccatcgccatgcagcacgccaaccagcccgatgagaccatcttccaggcagaagctcagtatttgcagatatatgctgtgactcccattccagagagccaggaggtcctgcagagagagggtgttccggacaacatcaaaagcttctataaagtgaatcacatctggaaattccgctatgaccgaccatttcacaaaggcacaaaagataaagagaatgaattcaagagtctctgggtggagagaacgtcattatacttggtgcagagtttgcctggcatctctcgctggtttgaagtggaaaagcgtgaagtggtagaaatgagtcctctggaaaatgcaattgaagtgctagaaaataagaatcagcagctgaagactctgattagtcagtgtcagacaagacagatgcagaatattaatcccctgactatgtgcctgaatggagttatagatgctgcagttaatggtggcgtttccaggtatcaagaggcattctttgtcaaagaatatatcttaagtcaccctgaagatggggagaaaattgcacgattaagagagctgatgcttgagcaggcacagattctggaatttggtttggccgtgcatgagaagtttgtacctcaagatatgagaccccttcacaaaaagctggttgaccaattctttgtgatgaagtcgagcttagggatacaggagttctctgcttgtatgcaagccagtcctgtccattttcctaatggaagccctcgtgtgtgtagaaactcagcacctgcttctgtgagcccagatggtaccagggtaattcctagacgcagcccgttaagttacccagctgtcaaccgatattcttcctcctcactgtcctcacaagcttctgctgaagtaagcaatattacagggcaatcagaaagctctgatgaagtctttaacatgcagccaagtccatctacctcaagcttgagttctactcactcggcttcacctaatgtgacaagttctgctccatcgagtgccagagcttctcctttgttgtctgacaaacacaaacattcccgagaaaactcttgcctgtcaccaagagagagaccatgcagtgccatctatccaacacctgtggagccttcgcagaggatgctgtttaatcatattggagacggggccttgccacgcagtgacccaaatctctctgcacctgaaaaagctgtgaaccccacccctagcagctggagcctggacagtgggaaggaagccaagaacatgtcggatagtgggaaacttatctctccccctgtccctccaagacccacacagactgcttcaccagcaagacacacgacatcagtatccccctcgcctgccgggcgatctccattgaagggctctgtgcagtctttcaccccctctccagtggagtaccactcgccaggactcatctccaactcccctgtcttgtcgggcagctacagcagtgggatttcttctctcagccggtgcagcacgtcggaaacctcaggctttgaaaatcaggtgaatgaacagtcggcccccctgccggtgccagtgccggtgcccgtgccgagctacggcggggaggagccagtgcgcaaggagagcaagactccgcccccgtacagcgtctacgagcggactctgcggcgccccgtcccgctacctcacagcctctccatccccgtcacgtcggagccgcccgcgctgccccccaagcctctggcagcgcgatccagccacctggagaatggggcccggaggactgaccccggcccgcggcccaggcccctgccccgcaaggtctctcagttataa

SEQ ID NO: 125832 - DNA, 662 bp, Homo sapiens
  Payload ID: 4653
  Gene Symbol: DOCK4
  Gene Name: dedicator of cytokinesis 4
  ENST ID: ENST00000417165
  CDS Start-End: 269-662
aaactgggctgcaagcatttgtgtttgaatcaacaaatagatagatgtctttggcagcagtaaacgctacccagccaggagtgtgaagtcatgtaactctatctagattagtcccttagaattccaaagggttgcctgctattaaccgtagctgataatgtcactttcacaaaatttaccatggctttttccttggcacaaagaaatacgttttaacttgcctagaaatcctacttgtgaaggggaggaaagagaataatagttgggtatgtttcaggtggaagccaagctaattgacaaactggatagcctgatgtcagaaggcaaaggtgacgaaacataccgcgagctcttcaacagtataattccactatttggtccctatcctagtctactaaagaaaattgagcgggaaacatggcgggaaagtggcgtttcattaattgctactgtaactcgtctaatggagaggttgttagattacagggactgcatgaaaatgggagaggtagatggcaaaaagattggctgcacagttagccttctgaacttctataagactgaactgaacaaggaggagatgtatatacgctacattcacaaactctatgatctgcatctcaaagcacagaactttacagaagctgcatataccctcctct

SEQ ID NO: 125833 - DNA, 6212 bp, Homo sapiens
  Payload ID: 4653
  Gene Symbol: DOCK4
  Gene Name: dedicator of cytokinesis 4
  Uniprot ID: Q8N1I0
  ENST ID: ENST00000437633
  CDS Start-End: 258-6158
cagaacaatgactgcgccgccgggtacccgggagcgcgtcggaggactgtgagcagccgccgccgggagagctgcgggcggcgcagtgtcaacgctgggctcgggagcctccagcgcagatcctgcccagcgcccgcagcccgcgcgaagccgctgggctccggcactgcagcgctgctcggggactgtgcattgttgtgagccggagaaggggcgcggggattacaaagcctgaagaccccggagcccctttagccatgtggatacctacggagcacgagaaatacggcgtggttattgccagtttccgaggaaccgttccatatggcctgtcattggaaattggagatacagttcagatcctggagaagtgtgatggctggtacagaggatttgccttaaaaaacccaaatatcaagggtatatttccttccagctacgttcacttgaaaaatgcctgtgtaaagaacaaaggacaatttgaaatggttattcccactgaagactctgttatcacagaaatgacatcaacattaagagactggggaaccatgtggaaacaactctatgtgcgtaatgaaggcgatctcttccaccggctgtggcacatcatgaatgaaatcctggacctgaggcggcaggtgctggtgggccacctcacccacgaccggatgaaggacgtgaagcgccacattactgcccggcttgactggggcaatgaacaactgggactggacctggtgcctaggaaagagtacgcaatggtggatccggaagacatcagcattactgagctctaccgattgatggaacatcgacatcggaagaaagacaccccggtgcaggccagcagtcaccacctctttgtccagatgaagagcctcatgtgttccaacctgggagaggagctggaggtcatcttctcactctttgacagtaaagagaaccggccaatcagtgagagatttttcttgaggctgaatagaaacgggcttcccaaagcccctgataaaccggaacgacattgctccctctttgtggatttgggcagcagtgagctaagaaaggacatttatatcaccgtgcacattatccgaatcggtcgaatgggagcaggagaaaaaaagaatgcctgtagtgtccagtaccgacgaccctttggctgtgcagttcttagcatcgctgacctgctaacaggagagacaaaggatgacctcattctgaaagtatacatgtgtaacacagagagtgagtggtaccaaatccatgagaacatcatcaaaaagctgaatgcacgttataacttgactggctccaatgcaggtttagcagtttccttacagctattgcacggagacattgaacaaatcagaagggaatattcatcagtattttctcatggagtatccataacaaggaagctgggattttcaaatattattatgcctggtgaaatgaggaatgatttatatatcactattgaaaggggagaatttgagaaaggagggaagagcgtggccagaaatgtggaagttacgatgttcattgtagacagtagtggccaaaccctgaaggattttatctccttcggctctggggagccaccagccagtgagtaccactcctttgtgctttaccataacaacagtcccaggtggtctgaactgctgaaacttcccattcctgtggataaattccggggtgcacacatccgcttcgagtttcggcattgttccacaaaggagaaaggagagaagaagttgtttgggttttcttttgtccctctgatgcaagaagatggtaggactcttccagatggcactcatgagctcatcgtgcataagtgtgaagaaaacacaaatcttcaggatactacccgctacctcaaacttcccttttccaagggcattttccttgggaataataatcaagccatgaaggccacaaaggagtccttttgtattacatcttttctctgttccacaaaactcacacaaaatggtgatatgcttgatcttttgaaatggagaacccacccagacaagatcactggctgtctctctaaattaaaagaaattgatggctcagagatagtaaagtttctgcaggatacactggataccttatttggaattttagatgaaaattcccaaaaatatgggtctaaagtgtttgattctttggttcacataataaatttgctgcaagatagcaaatttcatcattttaaacctgtaatggacacttacattgagagtcattttgctggggcacttgcatacagagatctcatcaaagtgctcaaatggtacgtggaccggatcacagaagcagagcggcaagagcatatccaggaggtgctgaaggcacaagaatacatttttaagtatatagttcaatctcgaaggctgttttcccttgccactggtgggcaaaacgaagaggagttccgctgctgcattcaggagcttctcatgtcagtccgtttctttctttcgcaagagagcaaagggtctggagcattatctcagtcacaggctgtgtttctgagctctttccctgccgtgtactcagaactgttgaagctctttgatgtccgggaagtagccaacttggtccaggacaccctgggcagtctgccgaccatcctgcatgtggatgattccctgcaggccatcaaactgcagtgcattggcaaaaccgtggaaagccagctttataccaacccagattcccgatacattcttctgcctgtcgtgttacatcacctccacattcacttgcaagaacagaaggacctgatcatgtgtgcacgtatccttagcaacgtattttgtcttatcaagaaaaatagctcagaaaaatctgtgctggaggaaatagatgtgatagtggccagcttgctggatattctgctgaggaccatattggagatcaccagccgacctcagccatccagctcagcaatgcggttccagttccaggatgtcactggggagtttgttgcttgtctcctgtccctattacgacaaatgacagatagacattatcaacagcttcttgatagttttaatacaaaggaagaactaagggatttcctgctgcagatatttactgtgttccgaatattgatacgcccggagatgtttccaaaggactggactgttatgcgcttggttgctaacaatgttattattacaacagttctatacctctcagatgcacttcgtaagaacttcttaaatgaaaactttgattataagatctgggattcctacttttacctcgcagtcatttttataaaccagttgtgtctgcagttggagatgttcacaccttccaagaagaaaaaggtgttagaaaagtatggtgacatgcgggtaacaatgggttgtgaaattttcagcatgtggcaaaacctaggagagcacaagcttcattttatccctgccctgattggccccttcctagaagtgaccttgataccccagccagatcttcggaatgtcatgattccaatttttcatgatatgatggactgggagcagaggcggagtggcaactttaaacaggtggaagccaagctaattgacaaactggatagcctgatgtcagaaggcaaaggtgacgaaacataccgcgagctcttcaacagtattctactaaagaaaattgagcgggaaacatggcgggaaagtggcgtttcattaattgctactgtaactcgtctaatggagaggttgttagattacagggactgcatgaaaatgggagaggtagatggcaaaaagattggctgcacagttagccttctgaacttctataagactgaactgaacaaggaggagatgtatatacgctacattcacaaactctatgatctgcatctcaaagcacagaactttacagaagctgcatataccctcctcttatatgacgagctactggaatggtctgatcggcccctcagggagttcctgacctaccccatgcaaacagaatggcagcgcaaagagcacctgcacctcaccatcatccagaactttgacagaggcaaatgttgggagaatggcattatcttgtgccggaagattgcagagcagtatgagagttattatgactacagaaacctgagcaagatgcggatgatggaagcctctttgtatgacaaaattatggaccagcaacgtcttgaaccagagttcttcagagttggattttatggaaaaaaatttccatttttcttaagaaataaggagtttgtgtgtcgagggcatgactacgagaggctggaagccttccaacagagaatgctgaacgagttcccccatgccatcgccatgcagcacgccaaccagcccgatgagaccatcttccaggcagaagctcagtatttgcagatatatgctgtgactcccattccagagagccaggaggtcctgcagagagagggtgttccggacaacatcaaaagcttctataaagtgaatcacatctggaaattccgctatgaccgaccatttcacaaaggcacaaaagataaagagaatgaattcaagagtctctgggtggagagaacgtcattatacttggtgcagagtttgcctggcatctctcgctggtttgaagtggaaaagcgtgaagtggtagaaatgagtcctctggaaaatgcaattgaagtgctagaaaataagaatcagcagctgaagactctgattagtcagtgtcagacaagacagatgcagaatattaatcccctgactatgtgcctgaatggagttatagatgctgcagttaatggtggcgtttccaggtatcaagaggcattctttgtcaaagaatatatcttaagtcaccctgaagatggggagaaaattgcacgattaagagagctgatgcttgagcaggcacagattctggaatttggtttggccgtgcatgagaagtttgtacctcaagatatgagaccccttcacaaaaagctggttgaccaattctttgtgatgaagtcgagcttagggatacaggagttctctgcttgtatgcaagccagtcctgtccattttcctaatggaagccctcgtgtgtgtagaaactcagcacctgcttctgtgagcccagatggtaccagggtaattcctagacgcagcccgttaagttacccagctgtcaaccgatattcttcctcctcactgtcctcacaagcttctgctgaagtaagcaatattacagggcaatcagaaagctctgatgaagtctttaacatgcagccaagtccatctacctcaagcttgagttctactcactcggcttcacctaatgtgacaagttctgctccatcgagtgccagagcttctcctttgttgtctgacaaacacaaacattcccgagaaaactcttgcctgtcaccaagagagagaccatgcagtgccatctatccaacacctgtggagccttcgcagaggatgctgtttaatcatattggagacggggccttgccacgcagtgacccaaatctctctgcacctgaaaaagctgtgaaccccacccctagcagctggagcctggacagtgggaaggaagccaagaacatgtcggatagtgggaaacttatctctccccctgtccctccaagacccacacagactgcttcaccagcaagacacacgacatcagtatccccctcgcctgccgggcgatctccattgaagggctctgtgcagtctttcaccccctctccagtggagtaccactcgccaggactcatctccaactcccctgtcttgtcgggcagctacagcagtgggatttcttctctcagccggtgcagcacgtcggaaacctcaggctttgaaaatcaggtgaatgaacagtcggcccccctgccggtgccagtgccggtgcccgtgccgagctacggcggggaggagccagtgcgcaaggagagcaagactccgcccccgtacagcgtctacgagcggactctgcggcgccccgtcccgctacctcacagcctctccatccccgtcacgtcggagccgcccgcgctgccccccaagcctctggcagcgcgatccagccacctggagaatggggcccggaggactgaccccggcccgcggcccaggcccctgccccgcaaggtctctcagttataagtcacttttctatgtacctgcgatgcattctttgcccgtttacaaaataagaag

SEQ ID NO: 125834 - DNA, 600 bp, Homo sapiens
  Payload ID: 4653
  Gene Symbol: DOCK4
  Gene Name: dedicator of cytokinesis 4
  ENST ID: ENST00000437129
  CDS Start-End: 23-600
gcattgcagtaaaattgcttggatgaagatgcattccactgagagtctactaaagaaaattgagcgggaaacatggcgggaaagtggcgtttcattaattgctactgtaactcgtctaatggagaggttgttagattacagggactgcatgaaaatgggagaggtagatggcaaaaagattggctgcacagttagccttctgaacttctataagactgaactgaacaaggaggagatgtatatacgctacattcacaaactctatgatctgcatctcaaagcacagaactttacagaagctgcatataccctcctcttatatgacgagctactggaatggtctgatcggcccctcagggagttcctgacctaccccatgcaaacagaatggcagcgcaaagagcacctgcacctcaccatcatccagaactttgacagaggcaaatgttgggagaatggcattatcttgtgccggaagattgcagagcagtatgagagttattatgactacagaaacctgagcaagatgcggatgatggaagcctctttgtatgacaaaattatggaccagcaacgtcttgaaccagagttcttcagagt

SEQ ID NO: 125835 - DNA, 637 bp, Homo sapiens
  Payload ID: 4653
  Gene Symbol: DOCK4
  Gene Name: dedicator of cytokinesis 4
  ENST ID: ENST00000450156
  CDS Start-End: 74-637
aaaaaacgcaaaacgtcataccagctgtacaaggattttcctgtagcagttgcattgcagtaaaattgcttggatgaagatgcattccactgagagaattccactatttggtccctatcctagtctactaaagaaaattgagcgggaaacatggcgggaaagtggcgtttcattaattgctactgtaactcgtctaatggagaggttgttagattacagggactgcatgaaaatgggagaggtagatggcaaaaagattggctgcacagttagccttctgaacttctataagactgaactgaacaaggaggagatgtatatacgctacattcacaaactctatgatctgcatctcaaagcacagaactttacagaagctgcatataccctcctcttatatgacgagctactggaatggtctgatcggcccctcagggagttcctgacctaccccatgcaaacagaatggcagcgcaaagagcacctgcacctcaccatcatccagaactttgacagaggcaaatgttgggagaatggcattatcttgtgccggaagattgcagagcagtatgagagttattatgactacagaaacctgagcaagatgcggatgatggaagcctctttgtatgacaaa

SEQ ID NO: 125836 - DNA, 7997 bp, Homo sapiens
  Payload ID: 4653
  Gene Symbol: DOCK4
  Gene Name: dedicator of cytokinesis 4
  Uniprot ID: Q8N1I0
  ENST ID: ENST00000428084
  CDS Start-End: 274-6201
gcttagttcagtgaatcagaacaatgactgcgccgccgggtacccgggagcgcgtcggaggactgtgagcagccgccgccgggagagctgcgggcggcgcagtgtcaacgctgggctcgggagcctccagcgcagatcctgcccagcgcccgcagcccgcgcgaagccgctgggctccggcactgcagcgctgctcggggactgtgcattgttgtgagccggagaaggggcgcggggattacaaagcctgaagaccccggagcccctttagccatgtggatacctacggagcacgagaaatacggcgtggttattgccagtttccgaggaaccgttccatatggcctgtcattggaaattggagatacagttcagatcctggagaagtgtgatggctggtacagaggatttgccttaaaaaacccaaatatcaagggtatatttccttccagctacgttcacttgaaaaatgcctgtgtaaagaacaaaggacaatttgaaatggttattcccactgaagactctgttatcacagaaatgacatcaacattaagagactggggaaccatgtggaaacaactctatgtgcgtaatgaaggcgatctcttccaccggctgtggcacatcatgaatgaaatcctggacctgaggcggcaggtgctggtgggccacctcacccacgaccggatgaaggacgtgaagcgccacattactgcccggcttgactggggcaatgaacaactgggactggacctggtgcctaggaaagagtacgcaatggtggatccggaagacatcagcattactgagctctaccgattgatggaacatcgacatcggaagaaagacaccccggtgcaggccagcagtcaccacctctttgtccagatgaagagcctcatgtgttccaacctgggagaggagctggaggtcatcttctcactctttgacagtaaagagaaccggccaatcagtgagagatttttcttgaggctgaatagaaacgggcttcccaaagcccctgataaaccggaacgacattgctccctctttgtggatttgggcagcagtgagctaagaaaggacatttatatcaccgtgcacattatccgaatcggtcgaatgggagcaggagaaaaaaagaatgcctgtagtgtccagtaccgacgaccctttggctgtgcagttcttagcatcgctgacctgctaacaggagagacaaaggatgacctcattctgaaagtatacatgtgtaacacagagagtgagtggtaccaaatccatgagaacatcatcaaaaagctgaatgcacgttataacttgactggctccaatgcaggtttagcagtttccttacagctattgcacggagacattgaacaaatcagaagggaatattcatcagtattttctcatggagtatccataacaaggaagctgggattttcaaatattattatgcctggtgaaatgaggaatgatttatatatcactattgaaaggggagaatttgagaaaggagggaagagcgtggccagaaatgtggaagttacgatgttcattgtagacagtagtggccaaaccctgaaggattttatctccttcggctctggggagccaccagccagtgagtaccactcctttgtgctttaccataacaacagtcccaggtggtctgaactgctgaaacttcccattcctgtggataaattccggggtgcacacatccgcttcgagtttcggcattgttccacaaaggagaaaggagagaagaagttgtttgggttttcttttgtccctctgatgcaagaagatggtaggactcttccagatggcactcatgagctcatcgtgcataagtgtgaagaaaacacaaatcttcaggatactacccgctacctcaaacttcccttttccaagggcattttccttgggaataataatcaagccatgaaggccacaaaggagtccttttgtattacatcttttctctgttccacaaaactcacacaaaatggtgatatgcttgatcttttgaaatggagaacccacccagacaagatcactggctgtctctctaaattaaaagaaattgatggctcagagatagtaaagtttctgcaggatacactggataccttatttggaattttagatgaaaattcccaaaaatatgggtctaaagtgtttgattctttggttcacataataaatttgctgcaagatagcaaatttcatcattttaaacctgtaatggacacttacattgagagtcattttgctggggcacttgcatacagagatctcatcaaagtgctcaaatggtacgtggaccggatcacagaagcagagcggcaagagcatatccaggaggtgctgaaggcacaagaatacatttttaagtatatagttcaatctcgaaggctgttttcccttgccactggtgggcaaaacgaagaggagttccgctgctgcattcaggagcttctcatgtcagtccgtttctttctttcgcaagagagcaaagggtctggagcattatctcagtcacaggctgtgtttctgagctctttccctgccgtgtactcagaactgttgaagctctttgatgtccgggaagtagccaacttggtccaggacaccctgggcagtctgccgaccatcctgcatgtggatgattccctgcaggccatcaaactgcagtgcattggcaaaaccgtggaaagccagctttataccaacccagattcccgatacattcttctgcctgtcgtgttacatcacctccacattcacttgcaagaacagaaggacctgatcatgtgtgcacgtatccttagcaacgtattttgtcttatcaagaaaaatagctcagaaaaatctgtgctggaggaaatagatgtgatagtggccagcttgctggatattctgctgaggaccatattggagatcaccagccgacctcagccatccagctcagcaatgcggttccagttccaggatgtcactggggagtttgttgcttgtctcctgtccctattacgacaaatgacagatagacattatcaacagcttcttgatagttttaatacaaaggaagaactaagggatttcctgctgcagatatttactgtgttccgaatattgatacgcccggagatgtttccaaaggactggactgttatgcgcttggttgctaacaatgttattattacaacagttctatacctctcagatgcacttcgtaagaacttcttaaatgaaaactttgattataagatctgggattcctacttttacctcgcagtcatttttataaaccagttgtgtctgcagttggagatgttcacaccttccaagaagaaaaaggtgttagaaaagtatggtgacatgcgggtaacaatgggttgtgaaattttcagcatgtggcaaaacctaggagagcacaagcttcattttatccctgccctgattggccccttcctagaagtgaccttgataccccagccagatcttcggaatgtcatgattccaatttttcatgatatgatggactgggagcagaggcggagtggcaactttaaacaggtggaagccaagctaattgacaaactggatagcctgatgtcagaaggcaaaggtgacgaaacataccgcgagctcttcaacagtataattccactatttggtccctatcctagtctactaaagaaaattgagcgggaaacatggcgggaaagtggcgtttcattaattgctactgtaactcgtctaatggagaggttgttagattacagggactgcatgaaaatgggagaggtagatggcaaaaagattggctgcacagttagccttctgaacttctataagactgaactgaacaaggaggagatgtatatacgctacattcacaaactctatgatctgcatctcaaagcacagaactttacagaagctgcatataccctcctcttatatgacgagctactggaatggtctgatcggcccctcagggagttcctgacctaccccatgcaaacagaatggcagcgcaaagagcacctgcacctcaccatcatccagaactttgacagaggcaaatgttgggagaatggcattatcttgtgccggaagattgcagagcagtatgagagttattatgactacagaaacctgagcaagatgcggatgatggaagcctctttgtatgacaaaattatggaccagcaacgtcttgaaccagagttcttcagagttggattttatggaaaaaaatttccatttttcttaagaaataaggagtttgtgtgtcgagggcatgactacgagaggctggaagccttccaacagagaatgctgaacgagttcccccatgccatcgccatgcagcacgccaaccagcccgatgagaccatcttccaggcagaagctcagtatttgcagatatatgctgtgactcccattccagagagccaggaggtcctgcagagagagggtgttccggacaacatcaaaagcttctataaagtgaatcacatctggaaattccgctatgaccgaccatttcacaaaggcacaaaagataaagagaatgaattcaagagtctctgggtggagagaacgtcattatacttggtgcagagtttgcctggcatctctcgctggtttgaagtggaaaagcgtgaagtggtagaaatgagtcctctggaaaatgcaattgaagtgctagaaaataagaatcagcagctgaagactctgattagtcagtgtcagacaagacagatgcagaatattaatcccctgactatgtgcctgaatggagttatagatgctgcagttaatggtggcgtttccaggtatcaagaggcattctttgtcaaagaatatatcttaagtcaccctgaagatggggagaaaattgcacgattaagagagctgatgcttgagcaggcacagattctggaatttggtttggccgtgcatgagaagtttgtacctcaagatatgagaccccttcacaaaaagctggttgaccaattctttgtgatgaagtcgagcttagggatacaggagttctctgcttgtatgcaagccagtcctgtccattttcctaatggaagccctcgtgtgtgtagaaactcagcacctgcttctgtgagcccagatggtaccagggtaattcctagacgcagcccgttaagttacccagctgtcaaccgatattcttcctcctcactgtcctcacaagcttctgctgaagtaagcaatattacagggcaatcagaaagctctgatgaagtctttaacatgcagccaagtccatctacctcaagcttgagttctactcactcggcttcacctaatgtgacaagttctgctccatcgagtgccagagcttctcctttgttgtctgacaaacacaaacattcccgagaaaactcttgcctgtcaccaagagagagaccatgcagtgccatctatccaacacctgtggagccttcgcagaggatgctgtttaatcatattggagacggggccttgccacgcagtgacccaaatctctctgcacctgaaaaagctgtgaaccccacccctagcagctggagcctggacagtgggaaggaagccaagaacatgtcggatagtgggaaacttatctctccccctgtccctccaagacccacacagactgcttcaccagcaagacacacgacatcagtatccccctcgcctgccgggcgatctccattgaagggctctgtgcagtctttcaccccctctccagtggagtaccactcgccaggactcatctccaactcccctgtcttgtcgggcagctacagcagtgggatttcttctctcagccggtgcagcacgtcggaaacctcaggctttgaaaatcaggtgaatgaacagtcggcccccctgccggtgccagtgccggtgcccgtgccgagctacggcggggaggagccagtgcgcaaggagagcaagactccgcccccgtacagcgtctacgagcggactctgcggcgccccgtcccgctacctcacagcctctccatccccgtcacgtcggagccgcccgcgctgccccccaagcctctggcagcgcgatccagccacctggagaatggggcccggaggactgaccccggcccgcggcccaggcccctgccccgcaaggtctctcagttataagtcacttttctatgtacctgcgatgcattctttgcccgtttacaaaataagaagtatgatgagaagacatttagtgtaggcactttaataacttactcagctccttcgatgaatggaattaaaacttgcttattaaatatcatgttgcacaatattaaaagttgctgatctaaaacgccagatgttaaatgaagtatggctgaatttcattaaaacgtttctcatttggaagtggtaaatagtgataaagactccttttgtacctttttatgttcacttttttttatatagtttaatcttaaaaccaatacgatattgtcaaacgatacaatgtgtgacaatgttgtatcgtttttactgaatacttgatacttggagaaagcttattaagtcagtgcacatcctaacacagtggtccttattttagaagacttctgtaaataaggcaaggtttatcagtgcagatcatcagaattaaagttcaagcaggcgagcaagacagtatacttaaggggttgcaaagcttgggactggaaattgttttgttcttgaaacaaaatacttctttaaggttgcttttgctgtttgactgctgtctacattcgtaaaattctattttgtgaattggtagctaaatcccttactaccctgacaccgtggtatctactgtatttcttttcaaggtgcaatttgcttcagagttccaatcagctagattaagcaagaggctccagaagaaatgtttacttgaattttgcgcttcctttcttgatagtttcctatataaaatttgtcattgaacaagagcaaatgctgaagtattaatgaggcacaaatgactgtgccccattagcaagaattcaggaatcaatacagacagtattaaattaatagcttaagtgaagaaaaaaaaaacttagtgaaaatgtattagcacgattaaatggcaaaaggacttataaaaggcaagggcattaactttcagtcctgcacaaaataaaaaattcctcacgactctccacttttaccagtggagtttgtcttagctgacctgtcgtctttctcttgaaggaggattgctgtagacttctctagcttgaatattgcaacatagcatcttaggtctagatagggatgctaatgccagttgtagaagtgtgaaaaaagcaccttgtatgtagtaatgtattttatatctttgttttttcttttactgactgtttataacactcaattgacaatagatatgaactgtattttaaatcatactgttaaatattttccctcttttgttgggaagctcattttagtttaaccatgtttgttttgttggtagcttacctggaaggcagtgaccacttttttatattctcttaatgaaaccattcagcaggtatatgctgttgaggctggttatagaggttttctataataaatgttcaagtatttttgtatataactggttaattttaataagagataccattatgtgtaaaaaaaagtaaaaataaacgcaaacagttgttgatgcagtatgattgttataattatgccaaatactttacgtatggaaaaagaatatttgtacatatgtgcttttaacaattctgccatattgactttacaattttgaatgtcggaaaaattaatatatgttaaatatttatgtttagtgaaagtgttcataattgagaaaaggaacatatgcattttagctttgtatcttgcaagttttgcagtcagaaattttttgaactagcttttgcttttgataacacttcgtgtttgtaaccaca

SEQ ID NO: 125837 - DNA, 6333 bp, Homo sapiens
  Payload ID: 4653
  Gene Symbol: DOCK4
  Gene Name: dedicator of cytokinesis 4
  ENST ID: ENST00000423057
  CDS Start-End: 1-4169
agggcattttccttgggaataataatcaagccatgaaggccacaaaggagtccttttgtattacatcttttctctgttccacaaaactcacacaaaatggtgatatgcttgatcttttgaaatggagaacccacccagacaagatcactggctgtctctctaaattaaaagaaattgatggctcagagatagtaaagtttctgcaggatacactggataccttatttggaattttagatgaaaattcccaaaaatatgggtctaaagtgtttgattctttggttcacataataaatttgctgcaagatagcaaatttcatcattttaaacctgtaatggacacttacattgagagtcattttgctggggcacttgcatacagagatctcatcaaagtgctcaaatggtacgtggaccggatcacagaagcagagcggcaagagcatatccaggaggtgctgaaggcacaagaatacatttttaagtatatagttcaatctcgaaggctgttttcccttgccactggtgggcaaaacgaagaggagttccgctgctgcattcaggagcttctcatgtcagtccgtttctttctttcgcaagagagcaaagggtctggagcattatctcagtcacaggctgtgtttctgagctctttccctgccgtgtactcagaactgttgaagctctttgatgtccgggaagtagccaacttggtccaggacaccctgggcagtctgccgaccatcctgcatgtggatgattccctgcaggccatcaaactgcagtgcattggcaaaaccgtggaaagccagctttataccaacccagattcccgatacattcttctgcctgtcgtgttacatcacctccacattcacttgcaagaacagaaggacctgatcatgtgtgcacgtatccttagcaacgtattttgtcttatcaagaaaaatagctcagaaaaatctgtgctggaggaaatagatgtgatagtggccagcttgctggatattctgctgaggaccatattggagatcaccagccgacctcagccatccagctcagcaatgcggttccagttccaggatgtcactggggagtttgttgcttgtctcctgtccctattacgacaaatgacagatagacattatcaacagcttcttgatagttttaatacaaaggaagaactaagggatttcctgctgcagatatttactgtgttccgaatattgatacgcccggagatgtttccaaaggactggactgttatgcgcttggttgctaacaatgttattattacaacagttctatacctctcagatgcacttcgtaagaacttcttaaatgaaaactttgattataagatctgggattcctacttttacctcgcagtcatttttataaaccagttgtgtctgcagttggagatgttcacaccttccaagaagaaaaaggtgttagaaaagtatggtgacatgcgggtaacaatgggttgtgaaattttcagcatgtggcaaaacctaggagagcacaagcttcattttatccctgccctgattggccccttcctagaagtgaccttgataccccagccagatcttcggaatgtcatgattccaatttttcatgatatgatggactgggagcagaggcggagtggcaactttaaacaggtggaagccaagctaattgacaaactggatagcctgatgtcagaaggcaaaggtgacgaaacataccgcgagctcttcaacagtataattccactatttggtccctatcctagtctactaaagaaaattgagcgggaaacatggcgggaaagtggcgtttcattaattgctactgtaactcgtctaatggagaggttgttagattacagggactgcatgaaaatgggagaggtagatggcaaaaagattggctgcacagttagccttctgaacttctataagactgaactgaacaaggaggagatgtatatacgctacattcacaaactctatgatctgcatctcaaagcacagaactttacagaagctgcatataccctcctcttatatgacgagctactggaatggtctgatcggcccctcagggagttcctgacctaccccatgcaaacagaatggcagcgcaaagagcacctgcacctcaccatcatccagaactttgacagaggcaaatgttgggagaatggcattatcttgtgccggaagattgcagagcagtatgagagttattatgactacagaaacctgagcaagatgcggatgatggaagcctctttgtatgacaaaattatggaccagcaacgtcttgaaccagagttcttcagagttggattttatggaaaaaaatttccatttttcttaagaaataaggagtttgtgtgtcgagggcatgactacgagaggctggaagccttccaacagagaatgctgaacgagttcccccatgccatcgccatgcagcacgccaaccagcccgatgagaccatcttccaggcagaagctcagtatttgcagatatatgctgtgactcccattccagagagccaggaggtcctgcagagagagggtgttccggacaacatcaaaagcttctataaagtgaatcacatctggaaattccgctatgaccgaccatttcacaaaggcacaaaagataaagagaatgaattcaagagtctctgggtggagagaacgtcattatacttggtgcagagtttgcctggcatctctcgctggtttgaagtggaaaagcgtgaagtggtagaaatgagtcctctggaaaatgcaattgaagtgctagaaaataagaatcagcagctgaagactctgattagtcagtgtcagacaagacagatgcagaatattaatcccctgactatgtgcctgaatggagttatagatgctgcagttaatggtggcgtttccaggtatcaagaggcattctttgtcaaagaatatatcttaagtcaccctgaagatggggagaaaattgcacgattaagagagctgatgcttgagcaggcacagattctggaatttggtttggccgtgcatgagaagtttgtacctcaagatatgagaccccttcacaaaaagctggttgaccaattctttgtgatgaagtcgagcttagggatacaggagttctctgcttgtatgcaagccagtcctgtccattttcctaatggaagccctcgtgtgtgtagaaactcagcacctgcttctgtgagcccagatggtaccagggtaattcctagacgcagcccgttaagttacccagctgtcaaccgatattcttcctcctcactgtcctcacaagcttctgctgaagtaagcaatattacagggcaatcagaaagctctgatgaagtctttaacatgcagccaagtccatctacctcaagcttgagttctactcactcggcttcacctaatgtgacaagttctgctccatcgagtgccagagcttctcctttgttgtctgacaaacacaaacattcccgagaaaactcttgcctgtcaccaagagagagaccatgcagtgccatctatccaacacctgtggagccttcgcagaggatgctgtttaatcatattggagacggggccttgccacgcagtgacccaaatctctctgcacctgaaaaagcttcaccagcaagacacacgacatcagtatccccctcgcctgccgggcgatctccattgaagggctctgtgcagtctttcaccccctctccagtggagtaccactcgccaggactcatctccaactcccctgtcttgtcgggcagctacagcagtgggatttcttctctcagccggtgcagcacgtcggaaacctcaggctttgaaaatcaggtgaatgaacagtcggcccccctgccggtgccagtgccggtgcccgtgccgagctacggcggggaggagccagtgcgcaaggagagcaagactccgcccccgtacagcgtctacgagcggactctgcggcgccccgtcccgctacctcacagcctctccatccccgtcacgtcggagccgcccgcgctgccccccaagcctctggcagcgcgatccagccacctggagaatggggcccggaggactgaccccggcccgcggcccaggcccctgccccgcaaggtctctcagttataagtcacttttctatgtacctgcgatgcattctttgcccgtttacaaaataagaagtatgatgagaagacatttagtgtaggcactttaataacttactcagctccttcgatgaatggaattaaaacttgcttattaaatatcatgttgcacaatattaaaagttgctgatctaaaacgccagatgttaaatgaagtatggctgaatttcattaaaacgtttctcatttggaagtggtaaatagtgataaagactccttttgtacctttttatgttcacttttttttatatagtttaatcttaaaaccaatacgatattgtcaaacgatacaatgtgtgacaatgttgtatcgtttttactgaatacttgatacttggagaaagcttattaagtcagtgcacatcctaacacagtggtccttattttagaagacttctgtaaataaggcaaggtttatcagtgcagatcatcagaattaaagttcaagcaggcgagcaagacagtatacttaaggggttgcaaagcttgggactggaaattgttttgttcttgaaacaaaatacttctttaaggttgcttttgctgtttgactgctgtctacattcgtaaaattctattttgtgaattggtagctaaatcccttactaccctgacaccgtggtatctactgtatttcttttcaaggtgcaatttgcttcagagttccaatcagctagattaagcaagaggctccagaagaaatgtttacttgaattttgcgcttcctttcttgatagtttcctatataaaatttgtcattgaacaagagcaaatgctgaagtattaatgaggcacaaatgactgtgccccattagcaagaattcaggaatcaatacagacagtattaaattaatagcttaagtgaagaaaaaaaaaacttagtgaaaatgtattagcacgattaaatggcaaaaggacttataaaaggcaagggcattaactttcagtcctgcacaaaataaaaaattcctcacgactctccacttttaccagtggagtttgtcttagctgacctgtcgtctttctcttgaaggaggattgctgtagacttctctagcttgaatattgcaacatagcatcttaggtctagatagggatgctaatgccagttgtagaagtgtgaaaaaagcaccttgtatgtagtaatgtattttatatctttgttttttcttttactgactgtttataacactcaattgacaatagatatgaactgtattttaaatcatactgttaaatattttccctcttttgttgggaagctcattttagtttaaccatgtttgttttgttggtagcttacctggaaggcagtgaccacttttttatattctcttaatgaaaccattcagcaggtatatgctgttgaggctggttatagaggttttctataataaatgttcaagtatttttgtatataactggttaattttaataagagataccattatgtgtaaaaaaaagtaaaaataaacgcaaacagttgttgatgcagtatgattgttataattatgccaaatactttacgtatggaaaaagaatatttgtacatatgtgcttttaacaattctgccatattgactttacaattttgaatgtcggaaaaattaatatatgttaaatatttatgtttagtgaaagtgttcataattgagaaaaggaacatatgcattttagctttgtatcttgcaagttttgcagtcagaaattttttgaactagcttttgcttttgataacacttcgtgtttgtaaccacattcatatatatatacatatatatgtgaagctccatatttctgttgctttaaagaagtaaaaccttccatttaaataagatgacatgcataagataacaaagcttccttgatttccttttcctgtgtaatttaatagatttgttgactagtgcttgggcacattataaatcagtgttatttgctcttggagccattttttaaaaaaaattttggcagtgagcagttgaatttatcttgaatttatcatgtgtgtgtatttctgaagcagctacatagcagaacattttaagagattctgttagcccacatgttcatgttggttgctgctgaatggtaaatattaaataaaattaccagattaatcttaa

SEQ ID NO: 125838 - DNA, 4941 bp, Homo sapiens
  Payload ID: 4653
  Gene Symbol: DOCK4
  Gene Name: dedicator of cytokinesis 4
  ENST ID: ENST00000494651
  CDS Start-End: 1-3285
gttattgccagtttccgaggaaccgttccatatggcctgtcattggaaattggagatacagttcagatcctggagaagtgtgatggctggtacagaggatttgccttaaaaaacccaaatatcaagggtatatttccttccagctacgttcacttgaaaaatgcctgtgtaaagaacaaaggacaatttgaaatggttattcccactgaagactctgttatcacagaaatgacatcaacattaagagactggggaaccatgtggaaacaactctatgtgcgtaatgaaggcgatctcttccaccggctgtggcacatcatgaatgaaatcctggacctgaggcggcaggtgctggtgggccacctcacccacgaccggatgaaggacgtgaagcgccacattactgcccggcttgactggggcaatgaacaactgggactggacctggtgcctaggaaagagtacgcaatggtggatccggaagacatcagcattactgagctctaccgattgatggaacatcgacatcggaagaaagacaccccggtgcaggccagcagtcaccacctctttgtccagatgaagagcctcatgtgttccaacctgggagaggagctggaggtcatcttctcactctttgacagtaaagagaaccggccaatcagtgagagatttttcttgaggctgaatagaaacgggcttcccaaagcccctgataaaccggaacgacattgctccctctttgtggatttgggcagcagtgagctaagaaaggacatttatatcaccgtgcacattatccgaatcggtcgaatgggagcaggagaaaaaaagaatgcctgtagtgtccagtaccgacgaccctttggctgtgcagttcttagcatcgctgacctgctaacaggagagacaaaggatgacctcattctgaaagtatacatgtgtaacacagagagtgagtggtaccaaatccatgagaacatcatcaaaaagctgaatgcacgttataacttgactggctccaatgcaggtttagcagtttccttacagctattgcacggagacattgaacaaatcagaagggaatattcatcagtattttctcatggagtatccataacaaggaagctgggattttcaaatattattatgcctggtgaaatgaggaatgatttatatatcactattgaaaggggagaatttgagaaaggagggaagagcgtggccagaaatgtggaagttacgatgttcattgtagacagtagtggccaaaccctgaaggattttatctccttcggctctggggagccaccagccagtgagtaccactcctttgtgctttaccataacaacagtcccaggtggtctgaactgctgaaacttcccattcctgtggataaattccggggtgcacacatccgcttcgagtttcggcattgttccacaaaggagaaaggagagaagaagttgtttgggttttcttttgtccctctgatgcaagaagatggtaggactcttccagatggcactcatgagctcatcgtgcataagtgtgaagaaaacacaaatcttcaggatactacccgctacctcaaacttcccttttccaagggcattttccttgggaataataatcaagccatgaaggccacaaaggagtccttttgtattacatcttttctctgttccacaaaactcacacaaaatggtgatatgcttgatcttttgaaatggagaacccacccagacaagatcactggctgtctctctaaattaaaagaaattgatggctcagagatagtaaagtttctgcaggatacactggataccttatttggaattttagatgaaaattcccaaaaatatgggtctaaagtgtttgattctttggttcacataataaatttgctgcaagatagcaaatttcatcattttaaacctgtaatggacacttacattgagagtcattttgctggggcacttgcatacagagatctcatcaaagtgctcaaatggtacgtggaccggatcacagaagcagagcggcaagagcatatccaggaggtgctgaaggcacaagaatacatttttaagtatatagttcaatctcgaaggctgttttcccttgccactggtgggcaaaacgaagaggagttccgctgctgcattcaggagcttctcatgtcagtccgtttctttctttcgcaagagagcaaagggtctggagcattatctcagtcacaggctgtgtttctgagctctttccctgccgtgtactcagaactgttgaagctctttgatgtccgggaagtagccaacttggtccaggacaccctgggcagtctgccgaccatcctgcatgtggatgattccctgcaggccatcaaactgcagtgcattggcaaaaccgtggaaagccagctttataccaacccagattcccgatacattcttctgcctgtcgtgttacatcacctccacattcacttgcaagaacagaaggacctgatcatgtgtgcacgtatccttagcaacgtattttgtcttatcaagaaaaatagctcagaaaaatctgtgctggaggaaatagatgtgatagtggccagcttgctggatattctgctgaggaccatattggagatcaccagccgacctcagccatccagctcagcaatgcggttccagttccaggatgtcactggggagtttgttgcttgtctcctgtccctattacgacaaatgacagatagacattatcaacagcttcttgatagttttaatacaaaggaagaactaagggatttcctgctgcagatatttactgtgttccgaatattgatacgcccggagatgtttccaaaggactggactgttatgcgcttggttgctaacaatgttattattacaacagttctatacctctcagatgcacttcgtaagaacttcttaaatgaaaactttgattataagatctgggattcctacttttacctcgcagtcatttttataaaccagttgtgtctgcagttggagatgttcacaccttccaagaagaaaaaggtgttagaaaagtatggtgacatgcgggtaacaatgggttgtgaaattttcagcatgtggcaaaacctaggagagcacaagcttcattttatccctgccctgaggcaggagaatcgcttgaacctgggaggaggaggttgcagtgagccgagagcatgtcactgcactccagcctgggcaacaaagcgagactgtgtctcaaagaaaaaagaaaaaaagacatgatttgagggtctgttttaaaattatctttacttatgtacatatcagaaagtttccaaaggtattttttttatacaagaaaaatgtagtttttagggattttagagccagtataactcctgcaagcaaacattttatttaaacactactaatatggcatttatgatagttcagtaagactaagctgaaattttcctcaccactatctttggaaaggagacataacacttatttccaaattcatgctttgaacatacttgtacagataacaagaaggcatattttatgccttttagacgcactcgcctgtttttgggccctaggctggaagtcattctacttatacctcaatgaaggaatgcactgctaactggtacgaagtcacagtgtatagctgaatctaacacgaaggcattcctttggcaggagtcaaaatctcagacttttcattaattcatgcagacttctttgtcaatctaagttattaagattttctatattgttaaacggactttttgttgctaatttgaaaaaaagttgatgattttgtttcaaatacgtcagtgtcgtgggaagcctttaatcagggtatgataatagctccctgtgtgtttccagccaagtccatctacctcaagcttgagttctactcactcggcttcacctaatgtgacaagttctgctccatcgagtgccagaggtcagtgccagagtgtggggaagactgagggtgcccagagaaccttctagtcctgggaactgtggccagctgccacacgttcaggctctcgcctccaaacaggtgcagcaccactaccatgctgatgatcctctctctccttctcttcccagcttctcctttgttgtctgacaaacacaaacattcccgagaaaactcttgcctgtcaccaagagagagaccatgcagtgccatctatccaacacctgtggagccttcgcagaggatgctgtttaatcatattggagacggggccttgccacgcagtgacccaaatctctctgcacctgaaaaagctgtgaaccccacccctagcagctggagcctggacagtgggaaggaagccaagaacatgtcggatagtgggaaacttatctctccccctgtccctccaagacccacacagactgcttcaccagcaagacacacgacatcagtatccccctcgcctgccgggcgatctccattgaagggctctgtgcagtctttcaccccctctccagtggagtaccactcgccaggactcatctccaactcccctgtcttgtcgggcagctacagcagtgggatttcttctctcagccggtgcagcacgtcggaaacctcaggctttgaaaatcaggtgaatgaacagtcggcccccctgccggtgccagtgccggtgcccgtgccgagctacggcggggaggagccagtgcgcaaggagagcaagactccgcccccgtacagcgtctacgagcggactctgcggcgccccgtcccgctacctcacagcctctccatccccgtcacgtcggagccgcccgcgctgccccccaagcctctggcagcgcgatccagccacctggagaatggggcccggaggactgaccccggcccgcggcccaggcccctgccccgcaaggtctctcagttataag

SEQ ID NO: 125839 - DNA, 10075 bp, Homo sapiens
  Payload ID: 4654
  Gene Symbol: DOCK5
  Gene Name: dedicator of cytokinesis 5
  Uniprot ID: Q9H7D0
  ENST ID: ENST00000276440
  CDS Start-End: 45-5657
tgtagcagccttagtcgccgccgccgcggggcgaggtcgccgccatggcccgctggatcccgaccaagaggcagaagtacggggttgcgatctataactacaatgcttctcaagatgtggagctctccttgcagatcggtgacacagttcacatcctggagatgtacgagggttggtacagaggatataccctccaaaataaatctaaaaagggcattttccctgaaacatatatccatttgaaagaggcaactgtggaagacctggggcagcatgaaaccgtgattcctggcgagctccccctggtgcaggagctcacgtccactctgcgagaatgggctgtcatctggcgaaagctctacgtgaacaacaagctcaccctcttccgccagctgcagcagatgacgtacagcctgatcgagtggcggtcccagatcctgtctgggacgctccccaaggatgaactggcagagctcaagaagaaagtcacagccaaaattgatcatgggaacagaatgctggggttagatctggtggtgcgagatgacaatgggaacatcctagaccctgacgaaaccagcaccattgccctcttcaaggcccatgaggtggcctccaaaaggattgaggaaaagatccaagaagagaagtcaatcctgcagaacctcgatttgcggggccagtccatcttcagtaccatccacacctatggcctctatgtgaacttcaagaactttgtctgcaacatcggggaagatgcagagttgtttatggccctctacgacccagaccagtccacttttatcagtgagaactatctaattcgttggggcagtaacgggatgcccaaggaaatagagaagctcaataacctccaagcagtgtttacagaccttagcagcatggacctcatccggccccgcgtcagccttgtgtgccagattgtccgcgtgggccatatggagctgaaggaaggcaagaagcacacctgtggactccgaagaccttttggagtggcagtgatggatattactgatatcatacatgggaaggtggatgatgaagaaaagcagcattttattccctttcagcaaattgcgatggaaacctacatccgccagaggcagctcatcatgtcgcctttgataacatcacacgtgattggggagaatgagccactcacttcagtcttgaataaagtgattgcagcaaaggaagtgaatcacaaagggcaaggcctttgggtatccttgaagctcttgcccggtgacctcacccaggttcagaagaatttttcacacttggttgatagatcaacagcaatagcccggaagatgggctttcctgaaatcatactgccaggagatgttcggaatgacatttatgtcaccctgatccacggtgagtttgacaaagggaagaagaagacgccaaagaatgtggaggtgacgatgtctgtgcacgatgaggagggcaagctcttggagaaagcaattcaccctggtgctggatatgaaggcatttcagaatacaaatcagtagtctattaccaagtcaagcagccctgttggtatgagactgtcaaggtatccattgctatagaagaagtcacacgctgtcatataagatttaccttccgacacaggtcatctcaggaaaccagagataaatcggagcgagcatttggggtggccttcgtgaagctgatgaacccggatggcaccactctgcaggatgggaggcacgatctggtggtttataagggtgacaacaaaaaaatggaagatgctaaattctacctgaccctgcctggaaccaagatggagatggaagaaaaagagcttcaagcatccaaaaacctggtcaccttcaccccaagcaaggatagcactaaagacagctttcagattgccaccctcatctgctccacaaagctcacccagaatgttgacctgttaggcttgttaaattggcgttccaactcccagaacattaaacacaacctaaagaagttaatggaagtggatggaggagagattgttaagtttttgcaagatacactagatgcactctttaacataatgatggaaatgtcagacagtgaaacctatgacttccttgtgtttgacgcactggtatttattatttcactgataggagacatcaagttccagcattttaatcctgtacttgaaacctacatttacaagcacttcagcgccactttggcatatgtgaaactctccaaggtactgaacttctatgtggctaatgcagatgactccagcaagactgaactgctttttgctgcgttgaaagccttgaagtacttgtttagattcatcatccaatcccgagtgctctacttgagattttatgggcagagcaaagatggagatgagtttaataattcaattcgccagttatttcttgctttcaatatgctgatggacaggcctctggaggaagccgtcaagatcaagggggcagctttgaagtaccttcctagcataattaatgatgtcaaacttgtatttgatcctgttgagctcagcgtgctcttctgcaaattcattcaaagcattcctgacaaccagctggttcggcagaaacttaactgcatgaccaagatagtagagagcactctttttcgacagtcagagtgcagagaagtgctgctgccactgctgacagaccagctcagcggccagttagatgacaactccaacaagcctgaccacgaggcaagctcgcagcttctgagcaacatcctggaggtgctggacaggaaggatgtgggtgccactgcggtgcacattcagcttataatggaacggctgctgagaaggatcaaccggacagtgattgggatgaaccggcagtctccccacatcgggagttttgtggcttgcatgattgccctgctgcagcaaatggacgacagccactatagccactacatcagcactttcaaaaccagacaagacatcatcgacttcctcatggaaacttttatcatgttcaaggacctgattggaaagaatgtctatgccaaagattggatggtgatgaatatgactcaaaacagggtttttctccgtgctataaatcagtttgctgaagttctcacaagattcttcatggatcaggcaagctttgaacttcagctctggaacaattacttccatttggcagttgcatttctcacccatgagtcccttcagcttgaaaccttctcacaagccaagcgcaacaaaattgttaaaaaatatggggacatgagaaaggaaatcggctttagaatccgggacatgtggtataacctgggtccccacaaaatcaaattcatcccatccatggtgggtcccattctggaggtcactctgacccctgaagtagagctccggaaagccacaatccccattttctttgatatgatgcagtgtgagttcaatttcagtggaaatggcaatttccatatgtttgagaatgagctgatcacaaagctggaccaggaggtagaagggggcagaggagacgaacaatacaaggttcttctggaaaaactgctcctagaacattgccggaaacacaaatacctctccagctctggggaggtcttcgccctcctggtcagcagcctcttagagaacctgctggactatagaaccatcatcatgcaagatgagagcaaggagaaccgtatgagctgcactgtgaacgtgctgaacttttataaagaaaagaagagagaggacatatacataagatatctgtacaagcttcgagatttgcaccgagactgtgagaactacacagaagctgcctacacgcttctcttgcacgctgagcttctgcagtggtctgacaagccctgtgtgcctcatttgcttcagaaggacagttactatgtttatacccagcaagagcttaaagagaagctgtatcaagaaatcatatcatatttcgacaaaggcaaaatgtgggagaaggccatcaagctgagcaaagagttggctgagacttacgaaagcaaagtatttgactacgagggccttggcaacctcctgaaaaaaagggcctcattttatgagaacatcattaaggcaatgaggcctcagcctgaatactttgctgttggatactatggacagggctttccttctttcctacggaataaaatcttcatctatcggggaaaggagtatgagaggcgagaggacttcagcctgaggttgttaacccagttccccaatgcggagaagatgaccagtaccacgcctcctggggaagacatcaagtcgtcccccaagcagtacatgcagtgcttcactgtaaagccagtgatgagcttgccgcccagctacaaggataaacctgttccagagcagatcttaaactactacagagccaatgaagtgcagcagttcagatactcccggccgttccggaaaggagaaaaggatccagacaatgaatttgctacgatgtggattgaacggaccacgtatacgactgcatatacctttcctgggattctcaagtggtttgaagtcaaacagatttcaacagaagagatcagtcctctggagaatgccatcgaaaccatggagctgaccaacgagaggatcagcaactgtgttcagcagcatgcctgggaccggtccctctctgtgcaccctctctccatgctgctcagtggcatcgtggacccggccgtcatggggggcttctccaactatgaaaaggctttttttacagaaaagtacttgcaggagcatcctgaagaccaggagaaggttgagctgctaaagcgactaatagcattacagatgcccctgctaacagaagggatccgcatccatggggagaaactcacagagcagctgaagccgctgcatgagcggttgtcttcttgcttccgggaactcaaggagaaagtagaaaagcactatggggttataacactgccacccaacttgacggagaggaagcaaagccgcacggggtctattgtgctcccctacatcatgtcttccactctgcggaggttgtccatcacctcagtcacttcctctgtggtttccacctcttcaaactcgtctgacaatgctccttccagaccgggatctgatggctcaatcttggagccacttttggagcgcagggcctcgtcaggtgccagagttgaagatctgtcccttagagaggagaacagcgagaaccggatcagcaagtttaagagaaaagactggagtctgagcaagtcccaggtcattgcagagaaagcaccagaacccgatttgatgagcccaaccagaaaagcacaaaggccaaagagtctccagttgatggataatcggctatcaccatttcacggttcttcacctcctcagtcaacacccttgagcccacctccactcactcccaaagccaccaggaccctaagctccccatcgttgcagacagatggaatcgcggccactcctgtcccacctccacctccccccaaaagcaagccctatgaaggcagccagaggaactccactgagctcgctcccccactgcctgtccgaagagaagccaaagcaccaccccctccacctccaaaggctcggaagtctggcatccctacttccgagcctggatcccagtaaggatcttgccctccctgcaacaccgagtgccttagacagctgctgcctgagaactggcctccagccggtgtcctcattccatggggctccctgctgactgcatttcctgatctgggatgatgtttaccagcccaaaaccagtcatgttcttccaaaagcttctctttgatagaattttgaggccatgccacctcccttccagtccacatggaattccagaatcagtcacagcctctgattttttccaagaagagattgccttcaccattgttaaatgtcagcctgtacggcagagacatggtggtctgcacaagcctggacaagttcttccatattgatggtggagcaacccctgtaatctactccttggaaggattttttgctttgcttatgaaaagctgtgcttgagacttaggtacttttctcacgtggacacactgatcccatcccatattgcatcttggaagagatggatatcaagtacactttggtagctgaaataatcatatctttctgatgtctattgtatctcctttgaggaaaagaacacacatttttaatggagattggctgctttcaggtatgtgtgtctatcattgaaagagcatggactcaaacatcagccctgagttcttgagtccacccaactcccatcttcttgtggcacaggaaagctgccctctccctctcccaccacactcctgactaatggccttcactgcgtcgcagtcactccttccctacggacttctttgaagctcttccttttgcacatacggctttttttttttttttttttttttgtcctattacctcctctgagcgcaaatcactggctacaagggacttaccagtctggattcagcagtttcttttctaaaacccatttgggtgactcagcagccgcatctgctacctgattttatcctggagaatacagtgcaatatttctctttgattatttattcctcttgattgtggaattaatttgattgcttgctaatggtactagtagtactcctttcagaagaaaaaatggagcgatttaggtgaccaaatattacatacataaatagccacatgaagttttagacgtttggacttgaagcctcaaagatcaaccaaccagtccccttatttagtaaataaggaaattgaggctacacacagaaaattgtgctacagattattactaataacccagcttgctaaattaggctatacctaggtaatctctagaagacaactctgacagactctttaatatttacccctggttggaacaatatttgaaatgtcccagatatttctatgctacttagatatttgtggcaaagcagaaagctttttgactgtgaaggcagaggtcagcactgggggaaacttgctggtggtctctcccacaaccttgcccagagtcctttccactaaggaggtgaagagaacagagaaagagatttccatttctgctgccagagctggtatttgcctgcctgattctctgtgtttcctgtttcaccgccaccctttcaggagagaactacaccagttcatcatgagggtcagggaagcaaaagctctcagatgtgtccagggcgttacttaagaaatgagtatgcagattctggaaggggtgtggaaaaggtgatcctttacccccacccaggaaaacctgcattgtgctagcatggaagaatcatgggctttggaattaaacccatttggtggaattaaacccatttggtttcaaatcccagttatgacatctgttaactttgcaaactcacaaaaattatttgaaattatctgagttttcattttctcaccttccagaatggggataatgcctcctgcatcggttgttgtgaggtttcaatgagatgaaatatgggaaagaagaggtactcacctgatggtccctgctttcctctgctaggcctgagtaggaactggaactctctaagagcattactcatactttttttttcttccaaggtagtttggaatgtgagtgcaagttagttctgcacatacagcccttctccaaatggtggtttcctttgaggtcttttacatgattatttatgactagagacaaacttaataagaactcaagaggattttaaatggagagaactcaagctgtagagaaaggaggaggcaacagacaggatatgtaggggcttacctagagcctggcacgacttctgagaagtcacccagcagaccggctagaggggatttgtgtgccacactctacttgccgggctgccattaaaatagaaagatataaaactgggtcaccaaaaaaaccaaacctcaaggctatccttccagagcagtagaaatgagtcccacagcctggtctttgagcagaggctgggaagataggatacatcactgtctggataccttctctttttaatagaatatattccgtatgattccctttccaccttaatggaaataatagctctctcctgcctgaacaaaagggattccaggtagtattgtggctaagagattacagcggacgatggaaggttcattttttagggaaggtgttgggtaggaagagtcacatttgacagaattcataaataatgtgtcctgaagtcagaggatgactgcaaagaaacacctcatgattccattaaatataaagagataaggagcaaggaggaaaaaagagaaagaattggtctttatttttcttgctaagaactctctggagtattgaaagacattgaaattatccctaaaattgtcacaacttttgtgaatactggtatacggttggaggtgtttttaaatctttatttcctctctttctttgttctagtgacttgtcttgctttaagattttttttaaaggattgttttattcaacatatatcaagttcttatggaatgccagtcatggtactagccccttgggatgtagtggttgagtgtgttcaatggaaacagccccagtatacaaagacagttcactctggtgtgctgtaggattggaaagggagtggtaccagatgaaaatgaaaccctaaagaagactgctgggccatgagttgcttcctcctcctccaccttaaccctctgattccagaattgcagtcattttcttctgccaaggaaatccattaaaaactgcagccacactgcaatttcctaatgtagaacaagatataaagcaggctttgagacaacaacctacctttgtttactctttccaagctggaagagtccttctcctctagttgcccctaggtcactggctaatttattttaaaatttagatggaactcatgtatagttaagtgcacaaatcttagccgtgcagatgggtaattttcacatagctatttgcccacatccgtgcctctaagatagagacatacactgttttcagcaccccagaaagttcccacatgcccatggtgccattttgtgaaaggtatttataaggcccttcaaatttgtggcttcctttctcatacttctcaggtataatgaaagggggagaaaaaccccaccatcaacacaaaacaaggctataaagactgtgcaccttttaacaagtcaatttgtagtcagtccctgggcctgtctttttttttttttaattttgaagctacctgaggtttagaattccttcagccctagctgcttttattctgctttttatttaaacaaaaagagggggaggatctgaaggaaactagttttctgtacaaaggctttgaggtccatggactatacttgtcccatttatcatcccaggtggtgctttgaccctgccataccctggctattaagataaaaagatttgtggacattaaaattatgaatatgtcagtaataatccagcacacattgaaatattgacacagattaccataatttgtgcaacatcttataaacaatgtcatttccatagtagtctaaggcttcaccagcctggcccactgtatctagactttaggttcattttaataattatgctttccttctctgtatcatttgggaagttgataaatatcacttccttagataccttcattcagtgatatatctggcttttacaattaaattggaaaaggtaagtttctctttggtgggttgagagttggaccatcaattctaatctacaaaaggaaattcatgatttcactctgacgcctaggatctagccaaggctggtctgcagtatcagatgtccaaactcatctactattagccatattttgtgagtcgtttgtctaaactttgtcaaaaatgcctttgccatgattttgttgctatctggatttcaaacatggacagttaggaagatgtgcattgaagtaggaaaattttgttcagatttgctgttatttattttttaaattaaaaatggaaatgtattttaaagttta

SEQ ID NO: 125840 - DNA, 786 bp, Homo sapiens
  Payload ID: 4654
  Gene Symbol: DOCK5
  Gene Name: dedicator of cytokinesis 5
  ENST ID: ENST00000410074
  CDS Start-End: 187-438
gcgggcggcgcgggcacgggcacgggcgcgggcggcgcggcgaggaggcggcccgcggagtccagcgaagtttggcggaacatggcggaagcgtctggggcacgcaggagcgcggggcggcggcggccggagcccgaggagctgtagcagccttagtcgccgccgccgcggggcgaggtcgccgccatggcccgctggatcccgaccaagaggcagaagtacggggttgcgatctataactacaatgcttctcaagatgtggagctctccttgcagatcggtgacacagttcacatcctggagatgtacgagggttggtacagaggatataccctccaaaataaatctaaaaaggcaattggttccaggacccccacaataccgaaatccatggatgctcaagtctctgatataaaatggcatagtatttgcatataacctctgcatttcctcccgtgtactttaaatcatgtctagattatttataatacctaatacaatgtaaatgctatgtaagtagttattataccgtattgtttagggaataatgacaaggaaataaacctctgcttactttttttttctatatttttaatcatcagttggttgaacccatgatatggagggccttgtgtatataaaaatcagtctagctaatagtgccattgttgttggctttgaacagtagatagatagggttcccccaggatctaaatgataaattctggattttttttaaatttttttgtgttcattaaagagtgcttaaaacctttaagcttaaaa

SEQ ID NO: 125841 - DNA, 5335 bp, Homo sapiens
  Payload ID: 4654
  Gene Symbol: DOCK5
  Gene Name: dedicator of cytokinesis 5
  ENST ID: ENST00000444569
  CDS Start-End: 1-3271
agtcaatcctgcagaacctcgatttgcggggccagtccatcttcagtaccatccacacctatggcctctatgtgaacttcaagaactttgtctgcaacatcggggaagatgcagagttgtttatggccctctacgacccagaccagtccacttttatcaggaccttagcagcatggacctcatccggccccgcgtcagccttgtgtgccagattgtccgcgtgggccatatggagctgaaggaaggcaagaagcacacctgtggactccgaagaccttttggagtggcagtgatggatattactgatatcatacatgggaaggtggatgatgaagaaaagcagcattttattccctttcagcaaattgcgatggaaacctacatccgccagaggcagctcatcatgtcgcctttgataacatcacacgtgattggggagaatgagccactcacttcagtcttgaataaagtgattgcagcaaaggaagtgaatcacaaagggcaaggcctttgggtatccttgaagctcttgcccggtgacctcacccaggttcagaagaatttttcacacttggttgatagatcaacagcaatagcccggaagatgggctttcctgaaatcatactgccaggagatgttcggaatgacatttatgtcaccctgatccacggtgagtttgacaaagggaagaagaagacgccaaagaatgtggaggtgacgatgtctgtgcacgatgaggagggcaagctcttggagaaagcaattcaccctggtgctggatatgaaggcatttcagaatacaaatcagtagtctattaccaagtcaagcagccctgttggtatgagactgtcaaggtatccattgctatagaagaagtcacacgctgtcatataagatttaccttccgacacaggtcatctcaggaaaccagagataaatcggagcgagcatttggggtggccttcgtgaagctgatgaacccggatggcaccactctgcaggatgggaggcacgatctggtggtttataagggtgacaacaaaaaaatggaagatgctaaattctacctgaccctgcctggaaccaagatggagatggaagaaaaagagcttcaagcatccaaaaacctggtcaccttcaccccaagcaaggatagcactaaagacagctttcagattgccaccctcatctgctccacaaagctcacccagaatgttgacctgttaggcttgttaaattggcgttccaactcccagaacattaaacacaacctaaagaagttaatggaagtggatggaggagagattgttaagtttttgcaagatacactagatgcactctttaacataatgatggaaatgtcagacagtgaaacctatgacttccttgtgtttgacgcactggtatttattatttcactgataggagacatcaagttccagcattttaatcctgtacttgaaacctacatttacaagcacttcagcgccactttggcatatgtgaaactctccaaggtactgaacttctatgtggctaatgcagatgactccagcaagactgaactgctttttgctgcgttgaaagccttgaagtacttgtttagattcatcatccaatcccgagtgctctacttgagattttatgggcagagcaaagatggagatgagtttaataattcaattcgccagttatttcttgctttcaatatgctgatggacaggcctctggaggaagccgtcaagatcaagggggcagctttgaagtaccttcctagcataattaatgatgtcaaacttgtatttgatcctgttgagctcagcgtgctcttctgcaaattcattcaaagcattcctgacaaccagctggttcggcagaaacttaactgcatgaccaagatagtagagagcactctttttcgacagtcagagtgcagagaagtgctgctgccactgctgacagaccagctcagcggccagttagatgacaactccaacaagcctgaccacgaggcaagctcgcagcttctgagcaacatcctggaggtgctggacaggaaggatgtgggtgccactgcggtgcacattcagcttataatggaacggctgctgagaaggatcaaccggacagtgattgggatgaaccggcagtctccccacatcgggagttttgtggcttgcatgattgccctgctgcagcaaatggacgacagccactatagccactacatcagcactttcaaaaccagacaagacatcatcgacttcctcatggaaacttttatcatgttcaaggacctgattggaaagaatgtctatgccaaagattggatggtgatgaatatgactcaaaacagggtttttctccgtgctataaatcagtttgctgaagttctcacaagattcttcatggatcaggcaagctttgaacttcagctctggaacaattacttccatttggcagttgcatttctcacccatgagtcccttcagcttgaaaccttctcacaagccaagcgcaacaaaattgttaaaaaatatggggacatgagaaaggaaatcggctttagaatccgggacatgtggtataacctgggtccccacaaaatcaaattcatcccatccatggtgggtcccattctggaggtcactctgacccctgaagtagagctccggaaagccacaatccccattttctttgatatgatgcagtgtgagttcaatttcagtggaaatggcaatttccatatgtttgagaatgagctgatcacaaagctggaccaggaggtagaagggggcagaggagacgaacaatacaaggttcttctggaaaaactgctcctagaacattgccggaaacacaaatacctctccagctctggggaggtcttcgccctcctggtcagcagcctcttagagaacctgctggactatagaaccatcatcatgcaagatgagagcaaggagaaccgtatgagctgcactgtgaacgtgctgaacttttataaagaaaagaagagagaggacatatacataagatatctgtacaagcttcgagatttgcaccgagactgtgagaactacacagaagctgcctacacgcttctcttgcacgctgagcttctgcaggtgaatggctcagagagcttgtttcaacagggtggagtacagtgtcctttcagactaaattctatacatttcatgattttgatgggaaagaactttattccaggaatatccttttatacaagtttttttagttctttctaaataggcacagctaatttgtagatcaagtatgggaaaatgtcagttatcttttatttaaaaatccttagaaagcagagcacgacttatgaacctttggtaattgacactctaattaaagcaataaaacacacattgatgaatacataaaaaaatttgtaaaactgcagaaaactgcagaaagatgagttataagtgaatatagtaccatagaagtactctatttttattctctccctaaataaatgtatgttgtggtttagatataaatacatctatatgttatgaatcccaagtaattatttctagccctgagcaccttctctaactttggatttacatataaactttgattggccaatatgcagctcaaactgaacaaggcggtaacaggaacctttatttctcactctttgctcctccccagcccatcctacctcactttgttaccatgttactaataacattcccatccatttagttgctcaggcaacctcatagtcatcttcaatttctctcttttactcaccacctcccacattctccacaagcgagagatgtggcccctctgttcagaacatgcccctaacttatccgcttttctttttctttctttatttttttttttaaagagatgagatcttgctatgtttcccaggctggtctcaaactcctgggctcaagcaatcctcccacttcagcctcccagagtactaggattacaggcatgagccaccatgctagccaatccacttttctttatctccctgactaccaccttggtccatcccgtaagcatgtcacaccttgagcactacagcagcctcctgtttggtgtctctgcctccagttttgttctcagctattaatattcttttacagtttatattttatactaaagtaatatatgggcattgtccgaacatatgagttaaaaataggattcctatgcctcaccacttcccaaaggaaattcacaattcatatttaagtttagggcattaaaaagcttattgtataatggactgggcctggtggctcacgcctgtaatcccagctctttgggaagctgaggccagcagatcacttggggtcaggagttcaagaccagcctggctaacatggtgaaaccccatctctactaaaaatacaaaaaattagcaggcgtggtggcacctgcctgtagtcccagctactcaggaggctgaggcaggagaatcatttgaacctgcaaggcggaggtttgcagtatgctgagatggtgccaccatactccagcctgggtgatagagcaagactgtgtctcaaaagaaaaaaaaaaaaaaaaagcaacctactgtatatagcttagaaagtgaggcttgttgactgtggatttcgccattgtatgatcagaaagaaatccccagtgtctgtaactgtaggtcttttcatttgggaaactcaggaaggtaaactctcctatcctggtgtaagatatgaggtatgaatgcagctttttttccccccagattgctattcaatagagatgctgtttgttaagtatagttcacattttgcttattggtataagatcccatctttattactaaattcttattttggggggagggaatctctttctagattgtatatgcttttacgtgggtctctgtctgttcatgtaccagtaccatactgtattaattattaattcttgatagtgtgttttatgacctggtagttactcttgattgctcttctttttcagagttttcctacctattcctttttgttaatttttccatatggactttggaaagatgaaatttaaaaattaatttagtgagaatttacatgttaatgaaatagaattttcttatccaaaagcatggtatgactttccatttgttcgagtctgcttttgtgcccttcaatggcgtgtgaaagttttctgcatataagtcttgcatattccttgtaatgttcactcttagaaatgttctttttggacttatttttgtttggttccattcttctattctgtatatttagtctccgtgtatctgaaataaattttatttcaag

SEQ ID NO: 125842 - DNA, 4844 bp, Homo sapiens
  Payload ID: 4654
  Gene Symbol: DOCK5
  Gene Name: dedicator of cytokinesis 5
  ENST ID: ENST00000467709
  CDS Start-End: 1-415
gatggaagaaaaagagcttcaagcatccaaaaacctggtcaccttcaccccaagcaaggatagcactaaagacagctttcagattgccaccctcatctgctccacaaagctcacccagaatgttgacctgttaggcttgttaaattggcgttccaactcccagaacattaaacacaacctaaagaagttaatggaagtggatggaggagagattgttaagtttttgcaagatacactagatgcactctttaacataatgatggaaatgtcagacagtgaaacctatgacttccttgtgtttgacgcactggtatttattatttcactgataggagacatcaagttccagcattttaatcctgtacttgaaacctacatttacaagcacttcagcgccactttggcatatgtatgactccagcaagactgaactgctttttgctgcgttgaaagccttgaagtacttgtttagattcatcatccaatcccgagtgctctacttgagattttatgggcagagcaaagatggagatgagtttaataattcaattcgccagttatttcttgctttcaatatgctgatggacaggcctctggaggaagccgtcaagatcaagggggcagctttgaagtaccttcctagcataattaatgatgtcaaacttgtatttgatcctgttgagctcagcgtgctcttctgcaaattcattcaaagcattcctgacaaccagctggttcggcagaaacttaactgcatgaccaagatagtagagagcactctttttcgacagtcagagtgcagagaagtgctgctgccactgctgacagaccagctcagcggccagttagatgacaactccaacaagcctgaccacgaggcaagctcgcagcttctgagcaacatcctggaggtgctggacaggaaggatgtgggtgccactgcggtgcacattcagcttataatggaacggctgctgagaaggatcaaccggacagtgattgggatgaaccggcagtctccccacatcgggagttttgtggcttgcatgattgccctgctgcagcaaatggacgacagccactatagccactacatcagcactttcaaaaccagacaagacatcatcgacttcctcatggaaacttttatcatgttcaaggacctgattggaaagaatgtctatgccaaagattggatggtgatgaatatgactcaaaacagggtttttctccgtgctataaatcagtttgctgaagttctcacaagattcttcatggatcaggcaagctttgaacttcagctctggaacaattacttccatttggcagttgcatttctcacccatgagtcccttcagcttgaaaccttctcacaagccaagcgcaacaaaattgttaaaaaatatggggacatgagaaaggaaatcggctttagaatccgggacatgtggtataacctgggtccccacaaaatcaaattcatcccatccatggtgggtcccattctggaggtcactctgacccctgaagtagagctccggaaagccacaatccccattttctttgatatgatgcagttttgagaatgagctgatcacaaagctggaccaggaggtagaagggggcagaggagacgaacaatacaaggttcttctggaaaaactgctcctagaacattgccggaaacacaaatacctctccagctctggggaggtcttcgccctcctggtcagcagcctcttagagaacctgctggactatagaaccatcatcatgcaagatgagagcaaggagaaccgtatgagctgcactgtgaacgtgctgaacttttataaagaaaagaagagagaggacatatacataagatatctgtacaagcttcgagatttgcaccgagactgtgagaactacacagaagctgcctacacgcttctcttgcacgctgagcttctgcagtggtctgacaagccctgtgtgcctcatttgcttcagaaggacagttactatgtttatacccagcaagagcttaaagagaagctgtatcaagaaatcatatcatatttcgacaaaggcaaaatgtgggagaaggccatcaagctgagcaaagagttggctgagacttacgaaagcaaagtatttgactacgagggccttggcaacctcctgaaaaaaagggcctcattttatgagaacatcattaaggcaatgaggcctcagcctgaatactttgctgttggatactatggacagggctttccttctttcctacggatgggtccagactgtttgcagactggccatggtccttgggccacactggaagaagaactgggctaagtattttttatgcctgtgatttaacttctccaataaaccgcagctcttgtaggatatgatggtcgctaataaaatcttcatctatcggggaaaggagtatgagaggcgagaggacttcagcctgaggttgttaacccagttccccaatgcggagaagatgaccagtaccacgcctcctggggaagacatcaagtcgtcccccaagcagtacatgcagtgcttcactgtaaagccagtgatgagcttgccgcccagctacaaggataaacctgttccagagcagatcttaaactactacagagccaatgaagtgcagcagttcagatactcccggccgttccggaaaggagaaaaggatccagacaatgaatttgctacgatgtggattgaacggaccacgtatacgactgcatatacctttcctgggattctcaagtggtttgaagtcaaacagatttcaacagaagagatcagtcctctggagaatgccatcgaaaccatggagctgaccaacgagaggatcagcaactgtgttcagcagcatgcctgggaccggtccctctctgtgcaccctctctccatgctgctcagtggcatcgtggacccggccgtcatggggggcttctccaactatgaaaaggctttttttacagaaaagtacttgcaggagcatcctgaagaccaggagaaggttgagctgctaaagcgactaatagcattacagatgcccctgctaacagaagggatccgcatccatggggagaaactcacagagcagctgaagccgctgcatgagcggttgtcttcttgcttccgggaactcaaggagaaagtagaaaagcactatggggttataacactgccacccaacttgacggagaggaagcaaagccgcacggggtctattgtgctcccctacatcatgtcttccactctgcggaggttgtccatcacctcagtcacttcctctgtggtttccacctcttcaaactcgtctgacaatgctccttccagaccgggatctgatggctcaatcttggagccacttttggagcgcagggcctcgtcaggtgccagagttgaagatctgtcccttagagaggagaacagcgagaaccggatcagcaagtttaagagaaaagactggagtctgagcaagtcccaggtcattgcagagaaagcaccagaacccgatttgatgagcccaaccagaaaagcacaaaggccaaagagtctccagttgatggataatcggctatcaccatttcacggttcttcacctcctcagtcaacacccttgagcccacctccactcactcccaaagccaccaggaccctaagctccccatcgttgcagacagatggaatcgcggccactcctgtcccacctccacctccccccaaaagcaagccctatgaaggcagccagaggaactccactgagctcgctcccccactgcctgtccgaagagaagccaaagcaccaccccctccacctccaaaggctcggaagtctggcatccctacttccgagcctggatcccagtaaggatcttgccctccctgcaacaccgagtgccttagacagctgctgcctgagaactggcctccagccggtgtcctcattccatggggctccctgctgactgcatttcctgatctgggatgatgtttaccagcccaaaaccagtcatgttcttccaaaagcttctctttgatagaattttgaggccatgccacctcccttccagtccacatggaattccagaatcagtcacagcctctgattttttccaagaagagattgccttcaccattgttaaatgtcagcctgtacggcagagacatggtggtctgcacaagcctggacaagttcttccatattgatggtggagcaacccctgtaatctactccttggaaggattttttgctttgcttatgaaaagctgtgcttgagacttaggtacttttctcacgtggacacactgatcccatcccatattgcatcttggaagagatggatatcaagtacactttggtagctgaaataatcatatctttctgatgtctattgtatctcctttgaggaaaagaacacacatttttaatggagattggctgctttcaggtatgtgtgtctatcattgaaagagcatggactcaaacatcagccctgagttcttgagtccacccaactcccatcttcttgtggcacaggaaagctgccctctccctctcccaccacactcctgactaatggccttcactgcgtcgcagtcactccttccctacggacttctttgaagctcttccttttgcacatacggctttttttttttttttttttttttgtcctattacctcctctgagcgcaaatcactggctacaagggacttaccagtctggattcagcagtttcttttctaaaacccatttgggtgactcagcagccgcatctgctacctgattttatcctggagaatacagtgcaatatttctctttga

SEQ ID NO: 125843 - DNA, 2166 bp, Homo sapiens
  Payload ID: 4654
  Gene Symbol: DOCK5
  Gene Name: dedicator of cytokinesis 5
  Uniprot ID: Q9H7D0
  ENST ID: ENST00000481100
  CDS Start-End: 138-1190
ggcccgcggagtccagcgaagtttggcggaacatggcggaagcgtctggggcacgcaggagcgcggggcggcggcggccggagcccgaggagctgtagcagccttagtcgccgccgccgcggggcgaggtcgccgccatggcccgctggatcccgaccaagaggcagaagtacggggttgcgatctataactacaatgcttctcaagatgtggagctctccttgcagatcggtgacacagttcacatcctggagatgtacgagggttggtacagaggatataccctccaaaataaatctaaaaagggcattttccctgaaacatatatccatttgaaagaggcaactgtggaagacctggggcagcatgaaaccgtgattcctggcgagctccccctggtgcaggagctcacgtccactctgcgagaatgggctgtcatctggcgaaagctctacgtgaacaacaagctcaccctcttccgccagctgcagcagatgacgtacagcctgatcgagtggcggtcccagatcctgtctgggacgctccccaaggatgaactggcagagctcaagaagaaagtcacagccaaaattgatcatgggaacagaatgctggggttagatctggtggtgcgagatgacaatgggaacatcctagaccctgacgaaaccagcaccattgccctcttcaaggcccatgaggtggcctccaaaaggattgaggaaaagatccaagaagagaagtcaatcctgcagaacctcgatttgcggggccagtccatcttcagtaccatccacacctatggcctctatgtgaacttcaagaactttgtctgcaacatcggggaagatgcagagttgtttatggccctctacgacccagaccagtccacttttatcagtgagaactatctaattcgttggggcagtaacgggatgcccaaggaaatagagaagctcaataacctccaagcagtgtttacagaccttagcagcatggacctcatccggccccgcgtcagccttgtgtgccagattgtccgcgtgggccatatggagctgaaggaaggcaagaagcacacctgtggactccgaagaccttttggagtggcagtgatggatattactgatatcatacatgggaaggtggatgatgaagaaaagcagcattttattccctttcagcagtaagtactttggcatgtgtcccaggtgacttgagacctggattagccattcaattgtcttttaacacagaaacaggtgttagaaaccattttctcagagaaggaaagattctaagctgcaagattgtcagataggagctgaacagaagactttattcaaagtccttgatgttggactcccattgaagagggtaaactgaactttcctgattctatagaaagcatcaaaggaatataaaagggcacatatctgtctgctctggaatgcagagagggtgccgtccttgtgtcagcaatgccaaaatatatgtgcagtctattgcatgaaacaggcatcatggatgacacggaatcacgtgggctagcatagggcttctcagactgcatcatgcatatgaatcaggggaacttgttaggctgcaggggagttctgcctctgacaagctcccaggtgatgctgatgtagctggtctgagggccacactgtctgtagcgagggtttaggagatgagagagtgaagggctgacccacccatgggccagtgttcctgcatgttgggggaaagccagcctgggagcatgtgaaaggatccttgcagagctttactgaggccctccatattgagctgcaggagctggagccatgggtaggccattgaggagctgttgggagcagattcaagccgtgtcactctgaagaagtgcaggtgtgaacgtcatgacctgctccagcacctgcacaggcagtggaggcctagtggaggccaagagcattgccgggaccaagtcccaccaggggccatcgtgccagtcagagggcatcatctcagctcacttgcagctgccactgcagacaagtagaacaaactgagaattccacaaaccagccagagtcatatatttgagttaatatatcactttttacaaatgatatcacaaattagtggagaaagatacattatgcaaaaaaaaaaaaaaaa

SEQ ID NO: 125844 - DNA, 6358 bp, Homo sapiens
  Payload ID: 4655
  Gene Symbol: DOCK6
  Gene Name: dedicator of cytokinesis 6
  Uniprot ID: Q96HP0
  ENST ID: ENST00000294618
  CDS Start-End: 13-6156
gacgcgaggaccatggctgcctccgagcgccgcgccttcgcgcacaagatcaacaggacggtggccgcagaggtgcggaagcaggtgtcccgggaacgcagtggctccccccactccagcaggcgctgcagcagctccctgggggtcccactgactgaagttgtcgagcccctggactttgaggatgtacttctgagccggccaccagatgctgagcccgggcccctcagggacctggtagaattcccagctgatgacttggagctgctgctgcagccccgggaatgccggaccacggagcccgggatccccaaggatgaaaaactggatgcccaggtgagggccgcggtggagatgtatattgaggactgggtcattgtccacagaaggtatcagtacctgagtgcagcatacagccccgtcaccacagacacacagcgggagcgacagaagggcctcccccgccaggtctttgagcaggatgcttctggagacgagaggtccggccctgaggactcgaatgactcccggcgtggctcgggctccccggaagacacccctcgaagcagtggtgcctctagcatcttcgacctgaggaacctggcagctgactcattgctgccctctctgctagagcgggcggccccagaagatgtggaccggcgcaatgaaacccttcgacggcagcaccggcccccggccctgctcaccctctacccggcacctgacgaggatgaagccgtggaacgctgtagccgcccagagccaccccgcgagcactttggacaaaggatcttggtcaagtgtctgtcgctcaagttcgagattgaaattgagcccatctttgggatcttggctctgtatgatgtgcgggagaaaaagaagatctcggagaacttctacttcgacctgaactcggactccatgaaggggctgcttcgggctcatggcacccaccctgccatctccaccctggcccgctctgccatcttctctgtgacctacccctcacctgacatcttcctggtcatcaagttggagaaggtgcttcagcaaggggacatcagtgagtgctgtgagccttacatggtgttgaaagaagtggacacagccaagaacaaagagaagctagagaagctgcgcctggcggccgagcagttctgcacccgcctgggccgctaccgcatgcccttcgcctggacggccgtgcacttggccaacatcgtgagcagcgctgggcagctggaccgggactctgactcggagggcgagcgccggccagcctggacagaccgccgccgtcgggggccccaggaccgggcgagtagtggggacgacgcctgcagcttctctggcttccgtccagccacgctaactgtcacaaacttctttaagcaggaggctgagcgactcagtgacgaggacctcttcaagttcctggctgacatgaggcgcccgtcgtccctgctgcggcgactacgtcctgtgactgcccagctcaagatcgacatttctccggctcctgaaaatccccacttctgcctctcccctgagctgcttcatatcaagccctacccggaccccaggggccggcccaccaaggagattctggagttccccgcccgcgaagtctatgccccccataccagctacaggaacctgctgtacgtgtacccgcacagcctcaacttcagcagccgccagggctccgtgcgcaaccttgctgtgcgagtgcagtacatgacaggcgaggaccccagccaggctctgccggtcatctttggcaagtccagctgcagtgaatttacccgcgaggccttcacaccggtggtctaccataacaagtcccccgagttctacgaggagttcaagctgcatcttccagcctgcgtgacagagaaccatcacctgctgttcaccttctaccatgtcagctgccagccccggccgggcactgccctggagacacccgtgggctttacttggatcccactgctgcagcacgggcgcctgaggaccggccccttctgtctcccagtgtctgtggaccagccgccgcccagctattccgtgctcacacccgatgtggcgcttccgggcatgcgctgggtggacggtcacaagggcgtgttcagtgtggagctcacagccgtgtcctctgtgcacccccaggacccctacctggacaaattcttcaccctggtgcacgtcctggaggagggagccttcccattccggctcaaggacactgtgctgagcgagggcaacgtggagcaggagctgcgggccagtcttgcagcactgcgcctggccagccccgaaccccttgtggccttctcccaccacgtgctggacaagctcgtgcgtctggtcatcaggcccccgatcatcagtggccagattgtgaacctgggccgtggagcctttgaagcaatggcccatgtagtcagccttgttcaccggagcctggaggcagcccaggatgcccgcggtcactgcccacagctggctgcctacgtccactacgcctttcgccttcctggcactgagcccagcctcccggatggggcccctccagtgacagtgcaggctgccacactggcccgtggctctggtcgccccgcaagcctctacctggcgcgttccaagagcatcagcagcagcaaccctgacctcgccgtggcccctggctctgtggatgacgaggtttcccgcatcctggccagcaagctgcttcacgaggagctggctctgcagtgggtggtcagcagcagtgccgtacgcgaggccatcctccagcacgcctggttcttcttccagctcatggtgaagagtatggcgctgcacctgctgcttggccagcgactagacacaccccgcaagctgcgcttccccggacgcttcctggacgacatcactgccttggtgggctctgtgggcctggaggtcatcacccgtgtccacaaggatgtggagctggccgagcacctcaacgccagcctggctttcttcctcagtgaccttctgtccctggtggaccggggctttgtcttcagcctggtccgggcccactacaagcaggtggccacgcggctccagtcgtcccctaatccagcagccctgctgaccctgcgcatggaattcacccgcatcctgtgcagccacgagcactacgtgaccctcaacctcccctgctgccccctgtcacctccagcctcgccctccccctctgtgtcctccaccacctcccagagctccaccttctccagccaagccccggaccccaaggtgaccagcatgttcgaactgagtggaccattccggcagcagcacttcctagctgggctcctgctgacggagctggcactggccctcgaacctgaggctgaaggggcattcctgttgcacaagaaggccatcagtgctgtgcacagcctgctatgtggccatgacactgacccccgctacgccgaggccactgtgaaggctcgtgtggccgagctgtacctgccactgctatcgattgcacgggataccttgccacggctgcatgactttgctgagggcccaggtcagcggtcaagactggcctcaatgcttgactcagacacagaaggcgaaggggacattgcgggtaccatcaacccctctgtggccatggccattgctggtggccccctagcccctggctcccgggccagcatctcccaggggccaccaacggcttctcgcgcaggctgtgccctctctgctgagtcaagccggaccttgctggcgtgtgtgctgtgggtgctgaaaaacaccgagccggcgctcctgcagcgctgggccactgacctgacactcccccagctgggacgtctgttggatttgctgtacctttgcctagctgcctttgagtacaaggggaaaaaggcctttgaacgcatcaacagcctcacattcaaaaaatctctggatatgaaggcgcggctagaggaagccattctgggtaccatcggagctcgacaagaaatggttcggcgaagtcgtgagaggagcccgtttgggaatccggagaatgtgcgctggcggaagagcgtcacacactggaagcaaacctcagaccgcgtggacaagaccaaggatgaaatggaacacgaggccttggtggaagggaacctggcaaccgaggcaagcctagtggttctggacacactggagatcatcgtgcagacggtgatgctttcagaagcccgggagagcgtcttgggggcagtgctgaaggttgtgctgtacagcctgggcagtgcccagagtgccctcttcttgcagcatggcctggccacccagagggcccttgtgtccaagttcccggagctgctgttcgaggaggacacggagctgtgtgccgacctgtgcctgaggctcctacgacactgtggcagccgcatcagcaccatccgcacgcacgccagcgcctcgctgtacctgctcatgcgacagaacttcgagatcggccacaactttgcccgtgtgaagatgcaggtcaccatgtctctctcgtccctggtggggacgacgcagaacttcagtgaagagcacctgcgacgttcactcaaaaccatcctcacctatgctgaggaggacatggggctgcgggacagcaccttcgcagagcaggtccaggacctgatgttcaacctgcacatgatcctgacggacacggtgaagatgaaggaacaccaggaggaccctgagatgctcatcgacctcatgtacagaattgcccggggctaccagggctcaccggaccttcggctgacctggttgcagaacatggccgggaagcacgcggagctgggcaaccacgccgaggccgcccagtgcatggtgcacgcggccgccctcgtggctgagtacctcgccctgctcgaggaccaccgccacctgcccgtgggctgcgtttccttccagaacatctcatccaacgtgctagaggagtccgccatctccgacgacatcctgtcgcccgacgaggagggcttctgctccgggaagcacttcactgagctggggctggtagggttgctggaacaggcagccggctacttcaccatgggcgggctctacgaggcggtgaatgaggtctacaagaacctcatccccatcctggaagcccaccgtgactacaagaagctggccgcggtgcacggcaaactgcaggaggccttcaccaagatcatgcaccagagttccggctgggagcgcgtgttcgggacgtatttccgcgtgggcttctacggcgcccacttcggtgacctggatgagcaggagtttgtgtacaaggagccatcgatcacgaagctggcagagatctcacaccggctggaggagttctacacggagagatttggcgacgacgtcgttgagattatcaaagactctaaccctgtggacaagtccaagcttgactcacaaaaggcctacatccagatcacgtatgtggaaccgtactttgatacctacgagctcaaggaccgggtgacctactttgaccgcaactatgggcttcgcacattcctgttctgcacgccgttcacgccggatgggcgcgcacacggggagctgcccgagcaacacaagcgtaagacgctgctcagcaccgaccacgccttcccctacatcaagactcgcatccgtgtgtgccaccgggaggagacggtgctgacgccagtggaggtggccatcgaggacatgcagaagaagacacgggagctggcctttgccaccgagcaggacccaccagatgctaagatgctacagatggtgcttcagggctctgtagggcccaccgtgaaccagggtcccctggaggtggcccaggtgtttttagcagagatcccggaagaccccaagctcttccggcatcacaacaaattgcggctctgcttcaaggacttctgcaagaaatgtgaggatgcgctgcggaaaaataaggccctgattgggccggaccagaaggagtaccaccgtgagctggagcgcaactactgccgcctgcgggaggctctgcagcccctgcttacccagcgcctgccccagctgatggcacccaccccacccggcctcaggaactccttgaacagagcaagtttccgaaaggcagacctctgagcccacaaggaccaaagctgtacctagaggaaccagcacccgggcctcagctgtctgtgctgcgaggggagtctgccctggtgcccactgggctgtggggtgaccacactgtacttggggctgggccctctgcccctgtgtccccatctgtgtgcactgatgcttcctcccttttttaatttaaaatggtttttataagcaa

SEQ ID NO: 125845 - DNA, 554 bp, Homo sapiens
  Payload ID: 4655
  Gene Symbol: DOCK6
  Gene Name: dedicator of cytokinesis 6
  ENST ID: ENST00000585904
  CDS Start-End: 1-554
ctgggccgtggagcctttgaagcaatggcccatgtagtcagccttgttcaccggagcctggaggcagcccaggatgcccgcggtcactgcccacagctggctgcctacgtccactacgcctttcgccttcctggcactgagcccagcctcccggatggggcccctccagtgacagtgcaggctgccacactggcccgtggctctggtcgccccgcaagcctctacctggcgcgttccaagagcatcagcagcagcaaccctgacctcgccgtggcccctggctctgtggatgacgaggtttcccgcatcctggccagcaagggcatcgatcgctcacactcctgggtgaattccgcttatgctccaggaggcagtaaggctgtgctgcggcgggcgcccccttattgtggggccgaccccagacaggccatcgactgcaactctagccgagcctcctcctacctcgagggttcctcctcggccccaccagccacccagctgagacccactgtgcagaagctgcttcacgaggagctggctctgcagtgggtggt

SEQ ID NO: 125846 - DNA, 1391 bp, Homo sapiens
  Payload ID: 4655
  Gene Symbol: DOCK6
  Gene Name: dedicator of cytokinesis 6
  ENST ID: ENST00000590680
  CDS Start-End: 1-1391
tgtacccgcacagcctcaacttcagcagccgccagggctccgtgcgcaaccttgctgtgcgagtgcagtacatgacaggcgaggaccccagccaggctctgccggtcatctttggcaagtccagctgcagtgaatttacccgcgaggccttcacaccggtggtctaccataacaagtcccccgagttctacgaggagttcaagctgcatcttccagcctgcgtgacagagaaccatcacctgctgttcaccttctaccatgtcagctgccagccccggccgggcactgccctggagacacccgtgggctttacttggatcccactgctgcagcacgggcgcctgaggaccggccccttctgtctcccagtgtctgtggaccagccgccgcccagctattccgtgctcacacccgatgtggcgcttccgggcatgcgctgggtggacggtcacaagggcgtgttcagtgtggagctcacagccgtgtcctctgtgcacccccaggacccctacctggacaaattcttcaccctggtgcacgtcctggaggagggagccttcccattccggctcaaggacactgtgctgagcgagggcaacgtggagcaggagctgcgggccagtcttgcagcactgcgcctggccagccccgaaccccttgtggccttctcccaccacgtgctggacaagctcgtgcgtctggtcatcaggcccccgatcatcagtggccagattgtgaacctgggccgtggagcctttgaagcaatggcccatgtagtcagccttgttcaccggagcctggaggcagcccaggatgcccgcggtcactgcccacagctggctgcctacgtccactacgcctttcgccttcctggcactgagcccagcctcccggatggggcccctccagtgacagtgcaggctgccacactggcccgtggctctggtcgccccgcaagcctctacctggcgcgttccaagagcatcagcagcagcaaccctgacctcgccgtggcccctggctctgtggatgacgaggtttcccgcatcctggccagcaaggccatcgactgcaactctagccgagcctcctcctacctcgagggttcctcctcggccccaccagccacccagctgagacccactgtgcagaagctgcttcacgaggagctggctctgcagtgggtggtcagcagcagtgccgtacgcgaggccatcctccagcacgcctggttcttcttccagctcatggtgaagagtatggcgctgcacctgctgcttggccagcgactagacacaccccgcaagctgcgcttccccggacgcttcctggacgacatcactgccttggtgggctctgtgggcctggaggtcatcacccgtgtccacaag

SEQ ID NO: 125847 - DNA, 444 bp, Homo sapiens
  Payload ID: 4655
  Gene Symbol: DOCK6
  Gene Name: dedicator of cytokinesis 6
  ENST ID: ENST00000588666
  CDS Start-End: 1-444
ccgccacctgcccgtgggctgcgtttccttccagaacatctcatccaacgtgctagaggagtccgccatctccgacgacatcctgtcgcccgacgaggagggcttctgctccgggaagcacttcactgagctggggctggtagggttgctggaacaggcagccggctacttcaccatgccccagcgcgtgttcgggacgtatttccgcgtgggcttctacggcgcccacttcggtgacctggatgagcaggagtttgtgtacaaggagccatcgatcacgaagctggcagagatctcacaccggctggaggagttctacacggagagatttggcgacgacgtcgttgagattatcaaagactctaaccctgtggacaagtccaagcttgactcacaaaaggcctacatccagatcacgtatgtggaaccgtactttgataccta

SEQ ID NO: 125848 - DNA, 312 bp, Homo sapiens
  Payload ID: 4655
  Gene Symbol: DOCK6
  Gene Name: dedicator of cytokinesis 6
  ENST ID: ENST00000587734
  CDS Start-End: 1-297
cgtaagacgctgctcagcaccgaccacgccttcccctacatcaagactcgcatccgtgtgtgccaccgggaggaggaactccttgaacagagcaagtttccgaaaggcagacctctgagcccacaaggaccaaagctgtacctagaggaaccagcacccgggcctcagctgtctgtgctgcgaggggagtctgccctggtgcccactgggctgtggggtgaccacactgtacttggggctgggccctctgcccctgtgtccccatctgtgtgcactgatgcttcctcccttttttaatttaaaatggttttt

SEQ ID NO: 125849 - DNA, 4009 bp, Homo sapiens
  Payload ID: 4655
  Gene Symbol: DOCK6
  Gene Name: dedicator of cytokinesis 6
  ENST ID: ENST00000587656
  CDS Start-End: 1-4009
gctgagcgagggcaacgtggagcaggagctgcgggccagtcttgcagcactgcgcctggccagccccgaaccccttgtggccttctcccaccacgtgctggacaagctcgtgcgtctggtcatcaggcccccgatcatcagtggccagattgtgaacctgggccgtggagcctttgaagcaatggcccatgtagtcagccttgttcaccggagcctggaggcagcccaggatgcccgcggtcactgcccacagctggctgcctacgtccactacgcctttcgccttcctggcactgagcccagcctcccggatggggcccctccagtgacagtgcaggctgccacactggcccgtggctctggtcgccccgcaagcctctacctggcgcgttccaagagcatcagcagcagcaaccctgacctcgccgtggcccctggctctgtggatgacgaggtttcccgcatcctggccagcaagggcatcgatcgctcacactcctgggtgaattccgcttatgctccaggaggcagtaaggctgtgctgcggcgggcgcccccttattgtggggccgaccccagacagctgcttcacgaggagctggctctgcagtgggtggtcagcagcagtgccgtacgcgaggccatcctccagcacgcctggttcttcttccagctcatggtgaagagtatggcgctgcacctgctgcttggccagcgactagacacaccccgcaagctgcgcttccccggacgcttcctggacgacatcactgccttggtgggctctgtgggcctggaggtcatcacccgtgtccacaaggatgtggagctggccgagcacctcaacgccagcctggctttcttcctcagtgaccttctgtccctggtggaccggggctttgtcttcagcctggtccgggcccactacaagcaggtggccacgcggctccagtcgtcccctaatccagcagccctgctgaccctgcgcatggaattcacccgcatcctgtgcagccacgagcactacgtgaccctcaacctcccctgctgccccctgtcacctccagcctcgccctccccctctgtgtcctccaccacctcccagagctccaccttctccagccaagccccggaccccaaggtgaccagcatgttcgaactgagtggaccattccggcagcagcacttcctagctgggctcctgctgacggagctggcactggccctcgaacctgaggctgaaggggcattcctgttgcacaagaaggccatcagtgctgtgcacagcctgctatgtggccatgacactgacccccgctacgccgaggccactgtgaaggctcgtgtggccgagctgtacctgccactgctatcgattgcacgggataccttgccacggctgcatgactttgctgagggcccaggtcagcggtcaagactggcctcaatgcttgactcagacacagaaggcgaaggggacattgcgggtaccatcaacccctctgtggccatggccattgctggtggccccctagcccctggctcccgggccagcatctcccaggggccaccaacggcttctcgcgcaggctgtgccctctctgctgagtcaagccggaccttgctggcgtgtgtgctgtgggtgctgaaaaacaccgagccggcgctcctgcagcgctgggccactgacctgacactcccccagctgggacgtctgttggatttgctgtacctttgcctagctgcctttgagtacaaggggaaaaaggcctttgaacgcatcaacagcctcacattcaaaaaatctctggatatgaaggcgcggctagaggaagccattctgggtaccatcggagctcgacaagaaatggttcggcgaagtcgtgagaggagcccgtttgggaatccggagaatgtgcgctggcggaagagcgtcacacactggaagcaaacctcagaccgcgtggacaagaccaaggatgaaatggaacacgaggccttggtggaagggaacctggcaaccgaggcaagcctagtggttctggacacactggagatcatcgtgcagacggtgatgctttcagaagcccgggagagcgtcttgggggcagtgctgaaggttgtgctgtacagcctgggcagtgcccagagtgccctcttcttgcagcatggcctggccacccagagggcccttgtgtccaagttcccggagctgctgttcgaggaggacacggagctgtgtgccgacctgtgcctgaggctcctacgacactgtggcagccgcatcagcaccatccgcacgcacgccagcgcctcgctgtacctgctcatgcgacagaacttcgagatcggccacaactttgcccgtgtgaagatgcaggtcaccatgtctctctcgtccctggtggggacgacgcagaacttcagtgaagagcacctgcgacgttcactcaaaaccatcctcacctatgctgaggaggacatggggctgcgggacagcaccttcgcagagcaggtccaggacctgatgttcaacctgcacatgatcctgacggacacggtgaagatgaaggaacaccaggaggaccctgagatgctcatcgacctcatgtacagaattgcccggggctaccagggctcaccggaccttcggctgacctggttgcagaacatggccgggaagcacgcggagctgggcaaccacgccgaggccgcccagtgcatggtgcacgcggccgccctcgtggctgagtacctcgccctgctcgaggaccaccgccacctgcccgtgggctgcgtttccttccagaacatctcatccaacgtgctagaggagtccgccatctccgacgacatcctgtcgcccgacgaggagggcttctgctccgggaagcacttcactgagctggggctggtagggttgctggaacaggcagccggctacttcaccatgggcgggctctacgaggcggtgaatgaggtctacaagaacctcatccccatcctggaagcccaccgtgactacaagaagctggccgcggtgcacggcaaactgcaggaggccttcaccaagatcatgcaccagagttccggctgggagcgcgtgttcgggacgtatttccgcgtgggcttctacggcgcccacttcggtgacctggatgagcaggagtttgtgtacaaggagccatcgatcacgaagctggcagagatctcacaccggctggaggagttctacacggagagatttggcgacgacgtcgttgagattatcaaagactctaaccctgtggacaagtccaagcttgactcacaaaaggcctacatccagatcacgtatgtggaaccgtactttgatacctacgagctcaaggaccgggtgacctactttgaccgcaactatgggcttcgcacattcctgttctgcacgccgttcacgccggatgggcgcgcacacggggagctgcccgagcaacacaagcgtaagacgctgctcagcaccgaccacgccttcccctacatcaagactcgcatccgtgtgtgccaccgggaggagacggtgctgacgccagtggaggtggccatcgaggacatgcagaagaagacacgggagctggcctttgccaccgagcaggacccaccagatgctaagatgctacagatggtgcttcagggctctgtagggcccaccgtgaaccagggtcccctggaggtggcccaggtgtttttagcagagatcccggaagaccccaagctcttccggcatcacaacaaattgcggctctgcttcaaggacttctgcaagaaatgtgaggatgcgctgcggaaaaataaggccctgattgggccggaccagaaggagtaccaccgtgagctggagcgcaactactgccgcctgcgggaggctctgcagcccctgcttacccagcgcctgccccagctgatggcacccaccccacccggcctcaggaactccttgaacagagcaagtttccgaaaggcagacctctga

SEQ ID NO: 125850 - DNA, 7084 bp, Homo sapiens
  Payload ID: 4656
  Gene Symbol: DOCK7
  Gene Name: dedicator of cytokinesis 7
  Uniprot ID: Q96N67
  ENST ID: ENST00000251157
  CDS Start-End: 1-6396
atggccgagcgccgcgccttcgcccagaagatcagcagaacggtggcagccgaagttaggaagcagatctccggacaatatagtggttctccccaactgctcaaaaaccttaatattgttggcaatatatcccatcacaccacagtgccccttaccgaagcagtagatccagtggatttggaagattacctcattactcatcctttggctgtggattctgggcctttacgggatttgattgaatttcctccagatgatattgaagttgtttatagtcctcgggactgcagaactcttgtttcagctgtacctgaagaaagtgaaatggatccacatgttagagactgtataagaagttatacagaagactgggcaattgtcatcagaaaatatcataaattgggaacaggatttaatcccaatacattagataaacagaaagaaaggcaaaaaggtttgccaaaacaagtttttgaatctgatgaagctccagatggcaacagctaccaggatgatcaagatgaccttaaaagacgttcaatgtcaatagatgataccccaaggggtagctgggcctgtagtatctttgacttgaaaaattcacttcctgatgctttgcttcccaatttacttgatcgaactccaaatgaagaaatagaccgtcagaatgatgaccaaaggaaatcaaaccgtcacaaagaactttttgctttgcatccatcaccagatgaggaagaaccaatagaacggcttagtgttcctgatatacccaaagaacattttggtcaaagacttcttgtaaaatgcttatcactcaagtttgaaattgaaattgaacccatttttgcaagtttggctttatatgatgtcaaggaaaagaaaaagatttcagaaaacttttattttgaccttaattctgagcagatgaaagggttgttacgtccacatgtaccacctgctgccattactaccctggcaagatcagcaattttttctatcacttatccttcccaagatgtttttcttgtaataaagctagaaaaagtcctacagcaaggagacattggagagtgtgcagaaccatatatgattttcaaagaagcagatgccaccaagaataaagaaaaactggagaaactgaagagtcaagcagatcagttttgccaaagacttgggaaatatcgcatgccttttgcttggactgcaatccatttaatgaatattgttagcagtgctgggagtttggaaagagattctacagaagtagaaatcagtactggagaacgaaaagggtcttggtcagagaggaggaattctagtattgttggcagacgatcacttgaaaggacaacaagtggagatgatgcttgtaacttgacgagctttcgaccagctactctcacagtgacaaatttttttaagcaggaaggagaccgcttaagtgatgaagatctctacaaattccttgctgatatgagaaggccatcttctgtcttacggcgactaagacctattacagctcagctcaagatagacatttctcccgcacctgaaaatccccattattgcctaactccggagctgcttcaagtgaagctttaccctgacagtagagttagacctaccagagaaatcttagagtttcccgcaagggatgtttatgttccaaacactacttacagaaatcttctctacatataccctcagagtcttaattttgccaatcgtcaaggttctgctagaaatataacagtgaaagtccagtttatgtatggagaggatccaagcaatgccatgccggtaatctttggtaaatctagctgttcagaattttcaaaggaagcctatacagccgtagtatatcataacaggtctcctgattttcatgaagaaatcaaggttaagcttcctgctactttaactgaccatcatcacttgctttttactttttatcatgttagttgtcaacaaaaacaaaatactcctcttgaaacaccagttggatatacatggataccaatgcttcagaatggacggttgaagactggccagttttgcttgccagtctcattggaaaaaccaccacaggcttattctgtactgtctcctgaggttcctctacctggcatgaaatgggtagataatcacaaaggtgtttttaatgttgaagttgttgctgtttcgtctatccatacacaagatccttatcttgacaaattttttgctctggtcaatgctctggatgaacacctgttcccagtccgaattggggacatgcgaatcatggaaaataacttagaaaatgaattgaagagcagtatttcagcactgaattcatcccagctggaaccagtggtccgatttcttcatcttctgctagataaactgatacttttagttattagacctcctgtcattgctggccaaatagttaacctaggtcaagcatcttttgaagccatggcatcaattataaatcgacttcacaaaaacttggaaggaaatcatgaccagcatggcagaaacagccttcttgcatcatatattcattatgttttccgcctaccaaatacttaccctaattcatcatcaccaggtcctgggggtttgggaggatcagtgcattatgccacaatggctagatctgcggtgagacctgcaagccttaatttaaatcgttctcgaagccttagtaatagcaatccagatatatctgggactcccacgtcaccagatgatgaagttcgatcaatcatcgggagtaagggtttagatcgctccaattcctgggttaacactggtggtccaaaagctgccccatggggatccaaccccagtccaagtgcagaatcaacacaggctatggatcgaagttgtaatcgtatgtcttcgcacacagagacgtcaagtttcttacaaacattaacgggacgcttaccaactaaaaagctttttcacgaggagctggctttgcagtgggttgtttgcagtggcagcgttcgggaatcagctttgcaacaagcctggttcttttttgaattaatggtaaagagcatggtgcaccatttatactttaatgataaacttgaggctccaaggaaaagtcgttttccagaacgtttcatggatgacattgcagctcttgtcagcacgattgctagtgatatagtttcacgatttcagaaggacacagaaatggttgagagactcaatacaagccttgcattctttctcaatgatctgttgtctgttatggacagaggatttgtttttagccttataaagtcctgctataaacaggtgtcttcaaagctttactcattaccgaatcccagtgttctggtgtccttgaggctggattttctacgaatcatctgcagtcatgagcactatgttacattaaacttaccctgcagcttacttactccacctgcatctccatcaccttctgtttcttctgcaacatctcagagttctggattttctacgaatgtacaagaccaaaagattgcaaatatgtttgaattatccgtgcctttccgccaacagcattatttggcaggacttgtgttaacagagctggctgtcattttagaccctgatgctgaaggactgtttggattgcataagaaagtcatcaatatggtacacaatttactctccagtcacgactcagacccgcggtactctgaccctcagataaaggctcgagtggccatgttgtatctacctctgattggtattatcatggaaactgtacctcagctgtatgattttacagaaactcacaatcaacgaggaagaccaatttgtatagccactgatgattatgaaagtgagagcggaagtatgataagccagaccgttgccatggcaatcgcagggacatcggtccctcaactaacaaggcctggcagtttcctcctcacgtcaacgagtggcaggcaacacactaccttttcagcagaatcaagtcgaagccttttgatctgtctactttgggttctcaaaaatgcagatgaaacagttctacagaagtggtttacagatctctcagtcttgcagctaaaccggctattagatctgctttatctctgtgtgtcttgctttgagtataaagggaaaaaagtgtttgaacgaatgaatagcttgacctttaagaaatcaaaagacatgagagcaaagcttgaagaagctattcttgggagcataggtgccaggcaagaaatggtacggcgaagccgaggacagctcgagagaagcccatctggaagtgcctttggaagtcaagaaaatttgaggtggaggaaagatatgactcactggcgtcaaaacacagagaagcttgacaaatcaagagcagagattgaacacgaagcactgattgatggaaacctggctacagaagcaaacctaatcattttagatacattagagattgttgttcagaccgtttctgtaacggaatccaaagagagcattcttggtggagtgctaaaagtgctactacacagcatggcctgtaaccaaagtgcagtttatctacaacactgttttgctacacagagagccttggtttcaaagtttcctgaactcttatttgaagaagagacagagcagtgtgctgatttatgcctcaggcttctccgacactgtagcagtagcatcggtacaatacggtcacacgccagtgcctccctttacctactaatgaggcaaaactttgagattgggaataactttgccagggttaaaatgcaggtaacaatgtcactatcctccttggtgggcacatctcagaattttaatgaagaattcttaagacgttctctaaagactatattgacatatgctgaagaagatctggaattgagggaaacaacatttcctgatcaggtccaggatctggttttcaatctccatatgattctttctgatactgtgaaaatgaaggaacaccaggaggatcctgaaatgttgattgatctaatgtacagaattgccaagggttaccagacctctccagatctgcgattgacctggttgcagaacatggcaggcaagcactcagaacgaagcaatcatgctgaagctgcacagtgtctagtccactcagcagcacttgttgctgaatatttgagcatgctggaggaccggaaatatcttcctgtgggatgtgtaacatttcagaatatttcatctaatgttttagaagaatctgcggtctcagatgatgtggtatctccagatgaagaaggtatctgctctggaaaatactttactgagtcaggacttgtgggattactggaacaagcagctgcttccttctctatggctggcatgtatgaagcagttaatgaagtttacaaagtacttattcctattcatgaagctaatcgggatgcaaagaaactatccacaattcatggtaaacttcaagaagcattcagcaaaattgttcatcagagtactggctgggagcggatgtttggcacctattttcgtgttggtttttatggaaccaagttcggggatttggatgaacaagaatttgtttacaaggagcctgcaataaccaaacttgcagagatatctcacagattggagggattttacggagaaagatttggagaggatgtggttgaagtaatcaaagactctaatcctgtagacaagtgtaaattagatcctaacaaggcatatattcagattacctatgtggagccatactttgacacatatgagatgaaggacagaatcacctatttcgacaaaaattacaatcttcgtcgattcatgtactgtacaccctttactttagatggccgtgcccatggggaacttcatgaacaattcaaaaggaagaccattctgactacgtctcatgcctttccttatattaaaacaagggtcaatgtcactcataaagaagagatcatcttaacaccaattgaagttgctattgaggacatgcagaaaaagacacaggagttggcatttgcaacacatcaggatcccgcagaccccaaaatgcttcagatggtactccagggatctgtaggcaccacagtgaatcaggggcctttggaagttgcccaggtttttctgtctgaaatacctagtgacccaaagctcttcagacatcataataaactgcgactctgctttaaagattttactaaaaggtgtgaagatgccttaagaaaaaataagagcttaattgggccggatcaaaaggagtatcaaagggaactggagagaaactatcatcgccttaaagaggccctacagccactgatcaacagaaagatccctcagttatacaaggcagtattgcctgtcacctgccacagagattccttcagtcgaatgagccttcgcaaaatggatctctaaactgaatgcacttgttttattcatctgcaaagagccatgtattcaacatcgagtgtgaaaagatctattggaaaacaacatggaatggaattctggaaattattattcattgaagaatgcagtggccaagaaaatatcaaatgtagattgttaacgcttgagaatcatggctatggtttctaatgttctggtaacaagctgttatcttttaagacattttaatgactcaaaggtacactatacatttaccattatttataccatagctaaggttaaaaatttattcactttaagttcgtattttttaatttatattaccatttatagattcattttggaaccattttaaatgtagtaatgcttattttaaaggtactattaaatatgtgaatgtttacactaattttaccgagtgggacttcaaaatttttattattgacaatggcagagaacaattaaagggttgactcaagaactagttccaaacctagcagaataaaaatcatagatagccccaaattaatgagtttggtaactgtttcaaagttattttccatttacatacccaaaacaggaatttagaattgcagaactttacttagtaaaacctttgtgtaaaataatttaaatacggggataactaataccagtgacaacaccttaacttgattaaatcttattacaccaa

SEQ ID NO: 125851 - DNA, 6731 bp, Homo sapiens
  Payload ID: 4656
  Gene Symbol: DOCK7
  Gene Name: dedicator of cytokinesis 7
  Uniprot ID: Q96N67
  ENST ID: ENST00000340370
  CDS Start-End: 1-6330
atggccgagcgccgcgccttcgcccagaagatcagcagaacggtggcagccgaagttaggaagcagatctccggacaatatagtggttctccccaactgctcaaaaaccttaatattgttggcaatatatcccatcacaccacagtgccccttaccgaagcagtagatccagtggatttggaagattacctcattactcatcctttggctgtggattctgggcctttacgggatttgattgaatttcctccagatgatattgaagttgtttatagtcctcgggactgcagaactcttgtttcagctgtacctgaagaaagtgaaatggatccacatgttagagactgtataagaagttatacagaagactgggcaattgtcatcagaaaatatcataaattgggaacaggatttaatcccaatacattagataaacagaaagaaaggcaaaaaggtttgccaaaacaagtttttgaatctgatgaagctccagatggcaacagctaccaggatgatcaagatgaccttaaaagacgttcaatgtcaatagatgataccccaaggggtagctgggcctgtagtatctttgacttgaaaaattcacttcctgatgctttgcttcccaatttacttgatcgaactccaaatgaagaaatagaccgtcagaatgatgaccaaaggaaatcaaaccgtcacaaagaactttttgctttgcatccatcaccagatgaggaagaaccaatagaacggcttagtgttcctgatatacccaaagaacattttggtcaaagacttcttgtaaaatgcttatcactcaagtttgaaattgaaattgaacccatttttgcaagtttggctttatatgatgtcaaggaaaagaaaaagatttcagaaaacttttattttgaccttaattctgagcagatgaaagggttgttacgtccacatgtaccacctgctgccattactaccctggcaagatcagcaattttttctatcacttatccttcccaagatgtttttcttgtaataaagctagaaaaagtcctacagcaaggagacattggagagtgtgcagaaccatatatgattttcaaagaagcagatgccaccaagaataaagaaaaactggagaaactgaagagtcaagcagatcagttttgccaaagacttgggaaatatcgcatgccttttgcttggactgcaatccatttaatgaatattgttagcagtgctgggagtttggaaagagattctacagaagtagaaatcagtactggagaacgaaaagggtcttggtcagagaggaggaattctagtattgttggcagacgatcacttgaaaggacaacaagtggagatgatgcttgtaacttgacgagctttcgaccagctactctcacagtgacaaatttttttaagcaggaaggagaccgcttaagtgatgaagatctctacaaattccttgctgatatgagaaggccatcttctgtcttacggcgactaagacctattacagctcagctcaagatagacatttctcccgcacctgaaaatccccattattgcctaactccggagctgcttcaagtgaagctttaccctgacagtagagttagacctaccagagaaatcttagagtttcccgcaagggatgtttatgttccaaacactacttacagaaatcttctctacatataccctcagagtcttaattttgccaatcgtcaaggttctgctagaaatataacagtgaaagtccagtttatgtatggagaggatccaagcaatgccatgccggtaatctttggtaaatctagctgttcagaattttcaaaggaagcctatacagccgtagtatatcataacaggtctcctgattttcatgaagaaatcaaggttaagcttcctgctactttaactgaccatcatcacttgctttttactttttatcatgttagttgtcaacaaaaacaaaatactcctcttgaaacaccagttggatatacatggataccaatgcttcagaatggacggttgaagactggccagttttgcttgccagtctcattggaaaaaccaccacaggcttattctgtactgtctcctgaggttcctctacctggcatgaaatgggtagataatcacaaaggtgtttttaatgttgaagttgttgctgtttcgtctatccatacacaagatccttatcttgacaaattttttgctctggtcaatgctctggatgaacacctgttcccagtccgaattggggacatgcgaatcatggaaaataacttagaaaatgaattgaagagcagtatttcagcactgaattcatcccagctggaaccagtggtccgatttcttcatcttctgctagataaactgatacttttagttattagacctcctgtcattgctggccaaatagttaacctaggtcaagcatcttttgaagccatggcatcaattataaatcgacttcacaaaaacttggaaggaaatcatgaccagcatggcagaaacagccttcttgcatcatatattcattatgttttccgcctaccaaatacttaccctaattcatcatcaccaggtcctgggggtttgggaggatcagtgcattatgccacaatggctagatctgcggtgagacctgcaagccttaatttaaatcgttctcgaagccttagtaatagcaatccagatatatctgggactcccacgtcaccagatgatgaagttcgatcaatcatcgggagtaaggctatggatcgaagttgtaatcgtatgtcttcgcacacagagacgtcaagtttcttacaaacattaacgggacgcttaccaactaaaaagctttttcacgaggagctggctttgcagtgggttgtttgcagtggcagcgttcgggaatcagctttgcaacaagcctggttcttttttgaattaatggtaaagagcatggtgcaccatttatactttaatgataaacttgaggctccaaggaaaagtcgttttccagaacgtttcatggatgacattgcagctcttgtcagcacgattgctagtgatatagtttcacgatttcagaaggacacagaaatggttgagagactcaatacaagccttgcattctttctcaatgatctgttgtctgttatggacagaggatttgtttttagccttataaagtcctgctataaacaggtgtcttcaaagctttactcattaccgaatcccagtgttctggtgtccttgaggctggattttctacgaatcatctgcagtcatgagcactatgttacattaaacttaccctgcagcttacttactccacctgcatctccatcaccttctgtttcttctgcaacatctcagagttctggattttctacgaatgtacaagaccaaaagattgcaaatatgtttgaattatccgtgcctttccgccaacagcattatttggcaggacttgtgttaacagagctggctgtcattttagaccctgatgctgaaggactgtttggattgcataagaaagtcatcaatatggtacacaatttactctccagtcacgactcagacccgcggtactctgaccctcagataaaggctcgagtggccatgttgtatctacctctgattggtattatcatggaaactgtacctcagctgtatgattttacagaaactcacaatcaacgaggaagaccaatttgtatagccactgatgattatgaaagtgagagcggaagtatgataagccagaccgttgccatggcaatcgcagggacatcggtccctcaactaacaaggcctggcagtttcctcctcacgtcaacgagtggcaggcaacacactaccttttcagcagaatcaagtcgaagccttttgatctgtctactttgggttctcaaaaatgcagatgaaacagttctacagaagtggtttacagatctctcagtcttgcagctaaaccggctattagatctgctttatctctgtgtgtcttgctttgagtataaagggaaaaaagtgtttgaacgaatgaatagcttgacctttaagaaatcaaaagacatgagagcaaagcttgaagaagctattcttgggagcataggtgccaggcaagaaatggtacggcgaagccgaggacagctcggtacgtacacaatagcttctcctcctgagagaagcccatctggaagtgcctttggaagtcaagaaaatttgaggtggaggaaagatatgactcactggcgtcaaaacacagagaagcttgacaaatcaagagcagagattgaacacgaagcactgattgatggaaacctggctacagaagcaaacctaatcattttagatacattagagattgttgttcagaccgtttctgtaacggaatccaaagagagcattcttggtggagtgctaaaagtgctactacacagcatggcctgtaaccaaagtgcagtttatctacaacactgttttgctacacagagagccttggtttcaaagtttcctgaactcttatttgaagaagagacagagcagtgtgctgatttatgcctcaggcttctccgacactgtagcagtagcatcggtacaatacggtcacacgccagtgcctccctttacctactaatgaggcaaaactttgagattgggaataactttgccagggttaaaatgcaggtaacaatgtcactatcctccttggtgggcacatctcagaattttaatgaagaattcttaagacgttctctaaagactatattgacatatgctgaagaagatctggaattgagggaaacaacatttcctgatcaggtccaggatctggttttcaatctccatatgattctttctgatactgtgaaaatgaaggaacaccaggaggatcctgaaatgttgattgatctaatgtacagaattgccaagggttaccagacctctccagatctgcgattgacctggttgcagaacatggcaggcaagcactcagaacgaagcaatcatgctgaagctgcacagtgtctagtccactcagcagcacttgttgctgaatatttgagcatgctggaggaccggaaatatcttcctgtgggatgtgtaacatttcagaatatttcatctaatgttttagaagaatctgcggtctcagatgatgtggtatctccagatgaagaaggtatctgctctggaaaatactttactgagtcaggacttgtgggattactggaacaagcagctgcttccttctctatggctggcatgtatgaagcagttaatgaagtttacaaagtacttattcctattcatgaagctaatcgggatgcaaagaaactatccacaattcatggtaaacttcaagaagcattcagcaaaattgttcatcagagtactggctgggagcggatgtttggcacctattttcgtgttggtttttatggaaccaagttcggggatttggatgaacaagaatttgtttacaaggagcctgcaataaccaaacttgcagagatatctcacagattggagggattttacggagaaagatttggagaggatgtggttgaagtaatcaaagactctaatcctgtagacaagtgtaaattagatcctaacaaggcatatattcagattacctatgtggagccatactttgacacatatgagatgaaggacagaatcacctatttcgacaaaaattacaatcttcgtcgattcatgtactgtacaccctttactttagatggccgtgcccatggggaacttcatgaacaattcaaaaggaagaccattctgactacgtctcatgcctttccttatattaaaacaagggtcaatgtcactcataaagaagagatcatcttaacaccaattgaagttgctattgaggacatgcagaaaaagacacaggagttggcatttgcaacacatcaggatcccgcagaccccaaaatgcttcagatggtactccagggatctgtaggcaccacagtgaatcaggggcctttggaagttgcccaggtttttctgtctgaaatacctagtgacccaaagctcttcagacatcataataaactgcgactctgctttaaagattttactaaaaggtgtgaagatgccttaagaaaaaataagagcttaattgggccggatcaaaaggagtatcaaagggaactggagagaaactatcatcgccttaaagaggccctacagccactgatcaacagaaagatccctcagttatacaaggcagtattgcctgtcacctgccacagagattccttcagtcgaatgagccttcgcaaaatggatctctaaactgaatgcacttgttttattcatctgcaaagagccatgtattcaacatcgagtgtgaaaagatctattggaaaacaacatggaatggaattctggaaattattattcattgaagaatgcagtggccaagaaaatatcaaatgtagattgttaacgcttgagaatcatggctatggtttctaatgttctggtaacaagctgttatcttttaagacattttaatgactcaaaggtacactatacatttaccattatttataccatagctaaggttaaaaatttattcactttaagttcgtattttttaatttatattaccatttatagattcattttggaaccattttaaatgtagtaatgcttattttaaaggtactattaaatatgtgaatgtttacact

SEQ ID NO: 125852 - DNA, 2678 bp, Homo sapiens
  Payload ID: 4656
  Gene Symbol: DOCK7
  Gene Name: dedicator of cytokinesis 7
  Uniprot ID: Q96N67
  ENST ID: ENST00000404627
  CDS Start-End: 105-2003
ggcggaggccgcgagggagggagcacgagcgaggaggcacgcgcccgccggtccgcacccggcccgccgcagccgccgccgccgtcgccgtcgccgcagcagccatggccgagcgccgcgccttcgcccagaagatcagcagaacggtggcagccgaagttaggaagcagatctccggacaatatagtggttctccccaactgctcaaaaaccttaatattgttggcaatatatcccatcacaccacagtgccccttaccgaagcagtagatccagtggatttggaagattacctcattactcatcctttggctgtggattctgggcctttacgggatttgattgaatttcctccagatgatattgaagttgtttatagtcctcgggactgcagaactcttgtttcagctgtacctgaagaaagtgaaatggatccacatgttagagactgtataagaagttatacagaagactgggcaattgtcatcagaaaatatcataaattgggaacaggatttaatcccaatacattagataaacagaaagaaaggcaaaaaggtttgccaaaacaagtttttgaatctgatgaagctccagatggcaacagctaccaggatgatcaagatgaccttaaaagacgttcaatgtcaatagatgataccccaaggggtagctgggcctgtagtatctttgacttgaaaaattcacttcctgatgctttgcttcccaatttacttgatcgaactccaaatgaagaaatagaccgtcagaatgatgaccaaaggaaatcaaaccgtcacaaagaactttttgctttgcatccatcaccagatgaggaagaaccaatagaacggcttagtgttcctgatatacccaaagaacattttggtcaaagacttcttgtaaaatgcttatcactcaagtttgaaattgaaattgaacccatttttgcaagtttggctttatatgatgtcaaggaaaagaaaaagatttcagaaaacttttattttgaccttaattctgagcagatgaaagggttgttacgtccacatgtaccacctgctgccattactaccctggcaagatcagcaattttttctatcacttatccttcccaagatgtttttcttgtaataaagctagaaaaagtcctacagcaaggagacattggagagtgtgcagaaccatatatgattttcaaagaagcagatgccaccaagaataaagaaaaactggagaaactgaagagtcaagcagatcagttttgccaaagacttgggaaatatcgcatgccttttgcttggactgcaatccatttaatgaatattgttagcagtgctgggagtttggaaagagattctacagaagtagaaatcagtactggagaacgaaaagggtcttggtcagagaggaggaattctagtattgttggcagacgatcacttgaaaggacaacaagtggagatgatgcttgtaacttgacgagctttcgaccagctactctcacagtgacaaatttttttaagcaggaaggagaccgcttaagtgatgaagatctctacaaattccttgctgatatgagaaggccatcttctgtcttacggcgactaagacctattacagctcagctcaagatagacatttctcccgcacctgaaaatccccattattgcctaactccggagctgcttcaagtgaagctttaccctgacagtagagttagacctaccagagaaatcttagagtttcccgcaagggatgtttatgttccaaacactacttacagaaatcttctctacatataccctcagagtcttaattttgccaatcgtcaaggttctgctagaaatataacagtgaaagtccagtttatgtatggagaggatccaagcaatgccatgccgagccccagctgcacccatcctataccgacagttagacctctccctctttggtgctaccatagcatcttctcacttctttcatgggactttatcacttgatgattctatatttcttaatttcacccattagattgtgagctccttgagggcagggacgatgtcttactcatgtctatatcttgactcctgtcacatttttggataaataattaatgctcaatccatattgctaaatgattaaaagtacatgtcaaatggtcaaaaaaggaacactgtctgctttatgtcatattatgaaaataaacaagttattttgtgaaaagtgatagcttctcagagggaaaaaaggtattgcatttcttttacttgtgtgttattagtcatatgaaaatacaatgtttttatgtatgaaatggctgatttgaaagagtatataaacatagacatactgtgtttgccttttttaaaaaaagggctgtttaaatgggtcctaagataactttttgataatgtaatattgacatgataaaattgtaaacttcataattctggcacaggaacaatttatgaaaacatactaaggtatttgtaaattgatgaaataatatatatcttaggaaagtcataattattacacttgtacatacccttaaaataaaagagcctgcttgaaatgttgcaaaaagaaacagaaatacctgctaatatgcccttctaattaaggatgatgccaattaatctctttatataaataataaactttgagttgtttta

SEQ ID NO: 125853 - DNA, 6985 bp, Homo sapiens
  Payload ID: 4656
  Gene Symbol: DOCK7
  Gene Name: dedicator of cytokinesis 7
  ENST ID: ENST00000454575
  CDS Start-End: 12-6401
ccgcagcagccatggccgagcgccgcgccttcgcccagaagatcagcagaacggtggcagccgaagttaggaagcagatctccggacaatatagtggttctccccaactgctcaaaaaccttaatattgttggcaatatatcccatcacaccacagtgccccttaccgaagcagtagatccagtggatttggaagattacctcattactcatcctttggctgtggattctgggcctttacgggatttgattgaatttcctccagatgatattgaagttgtttatagtcctcgggactgcagaactcttgtttcagctgtacctgaagaaagtgaaatggatccacatgttagagactgtataagaagttatacagaagactgggcaattgtcatcagaaaatatcataaattgggaacaggatttaatcccaatacattagataaacagaaagaaaggcaaaaaggtttgccaaaacaagtttttgaatctgatgaagctccagatggcaacagctaccaggatgatcaagatgaccttaaaagacgttcaatgtcaatagatgataccccaaggggtagctgggcctgtagtatctttgacttgaaaaattcacttcctgatgctttgcttcccaatttacttgatcgaactccaaatgaagaaatagaccgtcagaatgatgaccaaaggaaatcaaaccgtcacaaagaactttttgctttgcatccatcaccagatgaggaagaaccaatagaacggcttagtgttcctgatatacccaaagaacattttggtcaaagacttcttgtaaaatgcttatcactcaagtttgaaattgaaattgaacccatttttgcaagtttggctttatatgatgtcaaggaaaagaaaaagatttcagaaaacttttattttgaccttaattctgagcagatgaaagggttgttacgtccacatgtaccacctgctgccattactaccctggcaagatcagcaattttttctatcacttatccttcccaagatgtttttcttgtaataaagctagaaaaagtcctacagcaaggagacattggagagtgtgcagaaccatatatgattttcaaagaagcagatgccaccaagaataaagaaaaactggagaaactgaagagtcaagcagatcagttttgccaaagacttgggaaatatcgcatgccttttgcttggactgcaatccatttaatgaatattgttagcagtgctgggagtttggaaagagattctacagaagtagaaatcagtactggagaacgaaaagggtcttggtcagagaggaggaattctagtattgttggcagacgatcacttgaaaggacaacaagtggagatgatgcttgtaacttgacgagctttcgaccagctactctcacagtgacaaatttttttaagcaggaaggagaccgcttaagtgatgaagatctctacaaattccttgctgatatgagaaggccatcttctgtcttacggcgactaagacctattacagctcagctcaagatagacatttctcccgcacctgaaaatccccattattgcctaactccggagctgcttcaagtgaagctttaccctgacagtagagttagacctaccagagaaatcttagagtttcccgcaagggatgtttatgttccaaacactacttacagaaatcttctctacatataccctcagagtcttaattttgccaatcgtcaaggttctgctagaaatataacagtgaaagtccagtttatgtatggagaggatccaagcaatgccatgccggtaatctttggtaaatctagctgttcagaattttcaaaggaagcctatacagccgtagtatatcataacaggtctcctgattttcatgaagaaatcaaggttaagcttcctgctactttaactgaccatcatcacttgctttttactttttatcatgttagttgtcaacaaaaacaaaatactcctcttgaaacaccagttggatatacatggataccaatgcttcagaatggacggttgaagactggccagttttgcttgccagtctcattggaaaaaccaccacaggcttattctgtactgtctcctgaggttcctctacctggcatgaaatgggtagataatcacaaaggtgtttttaatgttgaagttgttgctgtttcgtctatccatacacaagatccttatcttgacaaattttttgctctggtcaatgctctggatgaacacctgttcccagtccgaattggggacatgcgaatcatggaaaataacttagaaaatgaattgaagagcagtatttcagcactgaattcatcccagctggaaccagtggtccgatttcttcatcttctgctagataaactgatacttttagttattagacctcctgtcattgctggccaaatagttaacctaggtcaagcatcttttgaagccatggcatcaattataaatcgacttcacaaaaacttggaaggaaatcatgaccagcatggcagaaacagccttcttgcatcatatattcattatgttttccgcctaccaaatacttaccctaattcatcatcaccaggtcctgggggtttgggaggatcagtgcattatgccacaatggctagatctgcggtgagacctgcaagccttaatttaaatcgttctcgaagccttagtaatagcaatccagatatatctgggactcccacgtcaccagatgatgaagttcgatcaatcatcgggagtaagggtttagatcgctccaattcctgggttaacactggtggtccaaaagctgccccatggggatccaaccccagtccaagtgcagaatcaacacaggctatggatcgaagttgtaatcgtatgtcttcgcacacagagacgtcaagtttcttacaaacattaacgggacgcttaccaactaaaaagctttttcacgaggagctggctttgcagtgggttgtttgcagtggcagcgttcgggaatcagctttgcaacaagcctggttcttttttgaattaatggtaaagagcatggtgcaccatttatactttaatgataaacttgaggctccaaggaaaagtcgttttccagaacgtttcatggatgacattgcagctcttgtcagcacgattgctagtgatatagtttcacgatttcagaaggacacagaaatggttgagagactcaatacaagccttgcattctttctcaatgatctgttgtctgttatggacagaggatttgtttttagccttataaagtcctgctataaacaggtgtcttcaaagctttactcattaccgaatcccagtgttctggtgtccttgaggctggattttctacgaatcatctgcagtcatgagcactatgttacattaaacttaccctgcagcttacttactccacctgcatctccatcaccttctgtttcttctgcaacatctcagagttctggattttctacgaatgtacaagaccaaaagattgcaaatatgtttgaattatccgtgcctttccgccaacagcattatttggcaggacttgtgttaacagagctggctgtcattttagaccctgatgctgaaggactgtttggattgcataagaaagtcatcaatatggtacacaatttactctccagtcacgactcagacccgcggtactctgaccctcagataaaggctcgagtggccatgttgtatctacctctgattggtattatcatggaaactgtacctcagctgtatgattttacagaaactcacaatcaacgaggaagaccaatttgtatagccactgatgattatgaaagtgagagcggaagtatgataagccagaccgttgccatggcaatcgcagggacatcggtccctcaactaacaaggcctggcagtttcctcctcacgtcaacgagtggcaggcaacacactaccttttcagcagaatcaagtcgaagccttttgatctgtctactttgggttctcaaaaatgcagatgaaacagttctacagaagtggtttacagatctctcagtcttgcagctaaaccggctattagatctgctttatctctgtgtgtcttgctttgagtataaagggaaaaaagtgtttgaacgaatgaatagcttgacctttaagaaatcaaaagacatgagagcaaagcttgaagaagctattcttgggagcataggtgccaggcaagaaatggtacggcgaagccgaggacagctcgagagaagcccatctggaagtgcctttggaagtcaagaaaatttgaggtggaggaaagatatgactcactggcgtcaaaacacagagaagcttgacaaatcaagagcagagattgaacacgaagcactgattgatggaaacctggctacagaagcaaacctaatcattttagatacattagagattgttgttcagaccgtttctgtaacggaatccaaagagagcattcttggtggagtgctaaaagtgctactacacagcatggcctgtaaccaaagtgcagtttatctacaacactgttttgctacacagagagccttggtttcaaagtttcctgaactcttatttgaagaagagacagagcagtgtgctgatttatgcctcaggcttctccgacactgtagcagtagcatcggtacaatacggtcacacgccagtgcctccctttacctactaatgaggcaaaactttgagattgggaataactttgccagggttaaaatgcaggtaacaatgtcactatcctccttggtgggcacatctcagaattttaatgaagaattcttaagacgttctctaaagactatattgacatatgctgaagaagatctggaattgagggaaacaacatttcctgatcaggtccaggatctggttttcaatctccatatgattctttctgatactgtgaaaatgaaggaacaccaggaggatcctgaaatgttgattgatctaatgtacagaattgccaagggttaccagacctctccagatctgcgattgacctggttgcagaacatggcaggcaagcactcagaacgaagcaatcatgctgaagctgcacagtgtctagtccactcagcagcacttgttgctgaatatttgagcatgctggaggaccggaaatatcttcctgtgggatgtgtaacatttcagaatatttcatctaatgttttagaagaatctgcggtctcagatgatgtggtatctccagatgaagaaggtatctgctctggaaaatactttactgagtcaggacttgtgggattactggaacaagcagctgcttccttctctatggctggcatgtatgaagcagttaatgaagtttacaaagtacttattcctattcatgaagctaatcgggatgcaaagaaactatccacaattcatggtaaacttcaagaagcattcagcaaaattgttcatcaggatggtaagcggatgtttggcacctattttcgtgttggtttttatggaaccaagttcggggatttggatgaacaagaatttgtttacaaggagcctgcaataaccaaacttgcagagatatctcacagattggagggattttacggagaaagatttggagaggatgtggttgaagtaatcaaagactctaatcctgtagacaagtgtaaattagatcctaacaaggcatatattcagattacctatgtggagccatactttgacacatatgagatgaaggacagaatcacctatttcgacaaaaattacaatcttcgtcgattcatgtactgtacaccctttactttagatggccgtgcccatggggaacttcatgaacaattcaaaaggaagaccattctgactacgtctcatgcctttccttatattaaaacaagggtcaatgtcactcataaagaagagatcatcttaacaccaattgaagttgctattgaggacatgcagaaaaagacacaggagttggcatttgcaacacatcaggatcccgcagaccccaaaatgcttcagatggtactccagggatctgtaggcaccacagtgaatcaggggcctttggaagttgcccaggtttttctgtctgaaatacctagtgacccaaagctcttcagacatcataataaactgcgactctgctttaaagattttactaaaaggtgtgaagatgccttaagaaaaaataagagcttaattgggccggatcaaaaggagtatcaaagggaactggagagaaactatcatcgccttaaagaggccctacagccactgatcaacagaaagatccctcagttatacaaggcagtattgcctgtcacctgccacagagattccttcagtcgaatgagccttcgcaaaatggatctctaaactgaatgcacttgttttattcatctgcaaagagccatgtattcaacatcgagtgtgaaaagatctattggaaaacaacatggaatggaattctggaaattattattcattgaagaatgcagtggccaagaaaatatcaaatgtagattgttaacgcttgagaatcatggctatggtttctaatgttctggtaacaagctgttatcttttaagacattttaatgactcaaaggtacactatacatttaccattatttataccatagctaaggttaaaaatttattcactttaagttcgtattttttaatttatattaccatttatagattcattttggaaccattttaaatgtagtaatgcttattttaaaggtactattaaatatgtgaatgtttacactaattttaccgagtgggacttcaaaatttttattattgacaatggcagagaacaattaaagggttgactcaagaactagttccaaacctagcagaataaaaatcatagatagccccaaattaatgagtttggtaactgtttcaaagttattttccatttacatacccaaaacaggaatttagaa

SEQ ID NO: 125854 - DNA, 2460 bp, Homo sapiens
  Payload ID: 4656
  Gene Symbol: DOCK7
  Gene Name: dedicator of cytokinesis 7
  ENST ID: ENST00000614472
  CDS Start-End: 1-2412
atggatccacatgttagagactgtataagaagttatacagaagactgggcaattgtcatcagaaaatatcataaattgggaacaggatttaatcccaatacattagataaacagaaagaaaggcaaaaaggtttgccaaaacaagtttttgaatctgatgaagctccagatggcaacagctaccaggatgatcaagatgaccttaaaagacgttcaatgtcaatagatgataccccaaggggtagctgggcctgtagtatctttgacttgaaaaattcacttcctgatgctttgcttcccaatttacttgatcgaactccaaatgaagaaatagaccgtcagaatgatgaccaaaggaaatcaaaccgtcacaaagaactttttgctttgcatccatcaccagatgaggaagaaccaatagaacggcttagtgttcctgatatacccaaagaacattttggtcaaagacttcttgtaaaatgcttatcactcaagtttgaaattgaaattgaacccatttttgcaagtttggctttatatgatgtcaaggaaaagaaaaagatttcagaaaacttttattttgaccttaattctgagcagatgaaagggttgttacgtccacatgtaccacctgctgccattactaccctggcaagatcagcaattttttctatcacttatccttcccaagatgtttttcttgtaataaagctagaaaaagtcctacagcaaggagacattggagagtgtgcagaaccatatatgattttcaaagaagcagatgccaccaagaataaagaaaaactggagaaactgaagagtcaagcagatcagttttgccaaagacttgggaaatatcgcatgccttttgcttggactgcaatccatttaatgaatattgttagcagtgctgggagtttggaaagagattctacagaagtagaaatcagtactggagaacgaaaagggtcttggtcagagaggaggaattctagtattgttggcagacgatcacttgaaaggacaacaagtggagatgatgcttgtaacttgacgagctttcgaccagctactctcacagtgacaaatttttttaagcaggaaggagaccgcttaagtgatgaagatctctacaaattccttgctgatatgagaaggccatcttctgtcttacggcgactaagacctattacagctcagctcaagatagacatttctcccgcacctgaaaatccccattattgcctaactccggagctgcttcaagtgaagctttaccctgacagtagagttagacctaccagagaaatcttagagtttcccgcaagggatgtttatgttccaaacactacttacagaaatcttctctacatataccctcagagtcttaattttgccaatcgtcaaggttctgctagaaatataacagtgaaagtccagtttatgtatggagaggatccaagcaatgccatgccggtaatctttggtaaatctagctgttcagaattttcaaaggaagcctatacagccgtagtatatcataacaggtctcctgattttcatgaagaaatcaaggttaagcttcctgctactttaactgaccatcatcacttgctttttactttttatcatgttagttgtcaacaaaaacaaaatactcctcttgaaacaccagttggatatacatggataccaatgcttcagaatggacggttgaagactggccagttttgcttgccagtctcattggaaaaaccaccacaggcttattctgtactgtctcctgaggttcctctacctggcatgaaatgggtagataatcacaaaggtgtttttaatgttgaagttgttgctgtttcgtctatccatacacaagatccttatcttgacaaattttttgctctggtcaatgctctggatgaacacctgttcccagtccgaattggggacatgcgaatcatggaaaataacttagaaaatgaattgaagagcagtatttcagcactgaattcatcccagctggaaccagtggtccgatttcttcatcttctgctagataaactgatacttttagttattagacctcctgtcattgctggccaaatagttaacctaggtcaagcatcttttgaagccatggcatcaattataaatcgacttcacaaaaacttggaaggaaatcatgaccagcatggcagaaacagccttcttgcatcatatattcattatgttttccgcctaccaaatacttaccctaattcatcatcaccaggtcctgggggtttgggaggatcagtgcattatgccacaatggctagatctgcggtgagacctgcaagccttaatttaaatcgttctcgaagccttagtaatagcaatccagatatatctgggactcccacgtcaccatgatgaagttcgatcaatcatcgggagtaaggctatggatcgaagttgtaa

SEQ ID NO: 125855 - DNA, 681 bp, Homo sapiens
  Payload ID: 4656
  Gene Symbol: DOCK7
  Gene Name: dedicator of cytokinesis 7
  ENST ID: ENST00000634223
  CDS Start-End: 1-139
cactacttacagaaatcttctctacatataccctcagagtcttaattttgccaatcgtcaaggttctgctagaaatataacagtgaaagtccagtttatgtatggagaggatccaagcaatgccatgccggtctcctgattttcatgaagaaatcaaggttaagcttcctgctactttaactgaccatcatcacttgctttttactttttatcatgttagttgtcaacaaaaacaaaatactcctcttgaaacaccagttggatatacatggataccaatgcttcagaatggacggttgaagactggccagttttgcttgccagtctcattggaaaaaccaccacaggcttattctgtactgtctcctgaggttcctctacctggcatgaaatgggtagataatcacaaaggtgtttttaatgttgaagttgttgctgtttcgtctatccatacacaagatccttatcttgacaaattttttgctctggtcaatgctctggatgaacacctgttcccagtccgaattggggacatgcgaatcatggaaaataacttagaaaatgaattgaagagcagtatttcagcactgaattcatcccagctggaaccagtggtccgatttcttcatcttctgctagataaactgatacttttagttattagacctcctgtcattgctg

SEQ ID NO: 125856 - DNA, 765 bp, Homo sapiens
  Payload ID: 4656
  Gene Symbol: DOCK7
  Gene Name: dedicator of cytokinesis 7
  ENST ID: ENST00000634929
  CDS Start-End: 1-765
acaaaggtgtttttaatgttgaagttgttgctgtttcgtctatccatacacaagatccttatcttgacaaattttttgctctggtcaatgctctggatgaacacctgttcccagtccgaattggggacatgcgaatcatggaaaataacttagaaaatgaattgaagagcagtatttcagcactgaattcatcccagctggaaccagtggtccgatttcttcatcttctgctagataaactgatacttttagttattagacctcctgtcattgctggccaaatagttaacctaggtcaagcatcttttgaagccatggcatcaattataaatcgacttcacaaaaacttggaaggaaatcatgaccagcatggcagaaacagccttcttgcatcatatattcattatgttttccgcctaccaaatacttaccctaattcatcatcaccaggtcctgggggtttgggaggatcagtgcattatgccacaatggctagatctgcggtgagacctgcaagccttaatttaaatcgttctcgaagccttagtaatagcaatccagatatatctgggactcccacgtcaccagatgatgaagttcgatcaatcatcgggagtaagctttttcacgaggagctggctttgcagtgggttgtttgcagtggcagcgttcgggaatcagctttgcaacaagcctggttcttttttgaattaatggtaaagagcatggtgcaccatttatactttaatgataaacttgaggctc

SEQ ID NO: 125857 - DNA, 6423 bp, Homo sapiens
  Payload ID: 4656
  Gene Symbol: DOCK7
  Gene Name: dedicator of cytokinesis 7
  ENST ID: ENST00000635253
  CDS Start-End: 1-6423
atggccgagcgccgcgccttcgcccagaagatcagcagaacggtggcagccgaagttaggaagcagatctccggacaatatagtggttctccccaactgctcaaaaaccttaatattgttggcaatatatcccatcacaccacagtgccccttaccgaagcagtagatccagtggatttggaagattacctcattactcatcctttggctgtggattctgggcctttacgggatttgattgaatttcctccagatgatattgaagttgtttatagtcctcgggactgcagaactcttgtttcagctgtacctgaagaaagtgaaatggatccacatgttagagactgtataagaagttatacagaagactgggcaattgtcatcagaaaatatcataaattgggaacaggatttaatcccaatacattagataaacagaaagaaaggcaaaaaggtttgccaaaacaagtttttgaatctgatgaagctccagatggcaacagctaccaggatgatcaagatgaccttaaaagacgttcaatgtcaatagatgataccccaaggggtagctgggcctgtagtatctttgacttgaaaaattcacttcctgatgctttgcttcccaatttacttgatcgaactccaaatgaagaaatagaccgtcagaatgatgaccaaaggaaatcaaaccgtcacaaagaactttttgctttgcatccatcaccagatgaggaagaaccaatagaacggcttagtgttcctgatatacccaaagaacattttggtcaaagacttcttgtaaaatgcttatcactcaagtttgaaattgaaattgaacccatttttgcaagtttggctttatatgatgtcaaggaaaagaaaaagatttcagaaaacttttattttgaccttaattctgagcagatgaaagggttgttacgtccacatgtaccacctgctgccattactaccctggcaagatcagcaattttttctatcacttatccttcccaagatgtttttcttgtaataaagctagaaaaagtcctacagcaaggagacattggagagtgtgcagaaccatatatgattttcaaagaagcagatgccaccaagaataaagaaaaactggagaaactgaagagtcaagcagatcagttttgccaaagacttgggaaatatcgcatgccttttgcttggactgcaatccatttaatgaatattgttagcagtgctgggagtttggaaagagattctacagaagtagaaatcagtactggagaacgaaaagggtcttggtcagagaggaggaattctagtattgttggcagacgatcacttgaaaggacaacaagtggagatgatgcttgtaacttgacgagctttcgaccagctactctcacagtgacaaatttttttaagcaggaaggagaccgcttaagtgatgaagatctctacaaattccttgctgatatgagaaggccatcttctgtcttacggcgactaagacctattacagctcagctcaagatagacatttctcccgcacctgaaaatccccattattgcctaactccggagctgcttcaagtgaagctttaccctgacagtagagttagacctaccagagaaatcttagagtttcccgcaagggatgtttatgttccaaacactacttacagaaatcttctctacatataccctcagagtcttaattttgccaatcgtcaaggttctgctagaaatataacagtgaaagtccagtttatgtatggagaggatccaagcaatgccatgccggtaatctttggtaaatctagctgttcagaattttcaaaggaagcctatacagccgtagtatatcataacaggtctcctgattttcatgaagaaatcaaggttaagcttcctgctactttaactgaccatcatcacttgctttttactttttatcatgttagttgtcaacaaaaacaaaatactcctcttgaaacaccagttggatatacatggataccaatgcttcagaatggacggttgaagactggccagttttgcttgccagtctcattggaaaaaccaccacaggcttattctgtactgtctcctgaggttcctctacctggcatgaaatgggtagataatcacaaaggtgtttttaatgttgaagttgttgctgtttcgtctatccatacacaagatccttatcttgacaaattttttgctctggtcaatgctctggatgaacacctgttcccagtccgaattggggacatgcgaatcatggaaaataacttagaaaatgaattgaagagcagtatttcagcactgaattcatcccagctggaaccagtggtccgatttcttcatcttctgctagataaactgatacttttagttattagacctcctgtcattgctggccaaatagttaacctaggtcaagcatcttttgaagccatggcatcaattataaatcgacttcacaaaaacttggaaggaaatcatgaccagcatggcagaaacagccttcttgcatcatatattcattatgttttccgcctaccaaatacttaccctaattcatcatcaccaggtcctgggggtttgggaggatcagtgcattatgccacaatggctagatctgcggtgagacctgcaagccttaatttaaatcgttctcgaagccttagtaatagcaatccagatatatctgggactcccacgtcaccagatgatgaagttcgatcaatcatcgggagtaagggtttagatcgctccaattcctgggttaacactggtggtccaaaagctgccccatggggatccaaccccagtccaagtgcagaatcaacacaggctatggatcgaagttgtaatcgtatgtcttcgcacacagagacgtcaagtttcttacaaacattaacgggacgcttaccaactaaaaagctttttcacgaggagctggctttgcagtgggttgtttgcagtggcagcgttcgggaatcagctttgcaacaagcctggttcttttttgaattaatggtaaagagcatggtgcaccatttatactttaatgataaacttgaggctccaaggaaaagtcgttttccagaacgtttcatggatgacattgcagctcttgtcagcacgattgctagtgatatagtttcacgatttcagaaggacacagaaatggttgagagactcaatacaagccttgcattctttctcaatgatctgttgtctgttatggacagaggatttgtttttagccttataaagtcctgctataaacaggtgtcttcaaagctttactcattaccgaatcccagtgttctggtgtccttgaggctggattttctacgaatcatctgcagtcatgagcactatgttacattaaacttaccctgcagcttacttactccacctgcatctccatcaccttctgtttcttctgcaacatctcagagttctggattttctacgaatgtacaagaccaaaagattgcaaatatgtttgaattatccgtgcctttccgccaacagcattatttggcaggacttgtgttaacagagctggctgtcattttagaccctgatgctgaaggactgtttggattgcataagaaagtcatcaatatggtacacaatttactctccagtcacgactcagacccgcggtactctgaccctcagataaaggctcgagtggccatgttgtatctacctctgattggtattatcatggaaactgtacctcagctgtatgattttacagaaactcacaatcaacgaggaagaccaatttgtatagccactgatgattatgaaagtgagagcggaagtatgataagccagaccgttgccatggcaatcgcagggacatcggtccctcaactaacaaggcctggcagtttcctcctcacgtcaacgagtggcaggcaacacactaccttttcagcagaatcaagtcgaagccttttgatctgtctactttgggttctcaaaaatgcagatgaaacagttctacagaagtggtttacagatctctcagtcttgcagctaaaccggctattagatctgctttatctctgtgtgtcttgctttgagtataaagggaaaaaagtgtttgaacgaatgaatagcttgacctttaagaaatcaaaagacatgagagcaaagcttgaagaagctattcttgggagcataggtgccaggcaagaaatggtacggcgaagccgaggacagctcggtacgtacacaatagcttctcctcctgagagaagcccatctggaagtgcctttggaagtcaagaaaatttgaggtggaggaaagatatgactcactggcgtcaaaacacagagaagcttgacaaatcaagagcagagattgaacacgaagcactgattgatggaaacctggctacagaagcaaacctaatcattttagatacattagagattgttgttcagaccgtttctgtaacggaatccaaagagagcattcttggtggagtgctaaaagtgctactacacagcatggcctgtaaccaaagtgcagtttatctacaacactgttttgctacacagagagccttggtttcaaagtttcctgaactcttatttgaagaagagacagagcagtgtgctgatttatgcctcaggcttctccgacactgtagcagtagcatcggtacaatacggtcacacgccagtgcctccctttacctactaatgaggcaaaactttgagattgggaataactttgccagggttaaaatgcaggtaacaatgtcactatcctccttggtgggcacatctcagaattttaatgaagaattcttaagacgttctctaaagactatattgacatatgctgaagaagatctggaattgagggaaacaacatttcctgatcaggtccaggatctggttttcaatctccatatgattctttctgatactgtgaaaatgaaggaacaccaggaggatcctgaaatgttgattgatctaatgtacagaattgccaagggttaccagacctctccagatctgcgattgacctggttgcagaacatggcaggcaagcactcagaacgaagcaatcatgctgaagctgcacagtgtctagtccactcagcagcacttgttgctgaatatttgagcatgctggaggaccggaaatatcttcctgtgggatgtgtaacatttcagaatatttcatctaatgttttagaagaatctgcggtctcagatgatgtggtatctccagatgaagaaggtatctgctctggaaaatactttactgagtcaggacttgtgggattactggaacaagcagctgcttccttctctatggctggcatgtatgaagcagttaatgaagtttacaaagtacttattcctattcatgaagctaatcgggatgcaaagaaactatccacaattcatggtaaacttcaagaagcattcagcaaaattgttcatcagagtactggctgggagcggatgtttggcacctattttcgtgttggtttttatggaaccaagttcggggatttggatgaacaagaatttgtttacaaggagcctgcaataaccaaacttgcagagatatctcacagattggagggattttacggagaaagatttggagaggatgtggttgaagtaatcaaagactctaatcctgtagacaagtgtaaattagatcctaacaaggcatatattcagattacctatgtggagccatactttgacacatatgagatgaaggacagaatcacctatttcgacaaaaattacaatcttcgtcgattcatgtactgtacaccctttactttagatggccgtgcccatggggaacttcatgaacaattcaaaaggaagaccattctgactacgtctcatgcctttccttatattaaaacaagggtcaatgtcactcataaagaagagatcatcttaacaccaattgaagttgctattgaggacatgcagaaaaagacacaggagttggcatttgcaacacatcaggatcccgcagaccccaaaatgcttcagatggtactccagggatctgtaggcaccacagtgaatcaggggcctttggaagttgcccaggtttttctgtctgaaatacctagtgacccaaagctcttcagacatcataataaactgcgactctgctttaaagattttactaaaaggtgtgaagatgccttaagaaaaaataagagcttaattgggccggatcaaaaggagtatcaaagggaactggagagaaactatcatcgccttaaagaggccctacagccactgatcaacagaaagatccctcagttatacaaggcagtattgcctgtcacctgccacagagattccttcagtcgaatgagccttcgcaaaatggatctctaa

SEQ ID NO: 125858 - DNA, 519 bp, Homo sapiens
  Payload ID: 4656
  Gene Symbol: DOCK7
  Gene Name: dedicator of cytokinesis 7
  ENST ID: ENST00000464312
  CDS Start-End: 1-519
agagtgtgcagaaccatatatgattttcaaagaagcagatgccaccaagaataaagaaaaactggagaaactgaagagtcaagcagatcagttttgccaaagacttgggaaatatcgcatgccttttgcttggactgcaatccatttaatgaatattgttagcagtgctgggagtttggaaagagattctacagaagtagaaatcagtactggagaacgaaaagggtcttggtcagagaggaggaattctagtattgttggcagacgatcacttgaaaggacaacaagtggagatgatgcttgtaacttgacgagctttcgaccagctactctcacagtgacaaatttttttaagcaggtattgttctgtcatgtaggaattttggggagatgtttgtgcataaatttttttaatttcagaaaggtagtgattgtactatacatgtatgggagggtgattccaagaaacttaaaaactttaagaataaaaataataaaagcaactataagaatgagaaa

SEQ ID NO: 125859 - DNA, 6303 bp, Homo sapiens
  Payload ID: 4656
  Gene Symbol: DOCK7
  Gene Name: dedicator of cytokinesis 7
  ENST ID: ENST00000634264
  CDS Start-End: 1-6303
atggccgagcgccgcgccttcgcccagaagatcagcagaacggtggcagccgaagttaggaagcagatctccggacaatatagtggttctccccaactgctcaaaaaccttaatattgttggcaatatatcccatcacaccacagtgccccttaccgaagcagtagatccagtggatttggaagattacctcattactcatcctttggctgtggattctgggcctttacgggatttgattgaatttcctccagatgatattgaagttgtttatagtcctcgggactgcagaactcttgtttcagctgtacctgaagaaagtgaaatggatccacatgttagagactgtataagaagttatacagaagactgggcaattgtcatcagaaaatatcataaattgggaacaggatttaatcccaatacattagataaacagaaagaaaggcaaaaaggtttgccaaaacaagtttttgaatctgatgaagctccagatggcaacagctaccaggatgatcaagatgaccttaaaagacgttcaatgtcaatagatgataccccaaggggtagctgggcctgtagtatctttgacttgaaaaattcacttcctgatgctttgcttcccaatttacttgatcgaactccaaatgaagaaatagaccgtcagaatgatgaccaaaggaaatcaaaccgtcacaaagaactttttgctttgcatccatcaccagatgaggaagaaccaatagaacggcttagtgttcctgatatacccaaagaacattttggtcaaagacttcttgtaaaatgcttatcactcaagtttgaaattgaaattgaacccatttttgcaagtttggctttatatgatgtcaaggaaaagaaaaagatttcagaaaacttttattttgaccttaattctgagcagatgaaagggttgttacgtccacatgtaccacctgctgccattactaccctggcaagatcagcaattttttctatcacttatccttcccaagatgtttttcttgtaataaagctagaaaaagtcctacagcaaggagacattggagagtgtgcagaaccatatatgattttcaaagaagcagatgccaccaagaataaagaaaaactggagaaactgaagagtcaagcagatcagttttgccaaagacttgggaaatatcgcatgccttttgcttggactgcaatccatttaatgaatattgttagcagtgctgggagtttggaaagagattctacagaagtagaaatcagtactggagaacgaaaagggtcttggtcagagaggaggaattctagtattgttggcagacgatcacttgaaaggacaacaagtggagatgatgcttgtaacttgacgagctttcgaccagctactctcacagtgacaaatttttttaagcaggaaggagaccgcttaagtgatgaagatctctacaaattccttgctgatatgagaaggccatcttctgtcttacggcgactaagacctattacagctcagctcaagatagacatttctcccgcacctgaaaatccccattattgcctaactccggagctgcttcaagtgaagctttaccctgacagtagagttagacctaccagagaaatcttagagtttcccgcaagggatgtttatgttccaaacactacttacagaaatcttctctacatataccctcagagtcttaattttgccaatcgtcaaggttctgctagaaatataacagtgaaagtccagtttatgtatggagaggatccaagcaatgccatgccggtaatctttggtaaatctagctgttcagaattttcaaaggaagcctatacagccgtagtatatcataacaggtctcctgattttcatgaagaaatcaaggttaagcttcctgctactttaactgaccatcatcacttgctttttactttttatcatgttagttgtcaacaaaaacaaaatactcctcttgaaacaccagttggatatacatggataccaatgcttcagaatggacggttgaagactggccagttttgcttgccagtctcattggaaaaaccaccacaggcttattctgtactgtctcctgaggttcctctacctggcatgaaatgggtagataatcacaaaggtgtttttaatgttgaagttgttgctgtttcgtctatccatacacaagatccttatcttgacaaattttttgctctggtcaatgctctggatgaacacctgttcccagtccgaattggggacatgcgaatcatggaaaataacttagaaaatgaattgaagagcagtatttcagcactgaattcatcccagctggaaccagtggtccgatttcttcatcttctgctagataaactgatacttttagttattagacctcctgtcattgctggccaaatagttaacctaggtcaagcatcttttgaagccatggcatcaattataaatcgacttcacaaaaacttggaaggaaatcatgaccagcatggcagaaacagccttcttgcatcatatattcattatgttttccgcctaccaaatacttaccctaattcatcatcaccaggtcctgggggtttgggaggatcagtgcattatgccacaatggctagatctgcggtgagacctgcaagccttaatttaaatcgttctcgaagccttagtaatagcaatccagatatatctgggactcccacgtcaccagatgatgaagttcgatcaatcatcgggagtaaggctatggatcgaagttgtaatcgtatgtcttcgcacacagagacgtcaagtttcttacaaacattaacgggacgcttaccaactaaaaagctttttcacgaggagctggctttgcagtgggttgtttgcagtggcagcgttcgggaatcagctttgcaacaagcctggttcttttttgaattaatggtaaagagcatggtgcaccatttatactttaatgataaacttgaggctccaaggaaaagtcgttttccagaacgtttcatggatgacattgcagctcttgtcagcacgattgctagtgatatagtttcacgatttcagaaggacacagaaatggttgagagactcaatacaagccttgcattctttctcaatgatctgttgtctgttatggacagaggatttgtttttagccttataaagtcctgctataaacaggtgtcttcaaagctttactcattaccgaatcccagtgttctggtgtccttgaggctggattttctacgaatcatctgcagtcatgagcactatgttacattaaacttaccctgcagcttacttactccacctgcatctccatcaccttctgtttcttctgcaacatctcagagttctggattttctacgaatgtacaagaccaaaagattgcaaatatgtttgaattatccgtgcctttccgccaacagcattatttggcaggacttgtgttaacagagctggctgtcattttagaccctgatgctgaaggactgtttggattgcataagaaagtcatcaatatggtacacaatttactctccagtcacgactcagacccgcggtactctgaccctcagataaaggctcgagtggccatgttgtatctacctctgattggtattatcatggaaactgtacctcagctgtatgattttacagaaactcacaatcaacgaggaagaccaatttgtatagccactgatgattatgaaagtgagagcggaagtatgataagccagaccgttgccatggcaatcgcagggacatcggtccctcaactaacaaggcctggcagtttcctcctcacgtcaacgagtggcaggcaacacactaccttttcagcagaatcaagtcgaagccttttgatctgtctactttgggttctcaaaaatgcagatgaaacagttctacagaagtggtttacagatctctcagtcttgcagctaaaccggctattagatctgctttatctctgtgtgtcttgctttgagtataaagggaaaaaagtgtttgaacgaatgaatagcttgacctttaagaaatcaaaagacatgagagcaaagcttgaagaagctattcttgggagcataggtgccaggcaagaaatggtacggcgaagccgaggacagctcgagagaagcccatctggaagtgcctttggaagtcaagaaaatttgaggtggaggaaagatatgactcactggcgtcaaaacacagagaagcttgacaaatcaagagcagagattgaacacgaagcactgattgatggaaacctggctacagaagcaaacctaatcattttagatacattagagattgttgttcagaccgtttctgtaacggaatccaaagagagcattcttggtggagtgctaaaagtgctactacacagcatggcctgtaaccaaagtgcagtttatctacaacactgttttgctacacagagagccttggtttcaaagtttcctgaactcttatttgaagaagagacagagcagtgtgctgatttatgcctcaggcttctccgacactgtagcagtagcatcggtacaatacggtcacacgccagtgcctccctttacctactaatgaggcaaaactttgagattgggaataactttgccagggttaaaatgcaggtaacaatgtcactatcctccttggtgggcacatctcagaattttaatgaagaattcttaagacgttctctaaagactatattgacatatgctgaagaagatctggaattgagggaaacaacatttcctgatcaggtccaggatctggttttcaatctccatatgattctttctgatactgtgaaaatgaaggaacaccaggaggatcctgaaatgttgattgatctaatgtacagaattgccaagggttaccagacctctccagatctgcgattgacctggttgcagaacatggcaggcaagcactcagaacgaagcaatcatgctgaagctgcacagtgtctagtccactcagcagcacttgttgctgaatatttgagcatgctggaggaccggaaatatcttcctgtgggatgtgtaacatttcagaatatttcatctaatgttttagaagaatctgcggtctcagatgatgtggtatctccagatgaagaaggtatctgctctggaaaatactttactgagtcaggacttgtgggattactggaacaagcagctgcttccttctctatggctggcatgtatgaagcagttaatgaagtttacaaagtacttattcctattcatgaagctaatcgggatgcaaagaaactatccacaattcatggtaaacttcaagaagcattcagcaaaattgttcatcagagtactggctgggagcggatgtttggcacctattttcgtgttggtttttatggaaccaagttcggggatttggatgaacaagaatttgtttacaaggagcctgcaataaccaaacttgcagagatatctcacagattggagggattttacggagaaagatttggagaggatgtggttgaagtaatcaaagactctaatcctgtagacaagtgtaaattagatcctaacaaggcatatattcagattacctatgtggagccatactttgacacatatgagatgaaggacagaatcacctatttcgacaaaaattacaatcttcgtcgattcatgtactgtacaccctttactttagatggccgtgcccatggggaacttcatgaacaattcaaaaggaagaccattctgactacgtctcatgcctttccttatattaaaacaagggtcaatgtcactcataaagaagagatcatcttaacaccaattgaagttgctattgaggacatgcagaaaaagacacaggagttggcatttgcaacacatcaggatcccgcagaccccaaaatgcttcagatggtactccagggatctgtaggcaccacagtgaatcaggggcctttggaagttgcccaggtttttctgtctgaaatacctagtgacccaaagctcttcagacatcataataaactgcgactctgctttaaagattttactaaaaggtgtgaagatgccttaagaaaaaataagagcttaattgggccggatcaaaaggagtatcaaagggaactggagagaaactatcatcgccttaaagaggccctacagccactgatcaacagaaagatccctcagttatacaaggcagtattgcctgtcacctgccacagagattccttcagtcgaatgagccttcgcaaaatggatctctaa

SEQ ID NO: 125860 - DNA, 382 bp, Homo sapiens
  Payload ID: 4656
  Gene Symbol: DOCK7
  Gene Name: dedicator of cytokinesis 7
  ENST ID: ENST00000635088
  CDS Start-End: 1-306
tttactgagtcaggacttgtgggattactggaacaagcagctgcttccttctctatggctggcatgtatgaagcagttaatgaagtttacaaagtacttattcctattcatgaagctaatcgggatgcaaagaaactatccacaattcatggtaaacttcaagaagcattcagcaaaattgttcatcagtttttttatgacttgcccttttttactttttattatacagagtactggctgggagcggatgtttggcacctattttcgtgttggtttttatggaaccaagttcggggatttggatgaacaagaatttgtttacaaggagcctgcaataaccaaacttgcagagatatctcacagattggagggattttacgga

SEQ ID NO: 125861 - DNA, 745 bp, Homo sapiens
  Payload ID: 4656
  Gene Symbol: DOCK7
  Gene Name: dedicator of cytokinesis 7
  ENST ID: ENST00000634652
  CDS Start-End: 1-745
tcgtctatccatacacaagatccttatcttgacaaattttttgctctggtcaatgctctggatgaacacctgttcccagtccgaattggggacatgcgaatcatggaaaataacttagaaaatgaattgaagagcagtatttcagcactgaattcatcccagctggaaccagtggtccgatttcttcatcttctgctagataaactgatacttttagttattagacctcctgtcattgctggccaaatagttaacctaggtcaagcatcttttgaagccatggcatcaattataaatcgacttcacaaaaacttggaaggaaatcatgaccagcatggcagaaacagccttcttgcatcatatattcattatgttttccgcctaccaaatacttaccctaattcatcatcaccaggtcctgggggtttgggaggatcagtgcattatgccacaatggctagatctgcggtgagacctgcaagccttaatttaaatcgttctcgaagccttagtaatagcaatccagatatatctgggactcccacgtcaccagatgatgaagttcgatcaatcatcgggagtaagggtttagatcgctccaattcctgggttaacactggtggtccaaaagctgccccatggggatccaaccccagtccaagtgcagaatcaacacagctttttcacgaggagctggctttgcagtgggttgtttgcagtggcagcgttcgggaatcagctttgc

SEQ ID NO: 125862 - DNA, 6297 bp, Homo sapiens
  Payload ID: 4656
  Gene Symbol: DOCK7
  Gene Name: dedicator of cytokinesis 7
  ENST ID: ENST00000635123
  CDS Start-End: 1-6297
atggccgagcgccgcgccttcgcccagaagatcagcagaacggtggcagccgaagttaggaagcagatctccggacaatatagtggttctccccaactgctcaaaaaccttaatattgttggcaatatatcccatcacaccacagtgccccttaccgaagcagtagatccagtggatttggaagattacctcattactcatcctttggctgtggattctgggcctttacgggatttgattgaatttcctccagatgatattgaagttgtttatagtcctcgggactgcagaactcttgtttcagctgtacctgaagaaagtgaaatggatccacatgttagagactgtataagaagttatacagaagactgggcaattgtcatcagaaaatatcataaattgggaacaggatttaatcccaatacattagataaacagaaagaaaggcaaaaaggtttgccaaaacaagtttttgaatctgatgaagctccagatggcaacagctaccaggatgatcaagatgaccttaaaagacgttcaatgtcaatagatgataccccaaggggtagctgggcctgtagtatctttgacttgaaaaattcacttcctgatgctttgcttcccaatttacttgatcgaactccaaatgaagaaatagaccgtcagaatgatgaccaaaggaaatcaaaccgtcacaaagaactttttgctttgcatccatcaccagatgaggaagaaccaatagaacggcttagtgttcctgatatacccaaagaacattttggtcaaagacttcttgtaaaatgcttatcactcaagtttgaaattgaaattgaacccatttttgcaagtttggctttatatgatgtcaaggaaaagaaaaagatttcagaaaacttttattttgaccttaattctgagcagatgaaagggttgttacgtccacatgtaccacctgctgccattactaccctggcaagatcagcaattttttctatcacttatccttcccaagatgtttttcttgtaataaagctagaaaaagtcctacagcaaggagacattggagagtgtgcagaaccatatatgattttcaaagaagcagatgccaccaagaataaagaaaaactggagaaactgaagagtcaagcagatcagttttgccaaagacttgggaaatatcgcatgccttttgcttggactgcaatccatttaatgaatattgttagcagtgctgggagtttggaaagagattctacagaagtagaaatcagtactggagaacgaaaagggtcttggtcagagaggaggaattctagtattgttggcagacgatcacttgaaaggacaacaagtggagatgatgcttgtaacttgacgagctttcgaccagctactctcacagtgacaaatttttttaagcaggaaggagaccgcttaagtgatgaagatctctacaaattccttgctgatatgagaaggccatcttctgtcttacggcgactaagacctattacagctcagctcaagatagacatttctcccgcacctgaaaatccccattattgcctaactccggagctgcttcaagtgaagctttaccctgacagtagagttagacctaccagagaaatcttagagtttcccgcaagggatgtttatgttccaaacactacttacagaaatcttctctacatataccctcagagtcttaattttgccaatcgtcaaggttctgctagaaatataacagtgaaagtccagtttatgtatggagaggatccaagcaatgccatgccggtaatctttggtaaatctagctgttcagaattttcaaaggaagcctatacagccgtagtatatcataacaggtctcctgattttcatgaagaaatcaaggttaagcttcctgctactttaactgaccatcatcacttgctttttactttttatcatgttagttgtcaacaaaaacaaaatactcctcttgaaacaccagttggatatacatggataccaatgcttcagaatggacggttgaagactggccagttttgcttgccagtctcattggaaaaaccaccacaggcttattctgtactgtctcctgaggttcctctacctggcatgaaatgggtagataatcacaaaggtgtttttaatgttgaagttgttgctgtttcgtctatccatacacaagatccttatcttgacaaattttttgctctggtcaatgctctggatgaacacctgttcccagtccgaattggggacatgcgaatcatggaaaataacttagaaaatgaattgaagagcagtatttcagcactgaattcatcccagctggaaccagtggtccgatttcttcatcttctgctagataaactgatacttttagttattagacctcctgtcattgctggccaaatagttaacctaggtcaagcatcttttgaagccatggcatcaattataaatcgacttcacaaaaacttggaaggaaatcatgaccagcatggcagaaacagccttcttgcatcatatattcattatgttttccgcctaccaaatacttaccctaattcatcatcaccaggtcctgggggtttgggaggatcagtgcattatgccacaatggctagatctgcggtgagacctgcaagccttaatttaaatcgttctcgaagccttagtaatagcaatccagatatatctgggactcccacgtcaccagatgatgaagttcgatcaatcatcgggagtaaggctatggatcgaagttgtaatcgtatgtcttcgcacacagagacgtcaagtttcttacaaacattaacgggacgcttaccaactaaaaagctttttcacgaggagctggctttgcagtgggttgtttgcagtggcagcgttcgggaatcagctttgcaacaagcctggttcttttttgaattaatggtaaagagcatggtgcaccatttatactttaatgataaacttgaggctccaaggaaaagtcgttttccagaacgtttcatggatgacattgcagctcttgtcagcacgattgctagtgatatagtttcacgatttcagaaggacacagaaatggttgagagactcaatacaagccttgcattctttctcaatgatctgttgtctgttatggacagaggatttgtttttagccttataaagtcctgctataaacaggtgtcttcaaagctttactcattaccgaatcccagtgttctggtgtccttgaggctggattttctacgaatcatctgcagtcatgagcactatgttacattaaacttaccctgcagcttacttactccacctgcatctccatcaccttctgtttcttctgcaacatctcagagttctggattttctacgaatgtacaagaccaaaagattgcaaatatgtttgaattatccgtgcctttccgccaacagcattatttggcaggacttgtgttaacagagctggctgtcattttagaccctgatgctgaaggactgtttggattgcataagaaagtcatcaatatggtacacaatttactctccagtcacgactcagacccgcggtactctgaccctcagataaaggctcgagtggccatgttgtatctacctctgattggtattatcatggaaactgtacctcagctgtatgattttacagaaactcacaatcaacgaggaagaccaatttgtatagccactgatgattatgaaagtgagagcggaagtatgataagccagaccgttgccatggcaatcgcagggacatcggtccctcaactaacaaggcctggcagtttcctcctcacgtcaacgagtggcaggcaacacactaccttttcagcagaatcaagtcgaagccttttgatctgtctactttgggttctcaaaaatgcagatgaaacagttctacagaagtggtttacagatctctcagtcttgcagctaaaccggctattagatctgctttatctctgtgtgtcttgctttgagtataaagggaaaaaagtgtttgaacgaatgaatagcttgacctttaagaaatcaaaagacatgagagcaaagcttgaagaagctattcttgggagcataggtgccaggcaagaaatggtacggcgaagccgaggacagctcgagagaagcccatctggaagtgcctttggaagtcaagaaaatttgaggtggaggaaagatatgactcactggcgtcaaaacacagagaagcttgacaaatcaagagcagagattgaacacgaagcactgattgatggaaacctggctacagaagcaaacctaatcattttagatacattagagattgttgttcagaccgtttctgtaacggaatccaaagagagcattcttggtggagtgctaaaagtgctactacacagcatggcctgtaaccaaagtgcagtttatctacaacactgttttgctacacagagagccttggtttcaaagtttcctgaactcttatttgaagaagagacagagcagtgtgctgatttatgcctcaggcttctccgacactgtagcagtagcatcggtacaatacggtcacacgccagtgcctccctttacctactaatgaggcaaaactttgagattgggaataactttgccagggttaaaatgcaggtaacaatgtcactatcctccttggtgggcacatctcagaattttaatgaagaattcttaagacgttctctaaagactatattgacatatgctgaagaagatctggaattgagggaaacaacatttcctgatcaggtccaggatctggttttcaatctccatatgattctttctgatactgtgaaaatgaaggaacaccaggaggatcctgaaatgttgattgatctaatgtacagaattgccaagggttaccagacctctccagatctgcgattgacctggttgcagaacatggcaggcaagcactcagaacgaagcaatcatgctgaagctgcacagtgtctagtccactcagcagcacttgttgctgaatatttgagcatgctggaggaccggaaatatcttcctgtgggatgtgtaacatttcagaatatttcatctaatgttttagaagaatctgcggtctcagatgatgtggtatctccagatgaagaaggtatctgctctggaaaatactttactgagtcaggacttgtgggattactggaacaagcagctgcttccttctctatggctggcatgtatgaagcagttaatgaagtttacaaagtacttattcctattcatgaagctaatcgggatgcaaagaaactatccacaattcatggtaaacttcaagaagcattcagcaaaattgttcatcaggatggtaagcggatgtttggcacctattttcgtgttggtttttatggaaccaagttcggggatttggatgaacaagaatttgtttacaaggagcctgcaataaccaaacttgcagagatatctcacagattggagggattttacggagaaagatttggagaggatgtggttgaagtaatcaaagactctaatcctgtagacaagtgtaaattagatcctaacaaggcatatattcagattacctatgtggagccatactttgacacatatgagatgaaggacagaatcacctatttcgacaaaaattacaatcttcgtcgattcatgtactgtacaccctttactttagatggccgtgcccatggggaacttcatgaacaattcaaaaggaagaccattctgactacgtctcatgcctttccttatattaaaacaagggtcaatgtcactcataaagaagagatcatcttaacaccaattgaagttgctattgaggacatgcagaaaaagacacaggagttggcatttgcaacacatcaggatcccgcagaccccaaaatgcttcagatggtactccagggatctgtaggcaccacagtgaatcaggggcctttggaagttgcccaggtttttctgtctgaaatacctagtgacccaaagctcttcagacatcataataaactgcgactctgctttaaagattttactaaaaggtgtgaagatgccttaagaaaaaataagagcttaattgggccggatcaaaaggagtatcaaagggaactggagagaaactatcatcgccttaaagaggccctacagccactgatcaacagaaagatccctcagttatacaaggcagtattgcctgtcacctgccacagagattccttcagtcgaatgagccttcgcaaaatggatctctaa

SEQ ID NO: 125863 - DNA, 6124 bp, Homo sapiens
  Payload ID: 4657
  Gene Symbol: DOCK8
  Gene Name: dedicator of cytokinesis 8
  ENST ID: ENST00000382329
  CDS Start-End: 388-5088
agaaagtcacagggtacagcaactcatacttgctcccagcaccaggccagccccattctgcctccagggagtcacccaaaatagagagatgagggtaaaataagacctaggaatactatttatttgcctccatggcctttgaacttgcacatccaacgtaacggctcctgtgtgttcttgattgttccaattatcatttttcctctcgaatacctgagagcattcattattttgcaagagatttgagaatccctgtgccctaacttttctttccttgatgtgggatgttcttctgtgactagaaaccttctctatgtctacccacagaggctgaactttgtaaacaaactagcatcagcccggaacattacaataaagatccagtttatgtgtggagaagatgctagcaatgcgatgccggtaaggagggaaacgaacatttgcctcaaatcagggtgggctgctcacccctgtcacttcacacaagtccgggactcatcagtgtacaaagtccgtctattccaggccaatactgctcagcatgtgcaagggcttctgtgcccaggatatcagtggggaaacagggtcatctttggaaaatccagcgggcctgaatttctgcaggaagtgtacacagctgttacataccataataagtctcctgacttttatgaagaagtgaaaattaagctccccgctaagctcacagtaaatcaccacctcctgttcaccttctaccatatcagctgtcagcagaagcaaggagcctccgtggaaactctcctgggatattcatggctgccaattctcttaaatgaacgtcttcaaactggatcctactgtctcccagttgccttggaaaaattgccacccaactactccatgcattctgctgagaaagtcccattacagaatcctcccattaagtgggctgaaggacataagggagtatttaatattgaagtgcaagctgtttcttctgtacacacccaggacaaccacctggagaagttcttcaccctctgccactccctggagagccaggtgaccttccccatccgcgtgctggatcagaaaatcagcgagatggcgctggagcatgagctgaagctcagcatcatctgcctgaactcctcccgcctggagccgctcgtgctcttcctgcacctggtgctggacaagctcttccagctgtccgtgcagcccatggtcatcgctggccagacagccaacttctcccagtttgccttcgagtccgtggtggccatcgccaacagtctgcacaacagcaaggacctgagcaaggaccagcatgggaggaactgcctgctggcttcctacgtgcactacgtcttccgcctgccagaggtgcaaagggatgtgcccaagtcaggcgctcccactgccctcctagaccctcggagctaccacacgtatggccgcacatcagctgctgctgtgagttcaaagctgctgcaggcccgggtgatgagcagcagtaacccagacctcgcggggacacactccgcagcagacgaggaagtgaagaacatcatgtcttcaaagatcgccgatcgcaactgcagccgaatgtcttactattgctctggcagtagtgatgctccaagttcacctgcagccccaaggccagccagcaaaaagcatttccatgaggagcttgcccttcagatggtggtcagcaccggaatggtgagagaaacagtcttcaagtatgcctggttcttctttgagcttctggtgaaaagcatggcccagcacgtacataacatggacaaacgggacagttttcggaggactcgtttttctgaccgtttcatggatgacataactactattgttaatgtggtcacctcggaaattgcagcccttttagtaaaaccacagaaggaaaatgaacaggcggaaaagatgaacatcagcctggctttcttcttgtatgaccttctctccctcatggatcggggctttgtgtttaacctcatcagacattattgcagccagctgtcagccaagctcagtaaccttccaacgctcatttccatgaggctagagttcctgagaatcctctgtagccatgagcattacctcaatctgaaccttttttttatgaatgctgatactgctccaacatctccttgtccttccatatcttcccagaactcaagctcctgctccagcttccaggaccagaagatcgccagcatgttcgatctgacttccgagtaccgccagcagcacttcctcaccgggctcctcttcacagaactggctgctgccctggatgccgaaggggaaggaatcagcaaagtacaaaggaaagctgtcagtgcaattcacagcctgctaagttctcacgacctggacccacgctgtgtcaaaccagaggtgaaggtcaaaatcgccgccctttacctacctttagttggcatcattttggatgctttgccacagctctgtgactttacagttgcagatactcgcagataccgcaccagtggctcggatgaagaacaagaaggagccggtgccattaaccagaatgtggctctggccatagcagggaataatttcaatttgaaaacaagtggaatagtgctgtcttccttgccctataagcagtacaacatgctgaacgcggacactactcgcaacctcatgatctgcttcctctggatcatgaaaaatgctgatcagagcctcattaggaagtggattgctgacctgccatcaacgcagctcaacaggattttagatctacttttcatctgtgtgttatgttttgagtataagggaaaacagagttctgacaaagtcagtacccaagtcctgcagaagtcaagggatgtcaaggcccggctggaagaggctttgctccgtggggaaggggccagaggggagatgatgcgccgccgggctccagggaacgaccgatttccaggcctaaatgaaaatttgagatggaagaaagagcagacacattggcggcaagctaatgagaagctagataaaacaaaggccgagttagatcaagaagccttgatcagtggcaatctggctacagaagcacatttaatcatcctggatatgcaggaaaacattatccaggcgagctcggctctggactgtaaagacagcctgctgggaggtgttctgagggtgctggtgaattctctgaactgtgatcagagtaccacctacctgactcactgctttgcaacactccgtgctctcatcgccaagtttggagacttactctttgaagaggaggtggaacagtgtttcgacctatgtcaccaagtcctgcaccactgcagcagcagcatggatgtcacccggagccaagcctgtgccaccctttacctcctcatgaggttcagttttggagccaccagtaattttgcaagagtaaagatgcaagtaaccatgtccctggcatctttggtgggaagagcaccagactttaatgaagagcacctgagaagatccttgaggacaattttggcctattcagaagaggacacagccatgcagatgactccttttcccacccaggtggaggaacttctctgtaatctgaatagcatcttatatgacacagtgaaaatgagggaatttcaggaagatcctgagatgcttatggatctcatgtacagaattgccaagagttaccaggcatctcctgatctgcggctgacctggctccagaacatggcagagaaacacaccaagaagaagtgctacacggaggctgccatgtgcctggtgcacgccgctgcgttagtggctgagtatctgagcatgctggaggaccacagctacctgcccgtgggcagtgtcagcttccagaatatttcttccaatgtgctggaggagtctgtggtctctgaggacaccctgtcacctgacgaggatggggtgtgcgcaggccagtacttcaccgagagtggcctggtaggcctcctggagcaggccgcggagctcttcagcacgggaggcttatatgagacagttaatgaggtctacaagctggtcatccccatcctagaagcgcatcgagaattccggaagctgacactcactcacagcaagctgcagagagccttcgacagcatcgttaacaaggatcataagagaatgtttggaacctacttccgagttggtttctttggatccaaatttggggatttggatgaacaggagtttgtctacaaagagcctgcaattaccaagcttcctgagatctcacatagactagaggcattttatggtcaatgttttggtgcagaatttgtggaagtgattaaagactccactcctgtggacaaaaccaagttggatcctaacaaggcctacatacagatcacttttgtggagccctactttgatgagtatgagatgaaagacagggtcacatactttgagaagaatttcaacctccggaggttcatgtacaccaccccgttcaccctggaggggcggcctcggggagagctgcatgagcagtacagaaggaacacagtcctgaccactatgcacgccttcccctacatcaagaccaggatcagcgtcatccagaaggaggagtttgttttgacaccgattgaagttgccattgaagacatgaagaagaagaccctgcagttagcagttgccattaaccaggagccgcctgatgcaaagatgcttcagatggtgctgcaaggctctgtgggagctactgtaaatcagggaccactggaagtagcccaagtgtttttggctgaaattcctgctgatccaaaactctatcgacatcacaacaagttgaggttatgctttaaggaattcatcatgagatgtggtgaagctgtagagaaaaacaagcgtctcatcacggcagaccagagggaatatcagcaggaactcaaaaagaactataacaagctaaaagagaacctcaggccaatgatcgagcggaaaattccagaactgtacaagccaatattcagagttgagagtcaaaagagggactccttccacagatctagtttcaggaaatgtgaaacccagttgtcacagggcagctaagaaaagccatcttcattcgtggagactgtggccctgcaaccctggagaaggacttgctggtacttaaaaaatgggacatttgccacccaggactgactgtacactccctgatcagccagcactctggaagctttgggatcccaggaaccatggaattattcccaaatggactctgaccagatttttgccatactggggggtggcgggatggaggatgggtactcaggcatgactgcgtatttattaaagtgtgtttttccacaatgtaccaaacaaggcataagcagcttctcctgctgactggccaatcactgcccatctgagagatgatttcctctggcccatatttgaatttattggagtaactcaaattgcctgaggaaaaatggaaaaattatccaccagtcgattcaaactgaatttcactctttataggaaggcagggcaaacttgtaggagtacgaaacattttcaataaatctacaaagggaagccttactacaattccaaaaatcatcatggttggaaatttgggaggagattatttgtgaacttgttacccttttggtaatggtggactaattgctgtatagttatttttgttttattattactgttacattaatttaacatgcatttatagaagaatacattcaaagcactgatgtaggagatacacggtacttggagcagtcagccagaaatcacagatactgctttcacttaaatggaaacaattctccgataatgctttgctttttttcttatgtcactcttgtgtactatctatttttctcctctctgggaccaagtttctttttataaagcaataatatctctgttttcatttcagaacattgtgctgtctgtcagcatatgtatatcagctacaaaatatattcaactttgacttcttttgacaaaggactttaggaaaaagaggaacaaagacattatttgagaattaaattatatatttttaatatgactgtgaccttgactgataataaagatgtaataagaattgcaagctaaa

SEQ ID NO: 125864 - DNA, 1922 bp, Homo sapiens
  Payload ID: 4657
  Gene Symbol: DOCK8
  Gene Name: dedicator of cytokinesis 8
  ENST ID: ENST00000382331
  CDS Start-End: 601-1920
gagtattgtcacatatcagcccagaaagtcacagggtacagcaactcatacttgctcccagcaccaggccagccccattctgcctccagggagtcacccaaaatagagagatgagggtaaaataagacctaggaatactatttatttgcctccatggcctttgaacttgcacatccaacgtaacggctcctgtgtgttcttgattgttccaattatcatttttcctctcgaatacctgagagcattcattattttgcaagagatttgagaatccctgtgccctaacttttctttccttgatgtgggatgttcttctgtgactagaaaccttctctatgtctacccacagaggctgaactttgtaaacaaactagcatcagcccggaacattacaataaagatccagtttatgtgtggagaagatgctagcaatgcgatgccggtcatctttggaaaatccagcgggcctgaatttctgcaggaagtgtacacagctgttacataccataataatggctgccaattctcttaaatgaacgtcttcaaactggatcctactgtctcccagttgccttggaaaaattgccacccaactactccatgcattctgctgagaaagtcccattacagaatcctcccattaagtgggctgaaggacataagggagtatttaatattgaagtgcaagctgtttcttctgtacacacccaggacaaccacctggagaagttcttcaccctctgccactccctggagagccaggtgaccttccccatccgcgtgctggatcagaaaatcagcgagatggcgctggagcatgagctgaagctcagcatcatctgcctgaactcctcccgcctggagccgctcgtgctcttcctgcacctggtgctggacaagctcttccagctgtccgtgcagcccatggtcatcgctggccagacagccaacttctcccagtttgccttcgagtccgtggtggccatcgccaacagtctgcacaacagcaaggacctgagcaaggaccagcatgggaggaactgcctgctggcttcctacgtgcactacgtcttccgcctgccagaggtgcaaagggatgtgcccaagtcaggcgctcccactgccctcctagaccctcggagctaccacacgtatggccgcacatcagctgctgctgtgagttcaaagctgctgcaggcccgggtgatgagcagcagtaacccagacctcgcggggacacactccgcagcagacgaggaagtgaagaacatcatgtcttcaaagatcgccgatcgcaactgcagccgaatgtcttactattgctctggcagtagtgatgctccaagttcacctgcagccccaaggccagccagcaaaaagcatttccatgaggagcttgcccttcagatggtggtcagcaccggaatggtgagagaaacagtcttcaagtatgcctggttcttctttgagcttctggtgaaaagcatggcccagcacgtacataacatggacaaacgggacagttttcggaggactcgtttttctgaccgtttcatggatgacataactactattgttaatgtggtcacctcggaaattgcagcccttttagtaaaaccacagaaggaaaatgaacaggcggaaaagatgaacatcagcctggctttcttcttgtatgaccttctctccctcatggatcggggctttgtgtttaacctcatcagacattattgcagccagctgtcagccaagctcagtaaccttccaacgctcatttccatgaggctagagttcctgagaatcctctgtagccatgagcattacctcaatctgaaccttttttttatgaatgctgatactgctccaacatctccttgtccttccatatcttcccaggtaataaaagaattatttaactaaaa

SEQ ID NO: 125865 - DNA, 7452 bp, Homo sapiens
  Payload ID: 4657
  Gene Symbol: DOCK8
  Gene Name: dedicator of cytokinesis 8
  Uniprot ID: Q8NF50
  ENST ID: ENST00000432829
  CDS Start-End: 113-6412
gacagacgaggtttgcgcttggctgggcatgttccgcggctactctgcggcgcgccaggcccccgctttccgcaccccgcgaccctagaagccaccgaaccgccggcgggccatggccactctgccgagcgcagagcgccgcgcgttcgcgctcaagatcaacaggtattcttcagcggaaataaggaaacagtttactctcccaccaaaccttggccagtaccatcgacagagcataagtacctctggcttcccctctcttcaactacctcagttttatgaccctgtggagccagtggactttgaaggacttctgatgacacacctgaacagcctggatgtgcagcttgcccaggagctcggggacttcactgatgacgacttggacgtggtgttcacgccaaaggaatgtaggactttgcagccctctttgccggaggaaggggttgaactggaccctcatgtcagggactgtgttcagacctacatccgtgagtggctaatcgtgaaccggaaaaaccaaggaagtccagaaatctgtggctttaaaaagactggatctcgaaaagattttcacaagacgcttccgaaacagacgtttgagtcggaaaccttggagtgcagtgaacccgctgctcaggcaggcccccgccacttaaacgtgctgtgcgacgtgtctgggaaaggccccgtcactgcctgtgactttgacctccgcagcctgcagcctgacaagcggctagaaaacctcctgcagcaagtgagtgccgaggactttgagaagcagaacgaggaggcccggaggaccaataggcaggccgagctctttgccctttacccatcagtggacgaggaggatgctgtggaaatacgtccagtaccagaatgtcccaaggaacacctgggcaacagaatattggtcaagttgctgaccttgaagttcgagattgaaattgagcccctgtttgccagcattgccctctacgatgttaaagaaaggaaaaagatctcagaaaattttcactgtgacctgaactctgaccagttcaaaggatttctgcgagctcacacgccttcagtggccgcatcaagtcaggcgagatctgcagtcttctcagtcacctacccgtcctcagacatctacctggtagtcaagattgaaaaagtcctgcagcagggagagattggagactgtgcagagccctacacggttatcaaagaaagtgatggtggaaagagtaaagaaaagattgaaaaactaaaactccaagctgaatccttctgccagcgtttggggaaataccggatgccctttgcctgggcacccataagcttatcaagcttcttcaatgtctccacccttgagagggaggtaactgatgtggactctgtggttgggagaagctcagtgggtgaacggaggacattggcccaatctagaaggctttctgaaagagccctctccttggaggaaaatggggttggatccaacttcaaaacctccactctgagcgttagcagctttttcaagcaggaaggagatcgccttagcgatgaagacttattcaagtttttagctgactacaaaagatcatcatccttacagagacgagtcaagtcaattccaggcttgctaagactggagatttctacagctccagagatcatcaattgctgtctgactcctgaaatgctgcccgtgaaaccctttcctgaaaaccggacacgcccgcacaaagagattttggaatttccaacacgagaagtatatgtccctcacactgtgtacagaaaccttctctatgtctacccacagaggctgaactttgtaaacaaactagcatcagcccggaacattacaataaagatccagtttatgtgtggagaagatgctagcaatgcgatgccggtcatctttggaaaatccagcgggcctgaatttctgcaggaagtgtacacagctgttacataccataataagtctcctgacttttatgaagaagtgaaaattaagctccccgctaagctcacagtaaatcaccacctcctgttcaccttctaccatatcagctgtcagcagaagcaaggagcctccgtggaaactctcctgggatattcatggctgccaattctcttaaatgaacgtcttcaaactggatcctactgtctcccagttgccttggaaaaattgccacccaactactccatgcattctgctgagaaagtcccattacagaatcctcccattaagtgggctgaaggacataagggagtatttaatattgaagtgcaagctgtttcttctgtacacacccaggacaaccacctggagaagttcttcaccctctgccactccctggagagccaggtgaccttccccatccgcgtgctggatcagaaaatcagcgagatggcgctggagcatgagctgaagctcagcatcatctgcctgaactcctcccgcctggagccgctcgtgctcttcctgcacctggtgctggacaagctcttccagctgtccgtgcagcccatggtcatcgctggccagacagccaacttctcccagtttgccttcgagtccgtggtggccatcgccaacagtctgcacaacagcaaggacctgagcaaggaccagcatgggaggaactgcctgctggcttcctacgtgcactacgtcttccgcctgccagaggtgcaaagggatgtgcccaagtcaggcgctcccactgccctcctagaccctcggagctaccacacgtatggccgcacatcagctgctgctgtgagttcaaagctgctgcaggcccgggtgatgagcagcagtaacccagacctcgcggggacacactccgcagcagacgaggaagtgaagaacatcatgtcttcaaagatcgccgatcgcaactgcagccgaatgtcttactattgctctggcagtagtgatgctccaagttcacctgcagccccaaggccagccagcaaaaagcatttccatgaggagcttgcccttcagatggtggtcagcaccggaatggtgagagaaacagtcttcaagtatgcctggttcttctttgagcttctggtgaaaagcatggcccagcacgtacataacatggacaaacgggacagttttcggaggactcgtttttctgaccgtttcatggatgacataactactattgttaatgtggtcacctcggaaattgcagcccttttagtaaaaccacagaaggaaaatgaacaggcggaaaagatgaacatcagcctggctttcttcttgtatgaccttctctccctcatggatcggggctttgtgtttaacctcatcagacattattgcagccagctgtcagccaagctcagtaaccttccaacgctcatttccatgaggctagagttcctgagaatcctctgtagccatgagcattacctcaatctgaaccttttttttatgaatgctgatactgctccaacatctccttgtccttccatatcttcccagaactcaagctcctgctccagcttccaggaccagaagatcgccagcatgttcgatctgacttccgagtaccgccagcagcacttcctcaccgggctcctcttcacagaactggctgctgccctggatgccgaaggggaaggaatcagcaaagtacaaaggaaagctgtcagtgcaattcacagcctgctaagttctcacgacctggacccacgctgtgtcaaaccagaggtgaaggtcaaaatcgccgccctttacctacctttagttggcatcattttggatgctttgccacagctctgtgactttacagttgcagatactcgcagataccgcaccagtggctcggatgaagaacaagaaggagccggtgccattaaccagaatgtggctctggccatagcagggaataatttcaatttgaaaacaagtggaatagtgctgtcttccttgccctataagcagtacaacatgctgaacgcggacactactcgcaacctcatgatctgcttcctctggatcatgaaaaatgctgatcagagcctcattaggaagtggattgctgacctgccatcaacgcagctcaacaggattttagatctacttttcatctgtgtgttatgttttgagtataagggaaaacagagttctgacaaagtcagtacccaagtcctgcagaagtcaagggatgtcaaggcccggctggaagaggctttgctccgtggggaaggggccagaggggagatgatgcgccgccgggctccagggaacgaccgatttccaggcctaaatgaaaatttgagatggaagaaagagcagacacattggcggcaagctaatgagaagctagataaaacaaaggccgagttagatcaagaagccttgatcagtggcaatctggctacagaagcacatttaatcatcctggatatgcaggaaaacattatccaggcgagctcggctctggactgtaaagacagcctgctgggaggtgttctgagggtgctggtgaattctctgaactgtgatcagagtaccacctacctgactcactgctttgcaacactccgtgctctcatcgccaagtttggagacttactctttgaagaggaggtggaacagtgtttcgacctatgtcaccaagtcctgcaccactgcagcagcagcatggatgtcacccggagccaagcctgtgccaccctttacctcctcatgaggttcagttttggagccaccagtaattttgcaagagtaaagatgcaagtaaccatgtccctggcatctttggtgggaagagcaccagactttaatgaagagcacctgagaagatccttgaggacaattttggcctattcagaagaggacacagccatgcagatgactccttttcccacccaggtggaggaacttctctgtaatctgaatagcatcttatatgacacagtgaaaatgagggaatttcaggaagatcctgagatgcttatggatctcatgtacagaattgccaagagttaccaggcatctcctgatctgcggctgacctggctccagaacatggcagagaaacacaccaagaagaagtgctacacggaggctgccatgtgcctggtgcacgccgctgcgttagtggctgagtatctgagcatgctggaggaccacagctacctgcccgtgggcagtgtcagcttccagaatatttcttccaatgtgctggaggagtctgtggtctctgaggacaccctgtcacctgacgaggatggggtgtgcgcaggccagtacttcaccgagagtggcctggtaggcctcctggagcaggccgcggagctcttcagcacgggaggcttatatgagacagttaatgaggtctacaagctggtcatccccatcctagaagcgcatcgagaattccggaagctgacactcactcacagcaagctgcagagagccttcgacagcatcgttaacaaggatcataagagaatgtttggaacctacttccgagttggtttctttggatccaaatttggggatttggatgaacaggagtttgtctacaaagagcctgcaattaccaagcttcctgagatctcacatagactagaggcattttatggtcaatgttttggtgcagaatttgtggaagtgattaaagactccactcctgtggacaaaaccaagttggatcctaacaaggcctacatacagatcacttttgtggagccctactttgatgagtatgagatgaaagacagggtcacatactttgagaagaatttcaacctccggaggttcatgtacaccaccccgttcaccctggaggggcggcctcggggagagctgcatgagcagtacagaaggaacacagtcctgaccactatgcacgccttcccctacatcaagaccaggatcagcgtcatccagaaggaggagtttgttttgacaccgattgaagttgccattgaagacatgaagaagaagaccctgcagttagcagttgccattaaccaggagccgcctgatgcaaagatgcttcagatggtgctgcaaggctctgtgggagctactgtaaatcagggaccactggaagtagcccaagtgtttttggctgaaattcctgctgatccaaaactctatcgacatcacaacaagttgaggttatgctttaaggaattcatcatgagatgtggtgaagctgtagagaaaaacaagcgtctcatcacggcagaccagagggaatatcagcaggaactcaaaaagaactataacaagctaaaagagaacctcaggccaatgatcgagcggaaaattccagaactgtacaagccaatattcagagttgagagtcaaaagagggactccttccacagatctagtttcaggaaatgtgaaacccagttgtcacagggcagctaagaaaagccatcttcattcgtggagactgtggccctgcaaccctggagaaggacttgctggtacttaaaaaatgggacatttgccacccaggactgactgtacactccctgatcagccagcactctggaagctttgggatcccaggaaccatggaattattcccaaatggactctgaccagatttttgccatactggggggtggcgggatggaggatgggtactcaggcatgactgcgtatttattaaagtgtgtttttccacaatgtaccaaacaaggcataagcagcttctcctgctgactggccaatcactgcccatctgagagatgatttcctctggcccatatttgaatttattggagtaactcaaattgcctgaggaaaaatggaaaaattatccaccagtcgattcaaactgaatttcactctttataggaaggcagggcaaacttgtaggagtacgaaacattttcaataaatctacaaagggaagccttactacaattccaaaaatcatcatggttggaaatttgggaggagattatttgtgaacttgttacccttttggtaatggtggactaattgctgtatagttatttttgttttattattactgttacattaatttaacatgcatttatagaagaatacattcaaagcactgatgtaggagatacacggtacttggagcagtcagccagaaatcacagatactgctttcacttaaatggaaacaattctccgataatgctttgctttttttcttatgtcactcttgtgtactatctatttttctcctctctgggaccaagtttctttttataaagcaataatatctctgttttcatttcagaacattgtgctgtctgtcagcatatgtatatcagctacaaaatatattcaactttgacttcttttgacaaaggactttaggaaaaagaggaacaaagacattatttgagaattaaattatatatttttaatatgactgtgaccttgactgataataaagatgtaataagaattgcaagctaaatgtt

SEQ ID NO: 125866 - DNA, 7237 bp, Homo sapiens
  Payload ID: 4657
  Gene Symbol: DOCK8
  Gene Name: dedicator of cytokinesis 8
  Uniprot ID: Q8NF50
  ENST ID: ENST00000453981
  CDS Start-End: 102-6197
cattttgtctcctgtaacaatttacgcgccgtgtaactgtgaatctttcaaagcctcagttttatgaccctgtggagccagtggactttgaaggacttctgatgacacacctgaacagcctggatgtgcagcttgcccaggagctcggggacttcactgatgacgacttggacgtggtgttcacgccaaaggaatgtaggactttgcagccctctttgccggaggaaggggttgaactggaccctcatgtcagggactgtgttcagacctacatccgtgagtggctaatcgtgaaccggaaaaaccaaggaagtccagaaatctgtggctttaaaaagactggatctcgaaaagattttcacaagacgcttccgaaacagacgtttgagtcggaaaccttggagtgcagtgaacccgctgctcaggcaggcccccgccacttaaacgtgctgtgcgacgtgtctgggaaaggccccgtcactgcctgtgactttgacctccgcagcctgcagcctgacaagcggctagaaaacctcctgcagcaagtgagtgccgaggactttgagaagcagaacgaggaggcccggaggaccaataggcaggccgagctctttgccctttacccatcagtggacgaggaggatgctgtggaaatacgtccagtaccagaatgtcccaaggaacacctgggcaacagaatattggtcaagttgctgaccttgaagttcgagattgaaattgagcccctgtttgccagcattgccctctacgatgttaaagaaaggaaaaagatctcagaaaattttcactgtgacctgaactctgaccagttcaaaggatttctgcgagctcacacgccttcagtggccgcatcaagtcaggcgagatctgcagtcttctcagtcacctacccgtcctcagacatctacctggtagtcaagattgaaaaagtcctgcagcagggagagattggagactgtgcagagccctacacggttatcaaagaaagtgatggtggaaagagtaaagaaaagattgaaaaactaaaactccaagctgaatccttctgccagcgtttggggaaataccggatgccctttgcctgggcacccataagcttatcaagcttcttcaatgtctccacccttgagagggaggtaactgatgtggactctgtggttgggagaagctcagtgggtgaacggaggacattggcccaatctagaaggctttctgaaagagccctctccttggaggaaaatggggttggatccaacttcaaaacctccactctgagcgttagcagctttttcaagcaggaaggagatcgccttagcgatgaagacttattcaagtttttagctgactacaaaagatcatcatccttacagagacgagtcaagtcaattccaggcttgctaagactggagatttctacagctccagagatcatcaattgctgtctgactcctgaaatgctgcccgtgaaaccctttcctgaaaaccggacacgcccgcacaaagagattttggaatttccaacacgagaagtatatgtccctcacactgtgtacagaaaccttctctatgtctacccacagaggctgaactttgtaaacaaactagcatcagcccggaacattacaataaagatccagtttatgtgtggagaagatgctagcaatgcgatgccggtcatctttggaaaatccagcgggcctgaatttctgcaggaagtgtacacagctgttacataccataataagtctcctgacttttatgaagaagtgaaaattaagctccccgctaagctcacagtaaatcaccacctcctgttcaccttctaccatatcagctgtcagcagaagcaaggagcctccgtggaaactctcctgggatattcatggctgccaattctcttaaatgaacgtcttcaaactggatcctactgtctcccagttgccttggaaaaattgccacccaactactccatgcattctgctgagaaagtcccattacagaatcctcccattaagtgggctgaaggacataagggagtatttaatattgaagtgcaagctgtttcttctgtacacacccaggacaaccacctggagaagttcttcaccctctgccactccctggagagccaggtgaccttccccatccgcgtgctggatcagaaaatcagcgagatggcgctggagcatgagctgaagctcagcatcatctgcctgaactcctcccgcctggagccgctcgtgctcttcctgcacctggtgctggacaagctcttccagctgtccgtgcagcccatggtcatcgctggccagacagccaacttctcccagtttgccttcgagtccgtggtggccatcgccaacagtctgcacaacagcaaggacctgagcaaggaccagcatgggaggaactgcctgctggcttcctacgtgcactacgtcttccgcctgccagaggtgcaaagggatgtgcccaagtcaggcgctcccactgccctcctagaccctcggagctaccacacgtatggccgcacatcagctgctgctgtgagttcaaagctgctgcaggcccgggtgatgagcagcagtaacccagacctcgcggggacacactccgcagcagacgaggaagtgaagaacatcatgtcttcaaagatcgccgatcgcaactgcagccgaatgtcttactattgctctggcagtagtgatgctccaagttcacctgcagccccaaggccagccagcaaaaagcatttccatgaggagcttgcccttcagatggtggtcagcaccggaatggtgagagaaacagtcttcaagtatgcctggttcttctttgagcttctggtgaaaagcatggcccagcacgtacataacatggacaaacgggacagttttcggaggactcgtttttctgaccgtttcatggatgacataactactattgttaatgtggtcacctcggaaattgcagcccttttagtaaaaccacagaaggaaaatgaacaggcggaaaagatgaacatcagcctggctttcttcttgtatgaccttctctccctcatggatcggggctttgtgtttaacctcatcagacattattgcagccagctgtcagccaagctcagtaaccttccaacgctcatttccatgaggctagagttcctgagaatcctctgtagccatgagcattacctcaatctgaaccttttttttatgaatgctgatactgctccaacatctccttgtccttccatatcttcccagaactcaagctcctgctccagcttccaggaccagaagatcgccagcatgttcgatctgacttccgagtaccgccagcagcacttcctcaccgggctcctcttcacagaactggctgctgccctggatgccgaaggggaaggaatcagcaaagtacaaaggaaagctgtcagtgcaattcacagcctgctaagttctcacgacctggacccacgctgtgtcaaaccagaggtgaaggtcaaaatcgccgccctttacctacctttagttggcatcattttggatgctttgccacagctctgtgactttacagttgcagatactcgcagataccgcaccagtggctcggatgaagaacaagaaggagccggtgccattaaccagaatgtggctctggccatagcagggaataatttcaatttgaaaacaagtggaatagtgctgtcttccttgccctataagcagtacaacatgctgaacgcggacactactcgcaacctcatgatctgcttcctctggatcatgaaaaatgctgatcagagcctcattaggaagtggattgctgacctgccatcaacgcagctcaacaggattttagatctacttttcatctgtgtgttatgttttgagtataagggaaaacagagttctgacaaagtcagtacccaagtcctgcagaagtcaagggatgtcaaggcccggctggaagaggctttgctccgtggggaaggggccagaggggagatgatgcgccgccgggctccagggaacgaccgatttccaggcctaaatgaaaatttgagatggaagaaagagcagacacattggcggcaagctaatgagaagctagataaaacaaaggccgagttagatcaagaagccttgatcagtggcaatctggctacagaagcacatttaatcatcctggatatgcaggaaaacattatccaggcgagctcggctctggactgtaaagacagcctgctgggaggtgttctgagggtgctggtgaattctctgaactgtgatcagagtaccacctacctgactcactgctttgcaacactccgtgctctcatcgccaagtttggagacttactctttgaagaggaggtggaacagtgtttcgacctatgtcaccaagtcctgcaccactgcagcagcagcatggatgtcacccggagccaagcctgtgccaccctttacctcctcatgaggttcagttttggagccaccagtaattttgcaagagtaaagatgcaagtaaccatgtccctggcatctttggtgggaagagcaccagactttaatgaagagcacctgagaagatccttgaggacaattttggcctattcagaagaggacacagccatgcagatgactccttttcccacccaggtggaggaacttctctgtaatctgaatagcatcttatatgacacagtgaaaatgagggaatttcaggaagatcctgagatgcttatggatctcatgtacagaattgccaagagttaccaggcatctcctgatctgcggctgacctggctccagaacatggcagagaaacacaccaagaagaagtgctacacggaggctgccatgtgcctggtgcacgccgctgcgttagtggctgagtatctgagcatgctggaggaccacagctacctgcccgtgggcagtgtcagcttccagaatatttcttccaatgtgctggaggagtctgtggtctctgaggacaccctgtcacctgacgaggatggggtgtgcgcaggccagtacttcaccgagagtggcctggtaggcctcctggagcaggccgcggagctcttcagcacgggaggcttatatgagacagttaatgaggtctacaagctggtcatccccatcctagaagcgcatcgagaattccggaagctgacactcactcacagcaagctgcagagagccttcgacagcatcgttaacaaggatcataagagaatgtttggaacctacttccgagttggtttctttggatccaaatttggggatttggatgaacaggagtttgtctacaaagagcctgcaattaccaagcttcctgagatctcacatagactagaggcattttatggtcaatgttttggtgcagaatttgtggaagtgattaaagactccactcctgtggacaaaaccaagttggatcctaacaaggcctacatacagatcacttttgtggagccctactttgatgagtatgagatgaaagacagggtcacatactttgagaagaatttcaacctccggaggttcatgtacaccaccccgttcaccctggaggggcggcctcggggagagctgcatgagcagtacagaaggaacacagtcctgaccactatgcacgccttcccctacatcaagaccaggatcagcgtcatccagaaggaggagtttgttttgacaccgattgaagttgccattgaagacatgaagaagaagaccctgcagttagcagttgccattaaccaggagccgcctgatgcaaagatgcttcagatggtgctgcaaggctctgtgggagctactgtaaatcagggaccactggaagtagcccaagtgtttttggctgaaattcctgctgatccaaaactctatcgacatcacaacaagttgaggttatgctttaaggaattcatcatgagatgtggtgaagctgtagagaaaaacaagcgtctcatcacggcagaccagagggaatatcagcaggaactcaaaaagaactataacaagctaaaagagaacctcaggccaatgatcgagcggaaaattccagaactgtacaagccaatattcagagttgagagtcaaaagagggactccttccacagatctagtttcaggaaatgtgaaacccagttgtcacagggcagctaagaaaagccatcttcattcgtggagactgtggccctgcaaccctggagaaggacttgctggtacttaaaaaatgggacatttgccacccaggactgactgtacactccctgatcagccagcactctggaagctttgggatcccaggaaccatggaattattcccaaatggactctgaccagatttttgccatactggggggtggcgggatggaggatgggtactcaggcatgactgcgtatttattaaagtgtgtttttccacaatgtaccaaacaaggcataagcagcttctcctgctgactggccaatcactgcccatctgagagatgatttcctctggcccatatttgaatttattggagtaactcaaattgcctgaggaaaaatggaaaaattatccaccagtcgattcaaactgaatttcactctttataggaaggcagggcaaacttgtaggagtacgaaacattttcaataaatctacaaagggaagccttactacaattccaaaaatcatcatggttggaaatttgggaggagattatttgtgaacttgttacccttttggtaatggtggactaattgctgtatagttatttttgttttattattactgttacattaatttaacatgcatttatagaagaatacattcaaagcactgatgtaggagatacacggtacttggagcagtcagccagaaatcacagatactgctttcacttaaatggaaacaattctccgataatgctttgctttttttcttatgtcactcttgtgtactatctatttttctcctctctgggaccaagtttctttttataaagcaataatatctctgttttcatttcagaacattgtgctgtctgtcagcatatgtatatcagctacaaaatatattcaactttgacttcttttgacaaaggactttaggaaaaagaggaacaaagacattatttgagaattaaattatatatttttaatatgactgtgaccttgactgataataaagatgtaataagaattgcaagctaaatgtt

SEQ ID NO: 125867 - DNA, 595 bp, Homo sapiens
  Payload ID: 4657
  Gene Symbol: DOCK8
  Gene Name: dedicator of cytokinesis 8
  ENST ID: ENST00000479404
  CDS Start-End: 398-595
cccgaggctgcggcggtggagccgctggacgcgcggcggctcctgcgctgggcccggcgaggtcctccccaagaatctcggtgctcctggatgtcctcagccgccggggatcccttccccgaacaacctcgcccgctccgccctccaggttcttacaggtggccgggtcccagaagggtgataggcgcctgggtaaccgtgttgggcgcgccacggagtgtctcataaacggctccttcctttgaggtattcttcagcggaaataaggaaacagtttactctcccaccaaaccttggccagtaccatcgacagagcataagtacctctggcttcccctctcttcaactacctcagttttatgaccctgtggagccagtggactttgaaggacttctgatgacacacctgaacagcctggatgtgcagcttgcccaggagctcggggacttcactgatgacgacttggacgtggtgttcacgccaaaggaatgtaggactttgcagccctctttgccggaggaaggggttgaactggaccctcatgtcagggactgtgttcagacctacatccgtgagtggctaatcgtgaaccgg

SEQ ID NO: 125868 - DNA, 4788 bp, Homo sapiens
  Payload ID: 4657
  Gene Symbol: DOCK8
  Gene Name: dedicator of cytokinesis 8
  ENST ID: ENST00000483757
  CDS Start-End: 91-1599
ctgtaacaatttacgcgccgtgtaactgtgaatctttcaaagcctcagttttatgaccctgtggagccagtggactttgaaggacttctgatgacacacctgaacagcctggatgtgcagcttgcccaggagctcggggacttcactgatgacgacttggacgtggtgttcacgccaaaggaatgtaggactttgcagccctctttgccggaggaaggggttgaactggaccctcatgtcagggactgtgttcagacctacatccgtgagtggctaatcgtgaaccggaaaaaccaaggaagtccagaaatctgtggctttaaaaagactggatctcgaaaagattttcacaagacgcttccgaaacagacgtttgagtcggaaaccttggagtgcagtgaacccgctgctcaggcaggcccccgccacttaaacgtgctgtgcgacgtgtctgggaaaggccccgtcactgcctgtgactttgacctccgcagcctgcagcctgacaagcggctagaaaacctcctgcagcaagtgagtgccgaggactttgagaagcagaacgaggaggcccggaggaccaataggcaggccgagctctttgccctttacccatcagtggacgaggaggatgctgtggaaatacgtccagtaccagaatgtcccaaggaacacctgggcaacagaatattggtcaagttgctgaccttgaagttcgagattgaaattgagcccctgtttgccagcattgccctctacgatgttaaagaaaggaaaaagatctcagaaaattttcactgtgacctgaactctgaccagttcaaaggatttctgcgagctcacacgccttcagtggccgcatcaagtcaggcgagatctgcagtcttctcagtcacctacccgtcctcagacatctacctggtagtcaagattgaaaaagtcctgcagcagggagagattggagactgtgcagagccctacacggttatcaaagaaagtgatggtggaaagagtaaagaaaagattgaaaaactaaaactccaagctgaatccttctgccagcgtttggggaaataccggatgccctttgcctgggcacccataagcttatcaagcttcttcaatgtctccacccttgagagggaggtaactgatgtggactctgtggttgggagaagctcagtgggtgaacggaggacattggcccaatctagaaggctttctgaaagagccctctccttggaggaaaatggggttggatccaacttcaaaacctccactctgagcgttagcagctttttcaagcaggaaggagatcgccttagcgatgaagacttattcaagtttttagctgactacaaaagatcatcatccttacagagacgagtcaagtcaattccaggcttgctaagactggagatttctacagctccagagatcatcaattgctgtctgactcctgaaatgctgcccgtgaaaccctttcctgaaaaccggacacgcccgcacaaagagattttggaatttccaacacgagaagtatatgtccctcacactgtgtacagagaagtcttccaggtttcagctgttgctcattaatgctcaccacagccctttgaggtcgatgcaattatgctttggaaaagctaagtaacttgccaaaggccatgcagctaaaagaagcaaaagctggattcaaatctcagctctctgcctccagagagaacaccctcaatcccgcttaacagacattagctctgcttatttgattggtggcagtggagatgaacagaagtgaacagtgagcagagaggggtctgtaccccacacacatccctgcaccccaactgtcaactgtcttccatcatcatttactatatccacgtccactcctgacagcatcagtggctcagtcttaccgacctgcatcagggttttgggctctgcctctgtttagacagagcacgatttgggaagtgctgctaagtcagccagtggctgagtagaaacagccctgcagtgggcctctgcctgctctgtggctcgtttatcatgtgtctcatctttaaaagttggggctcagtctaggtgcctcctggcctgagcaccccagaattctatgctgatcccttcattgtgacatggcctgtcatctactcttctgggaagaccatctgcacctcactgatacttgaagctcattgagtattgtcacatatcagcccagaaagtcacagggtacagcaactcatacttgctcccagcaccaggccagccccattctgcctccagggagtcacccaaaatagagagatgagggtaaaataagacctaggaatactatttatttgcctccatggcctttgaacttgcacatccaacgtaacggctcctgtgtgttcttgattgttccaattatcatttttcctctcgaatacctgagagcattcattattttgcaagagatttgagaatccctgtgccctaacttttctttccttgatgtgggatgttcttctgtgactagaaaccttctctatgtctacccacagaggctgaactttgtaaacaaactagcatcagcccggaacattacaataaagatccagtttatgtgtggagaagatgctagcaatgcgatgccggtgtcttaagacagcggtggggtcctcttagtcctctctgctcaggcccctggcatgccactgccaggagtgccagatatgcttgtgcagatcctgtggcaaccaagatgcccagccaagagtgactgtgggctaaagtccagtctgttcttcattcactgagccatgggttctggtgttgggattactgcatctagaggaaagagctttttttctctgcacaaaggtcatctttggaaaatccagcgggcctgaatttctgcaggaagtgtacacagctgttacataccataataagtctcctgacttttatgaagaagtgaaaattaagctccccgctaagctcacagtaaatcaccacctcctgttcaccttctaccatatcagctgtcagcagaagcaaggagcctccgtggaaactctcctgggatattcatggctgccaattctcttaaatgaacgtcttcaaactggatcctactgtctcccagttgccttggaaaaattgccacccaactactccatgcattctgctgagaaagtcccattacagaatcctcccattaagtgggctgaaggacataagggagtatttaatattgaagtgcaagctgtttcttctgtacacacccaggacaaccacctggagaagttcttcaccctctgccactccctggagagccaggtgaccttccccatccgcgtgctggatcagaaaatcagcgagatggcgctggagcatgagctgaagctcagcatcatctgcctgaactcctcccgcctggagccgctcgtgctcttcctgcacctggtgctggacaagctcttccagctgtccgtgcagcccatggtcatcgctggccagacagccaacttctcccagtttgccttcgagtccgtggtggccatcgccaacagtctgcacaacagcaaggacctgagcaaggaccagcatgggaggaactgcctgctggcttcctacgtgcactacgtcttccgcctgccagaggtgcaaagggatgtgcccaagtcagtggctcacatctgcaaccccagcactctaggaggctgagatggcaggatcgcttggagcagtggctcacatctgcaaccccagcactctaggaggctgagatggcaggatcgcttggagcagtggctcacatctgcaaccccagcactctaggaggctgagatggcaggatcgcttggagcagtggctcacatctgcaaccccagcactctaggaggctgagatggcaggatcacttggagcagtggctcacatctgcaaccccagcactctaggaggctgagatggcaggatcgcttggagcagtggctcacatctgcaaccccagcactctaggaggctgagatggcaggatcgcttggagcagtggctcacatctgcaaccccagcactctaggaggctgagatggcaggatcgcttggagcagtggctcacatctgcaaccccagcactctaggaggctgagatggcaggatcgcttggagcagtggctcacatctgcaaccccagcactctaggaggctgagatggcaggatcgcttggagcagtggctcacatctgcaaccccagcactctaggaggctgagatggcaggatcgcttggagccagaagttggagaccagcccagggaacataatgagactctgtctctacaaaaaatataaaaattagcagagcatggtggcacatacctttagtcccagctactcaggaagaagctgaggcaggaggatcatttaagcccaggagttggaggctgcagtgagctatgattgcaccactgcactccagcctgggaaacagagcgagatcccatctcttaaaacaaacaaacaaacaaacaaacaccctaaaattccattttcgttttcaggacaatacaaaacttacatgaatgctgaaattatgtgtttctttatagatctttcttcctccctccttgcctctttttatgctctaaacacttattttgtctgcccatttgataatccctcactggtctttacccacttgctaatttatgattcagctgagaatctcttttttaagatggagaagtggtgactgatgcctacgattctagtataataaaggaaataatatata

SEQ ID NO: 125869 - DNA, 537 bp, Homo sapiens
  Payload ID: 4657
  Gene Symbol: DOCK8
  Gene Name: dedicator of cytokinesis 8
  ENST ID: ENST00000487230
  CDS Start-End: 215-537
ttttgtctcctgtaacaatttacgcgccgtgtaactgtgaatctttcaaagctcttgcaggagaactctcttgtagctcaccctgtctgaaaacatactggaaaggaattcaaggaaatgtagttcagcctagccacgttgacacatcatgaagccgtcacaaaagcctcagttttatgaccctgtggagccagtggactttgaaggacttctgatgacacacctgaacagcctggatgtgcagcttgcccaggagctcggggacttcactgatgacgacttggacgtggtgttcacgccaaaggaatgtaggactttgcagccctctttgccggaggaaggggttgaactggaccctcatgtcagggactgtgttcagacctacatccgtgagtggctaatcgtgaaccggaaaaaccaaggaagtccagaaatctgtggctttaaaaagactggatctcgaaaagattttcacaagacgcttccgaaacagacgtttgagtcggaaaccttggagtgcagtgaacccgctgctca

SEQ ID NO: 125870 - DNA, 741 bp, Homo sapiens
  Payload ID: 4657
  Gene Symbol: DOCK8
  Gene Name: dedicator of cytokinesis 8
  ENST ID: ENST00000469197
  CDS Start-End: 124-324
cagcgccgaccgacagacgaggtttgcgcttggctgggcatgttccgcggctactctgcggcgcgccaggcccccgctttccgcaccccgcgaccctagaagccaccgaaccgccggcgggccatggccactctgccgagcgcagagcgccgcgcgttcgcgctcaagatcaacaggtattcttcagcggaaataaggaaacagtttactctcccaccaaaccttggccagtaccatcgacagagcataagtacctctggcttcccctctcttcaactaagacggagtttctccatgttgtccaggctggtcttgaactcctgagcttcagtgatctgcctgccttggcctcccaaagtgctgggattacagagggacccttgtaaggactatagtcctctcttcagctgaccttcaggtccccagtcagaaccaagggaaccgactctgtcccttctcatagcacctgaaaaccccgggaaacgaggggaatgctttgctctcagctactgaggttgtcctgtcaccttctcttctgccctcctttgccatggcataggataatcctcagttttatgaccctgtggagccagtggactttgaaggacttctgatgacacacctgaacagcctggatgtgcagcttgcccaggagctcggggacttcactgatgacgacttggacgtggtgttcacgccaaaggaatgtaggactttgcagccctctttgccggaggaagg

SEQ ID NO: 125871 - DNA, 6386 bp, Homo sapiens
  Payload ID: 4657
  Gene Symbol: DOCK8
  Gene Name: dedicator of cytokinesis 8
  Uniprot ID: Q8NF50
  ENST ID: ENST00000469391
  CDS Start-End: 80-6079
tacgcgccgtgtaactgtgaatctttcaaagcctcagttttatgaccctgtggagccagtggactttgaaggacttctgatgacacacctgaacagcctggatgtgcagcttgcccaggagctcggggacttcactgatgacgacttggacgtggtgttcacgccaaaggaatgtaggactttgcagccctctttgccggaggaaggggttgaactggaccctcatgtcagggactgtgttcagacctacatccgtgagtggctaatcgtgaaccggaaaaaccaaggaagtccagaaatctgtggctttaaaaagactggatctcgaaaagattttcacaagacgcttccgaaacagacgtttgagtcggaaaccttggagtgcagtgaacccgctgctcaggcaggcccccgccacttaaacgtgctgtgcgacgtgtctgggaaaggccccgtcactgcctgtgactttgacctccgcagcctgcagcctgacaagcggctagaaaacctcctgcagcaagtgagtgccgaggactttgagaagcagaacgaggaggcccggaggaccaataggcaggccgagctctttgccctttacccatcagtggacgaggaggatgctgtggaaatacgtccagtaccagaatgtcccaaggaacacctgggcaacagaatattggtcaagttgctgaccttgaagttcgagattgaaattgagcccctgtttgccagcattgccctctacgatgttaaagaaaggaaaaagatctcagaaaattttcactgtgacctgaactctgaccagttcaaaggatttctgcgagctcacacgccttcagtggccgcatcaagtcaggcgagatctgcagtcttctcagtcacctacccgtcctcagacatctacctggtagtcaagattgaaaaagtcctgcagcagggagagattggagactgtgcagagccctacacggttatcaaagaaagtgatggtggaaagagtaaagaaaagattgaaaaactaaaactccaagctgaatccttctgccagcgtttggggaaataccggatgccctttgcctgggcacccataagcttatcaagcttcttcaatgtctccacccttgagagggaggtaactgatgtggactctgtggttgggagaagctcagtgggtgaacggaggacattggcccaatctagaaggctttctgaaagagccctctccttggaggaaaatggggttggatccaacttcaaaacctccactctgagcgttagcagctttttcaagcaggaaggagatcgccttagcgatgaagacttattcaagtttttagctgactacaaaagatcatcatccttacagagacgagtcaagtcaattccaggcttgctaagactggagatttctacagctccagagatcatcaattgctgtctgactcctgaaatgctgcccgtgaaaccctttcctgaaaaccggacacgcccgcacaaagagattttggaatttccaacacgagaagtatatgtccctcacactgtgtacagaaaccttctctatgtctacccacagaggctgaactttgtaaacaaactagcatcagcccggaacattacaataaagatccagtttatgtgtggagaagatgctagcaatgcgatgccggtcatctttggaaaatccagcgggcctgaatttctgcaggaagtgtacacagctgttacataccataataagtctcctgacttttatgaagaagtgaaaattaagctccccgctaagctcacagtaaatcaccacctcctgttcaccttctaccatatcagctgtcagcagaagcaaggagcctccgtggaaactctcctgggatattcatggctgccaattctcttaaatgaacgtcttcaaactggatcctactgtctcccagttgccttggaaaaattgccacccaactactccatgcattctgctgagaaagtcccattacagaatcctcccattaagtgggctgaaggacataagggagtatttaatattgaagtgcaagctgtttcttctgtacacacccaggacaaccacctggagaagttcttcaccctctgccactccctggagagccaggtgaccttccccatccgcgtgctggatcagaaaatcagcgagatggcgctggagcatgagctgaagctcagcatcatctgcctgaactcctcccgcctggagccgctcgtgctcttcctgcacctggtgctggacaagctcttccagctgtccgtgcagcccatggtcatcgctggccagacagccaacttctcccagtttgccttcgagtccgtggtggccatcgccaacagtctgcacaacagcaaggacctgagcaaggaccagcatgggaggaactgcctgctggcttcctacgtgcactacgtcttccgcctgccagaggtgcaaagggatgtgcccaagtcaggcgctcccactgccctcctagaccctcggagctaccacacgtatggccgcacatcagctgctgctgtgagttcaaagctgctgcaggcccgggtgatgagcagcagtaacccagacctcgcggggacacactccgcagcagacgaggaagtgaagaacatcatgtcttcaaagcatttccatgaggagcttgcccttcagatggtggtcagcaccggaatggtgagagaaacagtcttcaagtatgcctggttcttctttgagcttctggtgaaaagcatggcccagcacgtacataacatggacaaacgggacagttttcggaggactcgtttttctgaccgtttcatggatgacataactactattgttaatgtggtcacctcggaaattgcagcccttttagtaaaaccacagaaggaaaatgaacaggcggaaaagatgaacatcagcctggctttcttcttgtatgaccttctctccctcatggatcggggctttgtgtttaacctcatcagacattattgcagccagctgtcagccaagctcagtaaccttccaacgctcatttccatgaggctagagttcctgagaatcctctgtagccatgagcattacctcaatctgaaccttttttttatgaatgctgatactgctccaacatctccttgtccttccatatcttcccagaactcaagctcctgctccagcttccaggaccagaagatcgccagcatgttcgatctgacttccgagtaccgccagcagcacttcctcaccgggctcctcttcacagaactggctgctgccctggatgccgaaggggaaggaatcagcaaagtacaaaggaaagctgtcagtgcaattcacagcctgctaagttctcacgacctggacccacgctgtgtcaaaccagaggtgaaggtcaaaatcgccgccctttacctacctttagttggcatcattttggatgctttgccacagctctgtgactttacagttgcagatactcgcagataccgcaccagtggctcggatgaagaacaagaaggagccggtgccattaaccagaatgtggctctggccatagcagggaataatttcaatttgaaaacaagtggaatagtgctgtcttccttgccctataagcagtacaacatgctgaacgcggacactactcgcaacctcatgatctgcttcctctggatcatgaaaaatgctgatcagagcctcattaggaagtggattgctgacctgccatcaacgcagctcaacaggattttagatctacttttcatctgtgtgttatgttttgagtataagggaaaacagagttctgacaaagtcagtacccaagtcctgcagaagtcaagggatgtcaaggcccggctggaagaggctttgctccgtggggaaggggccagaggggagatgatgcgccgccgggctccagggaacgaccgatttccaggcctaaatgaaaatttgagatggaagaaagagcagacacattggcggcaagctaatgagaagctagataaaacaaaggccgagttagatcaagaagccttgatcagtggcaatctggctacagaagcacatttaatcatcctggatatgcaggaaaacattatccaggcgagctcggctctggactgtaaagacagcctgctgggaggtgttctgagggtgctggtgaattctctgaactgtgatcagagtaccacctacctgactcactgctttgcaacactccgtgctctcatcgccaagtttggagacttactctttgaagaggaggtggaacagtgtttcgacctatgtcaccaagtcctgcaccactgcagcagcagcatggatgtcacccggagccaagcctgtgccaccctttacctcctcatgaggttcagttttggagccaccagtaattttgcaagagtaaagatgcaagtaaccatgtccctggcatctttggtgggaagagcaccagactttaatgaagagcacctgagaagatccttgaggacaattttggcctattcagaagaggacacagccatgcagatgactccttttcccacccaggtggaggaacttctctgtaatctgaatagcatcttatatgacacagtgaaaatgagggaatttcaggaagatcctgagatgcttatggatctcatgtacagaattgccaagagttaccaggcatctcctgatctgcggctgacctggctccagaacatggcagagaaacacaccaagaagaagtgctacacggaggctgccatgtgcctggtgcacgccgctgcgttagtggctgagtatctgagcatgctggaggaccacagctacctgcccgtgggcagtgtcagcttccagaatatttcttccaatgtgctggaggagtctgtggtctctgaggacaccctgtcacctgacgaggatggggtgtgcgcaggccagtacttcaccgagagtggcctggtaggcctcctggagcaggccgcggagctcttcagcacgggaggcttatatgagacagttaatgaggtctacaagctggtcatccccatcctagaagcgcatcgagaattccggaagctgacactcactcacagcaagctgcagagagccttcgacagcatcgttaacaaggatcataagagaatgtttggaacctacttccgagttggtttctttggatccaaatttggggatttggatgaacaggagtttgtctacaaagagcctgcaattaccaagcttcctgagatctcacatagactagaggcattttatggtcaatgttttggtgcagaatttgtggaagtgattaaagactccactcctgtggacaaaaccaagttggatcctaacaaggcctacatacagatcacttttgtggagccctactttgatgagtatgagatgaaagacagggtcacatactttgagaagaatttcaacctccggaggttcatgtacaccaccccgttcaccctggaggggcggcctcggggagagctgcatgagcagtacagaaggaacacagtcctgaccactatgcacgccttcccctacatcaagaccaggatcagcgtcatccagaaggaggagtttgttttgacaccgattgaagttgccattgaagacatgaagaagaagaccctgcagttagcagttgccattaaccaggagccgcctgatgcaaagatgcttcagatggtgctgcaaggctctgtgggagctactgtaaatcagggaccactggaagtagcccaagtgtttttggctgaaattcctgctgatccaaaactctatcgacatcacaacaagttgaggttatgctttaaggaattcatcatgagatgtggtgaagctgtagagaaaaacaagcgtctcatcacggcagaccagagggaatatcagcaggaactcaaaaagaactataacaagctaaaagagaacctcaggccaatgatcgagcggaaaattccagaactgtacaagccaatattcagagttgagagtcaaaagagggactccttccacagatctagtttcaggaaatgtgaaacccagttgtcacagggcagctaagaaaagccatcttcattcgtggagactgtggccctgcaaccctggagaaggacttgctggtacttaaaaaatgggacatttgccacccaggactgactgtacactccctgatcagccagcactctggaagctttgggatcccaggaaccatggaattattcccaaatggactctgaccagatttttgccatactggggggtggcgggatggaggatgggtactcaggcatgactgcgtatttattaaagtgtgtttttccacaatgtaccaaacaaggcataagcagcttctcctgctgactggcca

SEQ ID NO: 125872 - DNA, 2206 bp, Homo sapiens
  Payload ID: 4657
  Gene Symbol: DOCK8
  Gene Name: dedicator of cytokinesis 8
  ENST ID: ENST00000524396
  CDS Start-End: 113-265
gacagacgaggtttgcgcttggctgggcatgttccgcggctactctgcggcgcgccaggcccccgctttccgcaccccgcgaccctagaagccaccgaaccgccggcgggccatggccactctgccgagcgcagagcgccgcgcgttcgcgctcaagatcaacagtcatgctctgtcgcccaggctggagtacagtggggccatctcggctcactgcaacctctgcctcccggattcaagcgattctcctgcctcagcctcctgagtagctgagattacaggtattcttcagcggaaataaggaaacagtttactctcccaccaaaccttggccagtaccatcgacagagcataagtacctctggcttcccctctcttcaactacctcagttttatgaccctgtggagccagtggactttgaaggacttctgatgacacacctgaacagcctggatgtgcagcttgcccaggagctcggggacttcactgatgacgacttggacgtggtgttcacgccaaaggaatgtaggactttgcagccctctttgccggaggaaggggttgaactggaccctcatgtcagggactgtgttcagacctacatccgtgagtggctaatcgtgaaccggaaaaaccaaggaagtccagaaatctgtggctttaaaaagactggatctcgaaaagattttcacaagacgcttccgaaacagacgtttgagtcggaaaccttggagtgcagtgaacccgctgctcaggcaggcccccgccacttaaacgtgctgtgcgacgtgtctgggaaaggccccgtcactgcctgtgactttgacctccgcagcctgcagcctgacaagcggctagaaaacctcctgcagcaagtgagtgccgaggactttgagaagcagaacgaggaggcccggaggaccaataggcaggccgagctctttgccctttacccatcagtggacgaggaggatgctgtggaaatacgtccagtaccagaatgtcccaaggaacacctgggcaacagaatattggtcaagttgctgaccttgaagttcgagattgaaattgagcccctgtttgccagcattgccctctacgatgttaaagaaaggaaaaagatctcagaaaattttcactgtgacctgaactctgaccagttcaaaggatttctgcgagctcacacgccttcagtggccgcatcaagtcaggcgagatctgcagtcttctcagtcacctacccgtcctcagacatctacctggtagtcaagattgaaaaagtcctgcagcagggagagattggagactgtgcagagccctacacggttatcaaagaaagtgatggtggaaagagtaaagaaaagattgaaaaactaaaactccaagctgaatccttctgccagcgtttggggaaataccggatgccctttgcctgggcacccataagcttatcaagcttcttcaatgtctccacccttgagagggaggtaactgatgtggactctgtggttgggagaagctcagtgggtgaacggaggacattggcccaatctagaaggctttctgaaagagccctctccttggaggaaaatggggttggatccaacttcaaaacctccactctgagcgttagcagctttttcaagcaggaaggagatcgccttagcgatgaagacttattcaagtttttagctgactacaaaagatcatcatccttacagagacgagtcaagtcaattccaggcttgctaagactggagatttctacagctccagagatcatcaattgctgtctgactcctgaaatgctgcccgtgaaaccctttcctgaaaaccggacacgcccgcacaaagagattttggaatttccaacacgagaagtatatgtccctcacactgtgtacaggtaagaaacacaggctcgggctgggcgtggtggcttacaccataatcccataactttgggaggccgaggcaggaggattgcttgagctcaggagtttgagaccagccttggcaacatggcaaaaccgtgtctctacaacatatacaaaatttagctgggcatggtggtgcatgcttgtaatcccagcaacttggcaggctgaggcaggagaatcgcttgaacccaggaggcagaggttgcagtgagccaagattgcactactgcactccagcctgggagacagaaccagactctgtctc

SEQ ID NO: 125873 - DNA, 7526 bp, Homo sapiens
  Payload ID: 4658
  Gene Symbol: DOCK9
  Gene Name: dedicator of cytokinesis 9
  ENST ID: ENST00000339416
  CDS Start-End: 56-6364
gcggccgggccgggccgcgggagcaggcggaggcggaggcggcgggggcaggaggatgtcgcagccgccgctgctccccgcctcggcggagactcggaagttcacccgggcgctgagtaagccgggcacggcggccgagctgcggcagagcgtgtctgaggtggtgcgcggctccgtgctcctggcaaagccaaagctaattgagccactcgactatgaaaatgtcatcgtccagaagaagactcagatcctgaacgactgtttacgggagatgctgctcttcccttacgatgactttcagacggccatcctgagacgacagggtcgatacatatgctcaacagtgcctgcgaaggcggaagaggaagcacagagcttgtttgttacagagtgcatcaaaacctataactctgactggcatcttgtgaactataaatatgaagattactcaggagagtttcgacagcttccgaacaaagtggtcaagttggataaacttccagttcatgtctatgaagttgacgaggaggtcgacaaagatgaggatgctgcctcccttggttcccagaagggtgggatcaccaagcatggctggctgtacaaaggcaacatgaacagtgccatcagcgtgaccatgaggtcatttaagagacgatttttccacctgattcaacttggcgatggatcctataatttgaatttttataaagatgaaaagatctccaaagaaccaaaaggatcaatatttctggattcctgtatgggtgtcgttcagaacaacaaagtcaggcgttttgcttttgagctcaagatgcaggacaaaagtagttatctcttggcagcagacagtgaagtggaaatggaagaatggatcacaattctaaataagatcctccagctcaactttgaagctgcaatgcaagaaaagcgaaatggcgactctcacgaagatgatgaacaaagcaaattggaaggttctggttccggtttagatagctacctgccggaacttgccaagagtgcaagagaagcagaaatcaaactgaaaagtgaaagcagagtcaaacttttttatttggacccagatgcccagaagcttgacttctcatcagctgagccagaagtgaagtcatttgaagagaagtttggaaaaaggatccttgtcaagtgcaatgatttatctttcaatttgcaatgctgtgttgccgaaaatgaagaaggacccactacaaatgttgaacctttctttgttactctatccctgtttgacataaaatacaaccggaagatttctgccgatttccacgtagacctgaaccatttctcagtgaggcaaatgctcgccaccacgtccccggcgctgatgaatggcagtgggcagagcccatctgtcctcaagggcatccttcatgaagccgccatgcagtatccgaagcagggaatattttcagtcacttgtcctcatccagatatatttcttgtggccagaattgaaaaagtccttcaggggagcatcacacattgcgctgagccatatatgaaaagttcagactcttctaaggtggcccagaaggtgctgaagaatgccaagcaggcatgccaaagactaggacagtatagaatgccatttgcttgggcagcaaggacattgtttaaggatgcatctggaaatcttgacaaaaatgccagattttctgccatctacaggcaagacagcaataagctatccaatgatgacatgctcaagttacttgcagactttcggaaacctgagaagatggctaagctcccagtgattttaggcaatctagacattacaattgataatgtttcctcagacttccctaattatgttaattcatcatacattcccacaaaacaatttgaaacctgcagtaaaactcccatcacgtttgaagtggaggaatttgtgccctgcataccaaaacacactcagccttacaccatctacaccaatcacctttacgtttatcctaagtacttgaaatacgacagtcagaagtcttttgccaaggctagaaatattgcgatttgcattgaattcaaagattcagatgaggaagactctcagccccttaagtgcatttatggcagacctggtgggccagttttcacaagaagcgcctttgctgcagttttacaccatcaccaaaacccagaattttatgatgagattaaaatagagttgcccactcagctgcatgaaaagcaccacctgttgctcacattcttccatgtcagctgtgacaactcaagtaaaggaagcacgaagaagagggatgtcgttgaaacccaagttggctactcctggcttcccctcctgaaagacggaagggtggtgacaagcgagcagcacatcccggtctcggcgaaccttccttcgggctatcttggctaccaggagcttgggatgggcaggcattatggtccggaaattaaatgggtagatggaggcaagccactgctgaaaatttccactcatctggtttctacagtgtatactcaggatcagcatttacataattttttccagtactgtcagaaaaccgaatctggagcccaagccttaggaaacgaacttgtaaagtaccttaagagtctgcatgcgatggaaggccacgtgatgatcgccttcttgcccactatcctaaaccagctgttccgagtcctcaccagagccacacaggaagaagtcgcggttaacgtgactcgggtcattattcatgtggttgcccagtgccatgaggaaggattggagagccacttgaggtcatatgttaagtacgcgtataaggctgagccatatgttgcctctgaatacaagacagtgcatgaagaactgaccaaatccatgaccacgattctcaagccttctgccgatttcctcaccagcaacaaactactgaagtactcatggtttttctttgatgtactgatcaaatctatggctcagcatttgatagagaactccaaagttaagttgctgcgaaaccagagatttcctgcatcctatcatcatgcagtggaaaccgttgtaaatatgctgatgccacacatcactcagaagtttcgagataatccagaggcatctaagaacgcgaatcatagccttgctgtcttcatcaagagatgtttcaccttcatggacaggggctttgtcttcaagcagatcaacaactacattagctgttttgctcctggagacccaaagaccctctttgaatacaagtttgaatttctccgtgtagtgtgcaaccatgaacattatattccgttgaacttaccaatgccatttggaaaaggcaggattcaaagataccaagacctccagcttgactactcattaacagatgagttctgcagaaaccacttcttggtgggactgttactgagggaggtggggacagccctccaggagttccgggaggtccgtctgatcgccatcagtgtgctcaagaacctgctgataaagcattcttttgatgacagatatgcttcaaggagccatcaggcaaggatagccaccctctacctgcctctgtttggtctgctgattgaaaacgtccagcggatcaatgtgagggatgtgtcacccttccctgtgaacgcgggcatgactgtgaaggatgaatccctggctctaccagctgtgaatccgctggtgacgccgcagaagggaagcaccctggacaacagcctgcacaaggacctgctgggcgccatctccggcattgcttctccatatacaacctcaactccaaacatcaacagtgtgagaaatgctgattcgagaggatctctcataagcacagattcgggtaacagccttccagaaaggaatagtgagaagagcaattccctggataagcaccaacaaagtagcacattgggaaattccgtggttcgctgtgataaacttgaccagtctgagattaagagcctactgatgtgtttcctctacatcttaaagagcatgtctgatgatgctttgtttacatattggaacaaggcttcaacatctgaacttatggatttttttacaatatctgaagtctgcctgcaccagttccagtacatggggaagcgatacatagccagaacaggaatgatgcatgccagattgcagcagctgggcagcctggataactctctcacttttaaccacagctatggccactcggacgcagatgttctgcaccagtcattacttgaagccaacattgctactgaggtttgcctgacagctctggacacgctttctctatttacattggcgtttaagaaccagctcctggccgaccatggacataatcctctcatgaaaaaagtttttgatgtctacctgtgttttcttcaaaaacatcagtctgaaacggctttaaaaaatgtcttcactgccttaaggtccttaatttataagtttccctcaacattctatgaagggagagcggacatgtgtgcggctctgtgttacgagattctcaagtgctgtaactccaagctgagctccatcaggacggaggcctcccagctgctctacttcctgatgaggaacaactttgattacactggaaagaagtcctttgtccggacacatttgcaagtcatcatatctgtcagccagctgatagcagacgttgttggcattgggggaaccagattccagcagtccctgtccatcatcaacaactgtgccaacagtgaccggcttattaagcacaccagcttctcctctgatgtgaaggacttaaccaaaaggatacgcacggtgctaatggccaccgcccagatgaaggagcatgagaacgacccagagatgctggtggacctccagtacagcctggccaaatcctatgccagcacgcccgagctcaggaagacgtggctcgacagcatggccaggatccatgtcaaaaatggcgatctctcagaggcagcaatgtgctatgtccacgtaacagccctagtggcagaatatctcacacggaaagaagcagtccagtgggagccgccccttctcccccacagccatagcgcctgcctgaggaggagccggggaggcgtgtttagacaaggatgcaccgccttcagggtcattaccccaaacatcgacgaggaggcctccatgatggaagacgtggggatgcaggatgtccatttcaacgaggatgtgctgatggagctccttgagcagtgcgcagatggactctggaaagccgagcgctacgagctcatcgccgacatctacaaacttatcatccccatttatgagaagcggagggattttgagaggctggcccatctgtatgacacgctgcaccgggcctacagcaaagtgaccgaggtcatgcactcgggccgcaggcttctggggacctacttccgggtagccttcttcgggcaggtgagccaataccagtttacagacagtgaaacagatgtggagggattctttgaagatgaagatggaaaggagtatatttacaaggaacccaaactcacaccgctgtcggaaatttctcagagactccttaaactgtactcggataaatttggttctgaaaatgtcaaaatgatacaggattctggcaaggtcaaccctaaggatctggattctaagtatgcatacatccaggtgactcacgtcatccccttctttgacgaaaaagagttgcaagaaaggaaaacagagtttgagagatcccacaacatccgccgcttcatgtttgagatgccatttacgcagaccgggaagaggcagggcggggtggaagagcagtgcaaacggcgcaccatcctgacagccatacactgcttcccttatgtgaagaagcgcatccctgtcatgtaccagcaccacactgacctgaaccccatcgaggtggccattgacgagatgagtaagaaggtggcggagctccggcagctgtgctcctcggccgaggtggacatgatcaaactgcagctcaaactccagggcagcgtgagtgttcaggtcaatgctggcccactagcatatgcgcgagctttcttagatgatacaaacacaaagcgatatcctgacaataaagtgaagctgcttaaggaagttttcaggcaatttgtggaagcttgcggtcaagccttagcggtaaacgaacgtctgattaaagaagaccagctcgagtatcaggaagaaatgaaagccaactacagggaaatggcgaaggagctttctgaaatcatgcatgagcaggtgagaagatctgccccctggaggagaagacgagcgtcttaccgaattcccttcacatcttcaacgccatcagtgggactccaacaagcacaatggttcacgggatgaccagctcgtcttcggtcgtgtgattacatctcatggcccgtgtgtggggacttgctttgtcatttgcaaactcaggatgctttccaaagccaatcactggggagaccgagcacagggaggaccaaggggaaggggagagaaaggaaataaagaacaacgttatttcttaacagactttctataggagttgtaagaaggtgcacatatttttttaaatctcactggcaatattcaaagttttcattgtgtcttaacaaaggtgtggtagacactcttgagctggacttagattttattcttccttgcagagtagtgttagaatagatggcctacagaaaaaaaaggttctgggatctacatggcagggagggctgcactgacattgatgcctgggggaccttttgcctcgaggctgagctggaaaatcttgaaaatattttttttttcctgtggcacattcaggttgaatacaagaactatttttgtgactagtttttgatgacctaagggaactgaccattgtaatttttgtaccagtgaaccaggagatttagtgcttttatattcatttccttgcatttaagaaaatatgaaagcttaaggaattatgtgagcttaaaactagtcaagcagtttagaaccaaaggcctatattaataaccgcaactatgctgaaaagtacaaagtagtacagtatattgttatgtacatatcattgttaatacagtcctggcattctgtacatatatgtattacatttctacatttttaatactcacatgggcttatgcattaagtttaattgtgataaatttgtgctgttccagtatatgcaatacactttaatgttttattcttgtacataaaaatgtgcaatatggagatgtatacagtctttactatattaggtttataaacagttttaagaatttcatccttttgccaaaatggtggagtatgtaattggtaaatcataaatcctgtggtgaatggtggtgtactttaaagctgtcaccatgttatattttcttttaagactttaatttagtaattttatatttgggaaaataaaggtttttaattttatttaactggaatcactgccctgctgtaattaaacattctgtaccacatctgtattaaaaagacattgctgaccatt

SEQ ID NO: 125874 - DNA, 2514 bp, Homo sapiens
  Payload ID: 4658
  Gene Symbol: DOCK9
  Gene Name: dedicator of cytokinesis 9
  ENST ID: ENST00000340449
  CDS Start-End: 1242-2514
tttgtcttatagtgatgaaataggccagagatttttagtagacttcctctttgtgaagattttctttttctgttaacattgttcttttctggggatatttgagaaattttcagaattacattttatgttaagaagtaaacatgtatgttttctttttaaaagaagcaaatttagaatttttgcattttcctcctattaatattttctatttttcattgaaatgtggtagcacttaaagttctctaatcttaactgttttattttttatcacaacagtaattttatatttgagttttggagtactaaatgcaagtatatacaaggtgtccttataccagcaacgtcttctaccttgacttggattctccctgactttgtcccatgaagatgggcaaacagtaaattctgtcacagaaaggcactgtgctgggctagcttcactttttgcagtgacacctacgtcacaagatggcatttggagaatattgtgccaagtagaataaaatgcctcacagcttaaaacagtgaatgtgagaagctgaagatttctgtcccaacaaaatgttttagaatcgggttttgtgaaatggttaacgtatttttttcagtggatataaatttaacttcttaaaagaaaatcttcctacttcataagcaccctgtatatatttgcatataaaagtgtggactgccttaaaaatagatgggccaaggaaaacaggagtggagatgatgtgactttgctccatgcactgtggaaagatatgctctgctctatacaaaaattgccatggttctctgctgcatgtgaaaaagatcctgaactagactgtgaaccttgtacatgtttgccatccacggtggtcgagtttgatgaacactgtgccttcttattgtcactttgaagtcacccagcagcatgcagtcgatgatagtccatgcatgtccctgttctcctacacacaataacacagtgagggggacggttggctccgggacaggggacaggtgtcattgcagccctggtctcattttcatctgctctggtgatggtacacagcaggaagttagctgtttgattgctaacccaaatcactcttctgttttctctacttgactgctgacaagtttaacaaagtgtgtggctcttctccttcctgcttgggaaccaggaggggttgggacccatagttcatgatcgaaagtctcagacattgcctgtttcccgtaacagaacaggaatgatgcatgccagattgcagcagctgggcagcctggataactctctcacttttaaccacagctatggccactcggacgcagatgttctgcaccagtcattacttgaagccaacattgctactgaggtttgcctgacagctctggacacgctttctctatttacattggcgtttaagaaccagctcctggccgaccatggacataatcctctcatgaaaaaagtttttgatgtctacctgtgttttcttcaaaaacatcagtctgaaacggctttaaaaaatgtcttcactgccttaaggtccttaatttataagtttccctcaacattctatgaagggagagcggacatgtgtgcggctctgtgttacgagattctcaagtgctgtaactccaagctgagctccatcaggacggaggcctcccagctgctctacttcctgatgaggaacaactttgattacactggaaagaagtcctttgtccggacacatttgcaagtcatcatatctgtcagccagctgatagcagacgttgttggcattgggggaaccagattccagcagtccctgtccatcatcaacaactgtgccaacagtgaccggcttattaagcacaccagcttctcctctgatgtgaaggacttaaccaaaaggatacgcacggtgctaatggccaccgcccagatgaaggagcatgagaacgacccagagatgctggtggacctccagtacagcctggccaaatcctatgccagcacgcccgagctcaggaagacgtggctcgacagcatggccaggatccatgtcaaaaatggcgatctctcagaggcagcaatgtgctatgtccacgtaacagccctagtggcagaatatctcacacggaaaggcgtgtttagacaaggatgcaccgccttcagggtcattaccccaaacatcgacgaggaggcctccatgatggaagacgtggggatgcaggatgtccatttcaacgaggatgtgctgatggagctccttgagcagtgcgcagatggactctggaaagccgagcgctacgagctcatcgccgacatctacaaacttatcatccccatttatgagaagcggagggattttgagaggctggcccatctgtatgacacgctgcaccgggcctacagcaaagtgaccgaggtcatgcactcgggccgcaggcttctggggacctacttccgggtagccttcttcgggcaggtgagcctcctgtccattctgcagactgtcctaagtcctttaa

SEQ ID NO: 125875 - DNA, 7549 bp, Homo sapiens
  Payload ID: 4658
  Gene Symbol: DOCK9
  Gene Name: dedicator of cytokinesis 9
  Uniprot ID: Q9BZ29
  ENST ID: ENST00000376460
  CDS Start-End: 82-6288
ctggcatgcctgtgccttgcacggccagggactcgcagctgttccagttgcagactttctgacttgcgttttcagccgagaatgcaggctgataaatgcaggacaagtagtagaagtgtcaaaaaggaactggtgattgagtcccccctgcaatacaaggatgcagctcagggcgaagtggaagcagagagcccgggccctgtgccggcaaagccaaagctaattgagccactcgactatgaaaatgtcatcgtccagaagaagactcagatcctgaacgactgtttacgggagatgctgctcttcccttacgatgactttcagacggccatcctgagacgacagggtcgatacatatgctcaacagtgcctgcgaaggcggaagaggaagcacagagcttgtttgttacagagtgcatcaaaacctataactctgactggcatcttgtgaactataaatatgaagattactcaggagagtttcgacagcttccgaacaaagtggtcaagttggataaacttccagttcatgtctatgaagttgacgaggaggtcgacaaagatgaggatgctgcctcccttggttcccagaagggtgggatcaccaagcatggctggctgtacaaaggcaacatgaacagtgccatcagcgtgaccatgaggtcatttaagagacgatttttccacctgattcaacttggcgatggatcctataatttgaatttttataaagatgaaaagatctccaaagaaccaaaaggatcaatatttctggattcctgtatgggtgtcgttcagaacaacaaagtcaggcgttttgcttttgagctcaagatgcaggacaaaagtagttatctcttggcagcagacagtgaagtggaaatggaagaatggatcacaattctaaataagatcctccagctcaactttgaagctgcaatgcaagaaaagcgaaatggcgactctcacgaagatgatgaacaaagcaaattggaaggttctggttccggtttagatagctacctgccggaacttgccaagagtgcaagagaagcagaaatcaaactgaaaagtgaaagcagagtcaaacttttttatttggacccagatgcccagaagcttgacttctcatcagctgagccagaagtgaagtcatttgaagagaagtttggaaaaaggatccttgtcaagtgcaatgatttatctttcaatttgcaatgctgtgttgccgaaaatgaagaaggacccactacaaatgttgaacctttctttgttactctatccctgtttgacataaaatacaaccggaagatttctgccgatttccacgtagacctgaaccatttctcagtgaggcaaatgctcgccaccacgtccccggcgctgatgaatggcagtgggcagagcccatctgtcctcaagggcatccttcatgaagccgccatgcagtatccgaagcagggaatattttcagtcacttgtcctcatccagatatatttcttgtggccagaattgaaaaagtccttcaggggagcatcacacattgcgctgagccatatatgaaaagttcagactcttctaaggtggcccagaaggtgctgaagaatgccaagcaggcatgccaaagactaggacagtatagaatgccatttgcttgggcagcaaggacattgtttaaggatgcatctggaaatcttgacaaaaatgccagattttctgccatctacaggcaagacagcaataagctatccaatgatgacatgctcaagttacttgcagactttcggaaacctgagaagatggctaagctcccagtgattttaggcaatctagacattacaattgataatgtttcctcagacttccctaattatgttaattcatcatacattcccacaaaacaatttgaaacctgcagtaaaactcccatcacgtttgaagtggaggaatttgtgccctgcataccaaaacacactcagccttacaccatctacaccaatcacctttacgtttatcctaagtacttgaaatacgacagtcagaagtcttttgccaaggctagaaatattgcgatttgcattgaattcaaagattcagatgaggaagactctcagccccttaagtgcatttatggcagacctggtgggccagttttcacaagaagcgcctttgctgcagttttacaccatcaccaaaacccagaattttatgatgagattaaaatagagttgcccactcagctgcatgaaaagcaccacctgttgctcacattcttccatgtcagctgtgacaactcaagtaaaggaagcacgaagaagagggatgtcgttgaaacccaagttggctactcctggcttcccctcctgaaagacggaagggtggtgacaagcgagcagcacatcccggtctcggcgaaccttccttcgggctatcttggctaccaggagcttgggatgggcaggcattatggtccggaaattaaatgggtagatggaggcaagccactgctgaaaatttccactcatctggtttctacagtgtatactcaggatcagcatttacataattttttccagtactgtcagaaaaccgaatctggagcccaagccttaggaaacgaacttgtaaagtaccttaagagtctgcatgcgatggaaggccacgtgatgatcgccttcttgcccactatcctaaaccagctgttccgagtcctcaccagagccacacaggaagaagtcgcggttaacgtgactcgggtcattattcatgtggttgcccagtgccatgaggaaggattggagagccacttgaggtcatatgttaagtacgcgtataaggctgagccatatgttgcctctgaatacaagacagtgcatgaagaactgaccaaatccatgaccacgattctcaagccttctgccgatttcctcaccagcaacaaactactgaagtactcatggtttttctttgatgtactgatcaaatctatggctcagcatttgatagagaactccaaagttaagttgctgcgaaaccagagatttcctgcatcctatcatcatgcagtggaaaccgttgtaaatatgctgatgccacacatcactcagaagtttcgagataatccagaggcatctaagaacgcgaatcatagccttgctgtcttcatcaagagatgtttcaccttcatggacaggggctttgtcttcaagcagatcaacaactacattagctgttttgctcctggagacccaaagaccctctttgaatacaagtttgaatttctccgtgtagtgtgcaaccatgaacattatattccgttgaacttaccaatgccatttggaaaaggcaggattcaaagataccaagacctccagcttgactactcattaacagatgagttctgcagaaaccacttcttggtgggactgttactgagggaggtggggacagccctccaggagttccgggaggtccgtctgatcgccatcagtgtgctcaagaacctgctgataaagcattcttttgatgacagatatgcttcaaggagccatcaggcaaggatagccaccctctacctgcctctgtttggtctgctgattgaaaacgtccagcggatcaatgtgagggatgtgtcacccttccctgtgaacgcgggcatgactgtgaaggatgaatccctggctctaccagctgtgaatccgctggtgacgccgcagaagggaagcaccctggacaacagcctgcacaaggacctgctgggcgccatctccggcattgcttctccatatacaacctcaactccaaacatcaacagtgtgagaaatgctgattcgagaggatctctcataagcacagattcgggtaacagccttccagaaaggaatagtgagaagagcaattccctggataagcaccaacaaagtagcacattgggaaattccgtggttcgctgtgataaacttgaccagtctgagattaagagcctactgatgtgtttcctctacatcttaaagagcatgtctgatgatgctttgtttacatattggaacaaggcttcaacatctgaacttatggatttttttacaatatctgaagtctgcctgcaccagttccagtacatggggaagcgatacatagccagaacaggaatgatgcatgccagattgcagcagctgggcagcctggataactctctcacttttaaccacagctatggccactcggacgcagatgttctgcaccagtcattacttgaagccaacattgctactgaggtttgcctgacagctctggacacgctttctctatttacattggcgtttaagaaccagctcctggccgaccatggacataatcctctcatgaaaaaagtttttgatgtctacctgtgttttcttcaaaaacatcagtctgaaacggctttaaaaaatgtcttcactgccttaaggtccttaatttataagtttccctcaacattctatgaagggagagcggacatgtgtgcggctctgtgttacgagattctcaagtgctgtaactccaagctgagctccatcaggacggaggcctcccagctgctctacttcctgatgaggaacaactttgattacactggaaagaagtcctttgtccggacacatttgcaagtcatcatatctgtcagccagctgatagcagacgttgttggcattgggggaaccagattccagcagtccctgtccatcatcaacaactgtgccaacagtgaccggcttattaagcacaccagcttctcctctgatgtgaaggacttaaccaaaaggatacgcacggtgctaatggccaccgcccagatgaaggagcatgagaacgacccagagatgctggtggacctccagtacagcctggccaaatcctatgccagcacgcccgagctcaggaagacgtggctcgacagcatggccaggatccatgtcaaaaatggcgatctctcagaggcagcaatgtgctatgtccacgtaacagccctagtggcagaatatctcacacggaaagaagcagtccagtgggagccgccccttctcccccacagccatagcgcctgcctgaggaggagccggggaggcgtgtttagacaaggatgcaccgccttcagggtcattaccccaaacatcgacgaggaggcctccatgatggaagacgtggggatgcaggatgtccatttcaacgaggatgtgctgatggagctccttgagcagtgcgcagatggactctggaaagccgagcgctacgagctcatcgccgacatctacaaacttatcatccccatttatgagaagcggagggattttgagaggctggcccatctgtatgacacgctgcaccgggcctacagcaaagtgaccgaggtcatgcactcgggccgcaggcttctggggacctacttccgggtagccttcttcgggcaggcagcgcaataccagtttacagacagtgaaacagatgtggagggattctttgaagatgaagatggaaaggagtatatttacaaggaacccaaactcacaccgctgtcggaaatttctcagagactccttaaactgtactcggataaatttggttctgaaaatgtcaaaatgatacaggattctggcaaggtcaaccctaaggatctggattctaagtatgcatacatccaggtgactcacgtcatccccttctttgacgaaaaagagttgcaagaaaggaaaacagagtttgagagatcccacaacatccgccgcttcatgtttgagatgccatttacgcagaccgggaagaggcagggcggggtggaagagcagtgcaaacggcgcaccatcctgacagccatacactgcttcccttatgtgaagaagcgcatccctgtcatgtaccagcaccacactgacctgaaccccatcgaggtggccattgacgagatgagtaagaaggtggcggagctccggcagctgtgctcctcggccgaggtggacatgatcaaactgcagctcaaactccagggcagcgtgagtgttcaggtcaatgctggcccactagcatatgcgcgagctttcttagatgatacaaacacaaagcgatatcctgacaataaagtgaagctgcttaaggaagttttcaggcaatttgtggaagcttgcggtcaagccttagcggtaaacgaacgtctgattaaagaagaccagctcgagtatcaggaagaaatgaaagccaactacagggaaatggcgaaggagctttctgaaatcatgcatgagcagctgggatgatctgccccctggaggagaagacgagcgtcttaccgaattcccttcacatcttcaacgccatcagtgggactccaacaagcacaatggttcacgggatgaccagctcgtcttcggtcgtgtgattacatctcatggcccgtgtgtggggacttgctttgtcatttgcaaactcaggatgctttccaaagccaatcactggggagaccgagcacagggaggaccaaggggaaggggagagaaaggaaataaagaacaacgttatttcttaacagactttctataggagttgtaagaaggtgcacatatttttttaaatctcactggcaatattcaaagttttcattgtgtcttaacaaaggtgtggtagacactcttgagctggacttagattttattcttccttgcagagtagtgttagaatagatggcctacagaaaaaaaaggttctgggatctacatggcagggagggctgcactgacattgatgcctgggggaccttttgcctcgaggctgagctggaaaatcttgaaaatattttttttttcctgtggcacattcaggttgaatacaagaactatttttgtgactagtttttgatgacctaagggaactgaccattgtaatttttgtaccagtgaaccaggagatttagtgcttttatattcatttccttgcatttaagaaaatatgaaagcttaaggaattatgtgagcttaaaactagtcaagcagtttagaaccaaaggcctatattaataaccgcaactatgctgaaaagtacaaagtagtacagtatattgttatgtacatatcattgttaatacagtcctggcattctgtacatatatgtattacatttctacatttttaatactcacatgggcttatgcattaagtttaattgtgataaatttgtgctgttccagtatatgcaatacactttaatgttttattcttgtacataaaaatgtgcaatatggagatgtatacagtctttactatattaggtttataaacagttttaagaatttcatccttttgccaaaatggtggagtatgtaattggtaaatcataaatcctgtggtgaatggtggtgtactttaaagctgtcaccatgttatattttcttttaagactttaatttagtaattttatatttgggaaaataaaggtttttaattttatttaactggaatcactgccctgctgtaattaaacattctgtaccacatctgtattaaaaagacattgctgaccatt

SEQ ID NO: 125876 - DNA, 3147 bp, Homo sapiens
  Payload ID: 4658
  Gene Symbol: DOCK9
  Gene Name: dedicator of cytokinesis 9
  ENST ID: ENST00000400228
  CDS Start-End: 1-2008
ttttaagaaccagctcctggccgaccatggacataatcctctcatgaaaaaagtttttgatgtctacctgtgttttcttcaaaaacatcagtctgaaacggctttaaaaaatgtcttcactgccttaaggtccttaatttataagtttccctcaacattctatgaagggagagcggacatgtgtgcggctctgtgttacgagattctcaagtgctgtaactccaagctgagctccatcaggacggaggcctcccagctgctctacttcctgatgaggaacaactttgattacactggaaagaagtcctttgtccggacacatttgcaagtcatcatatctgtcagccagctgatagcagacgttgttggcattgggggaaccagattccagcagtccctgtccatcatcaacaactgtgccaacagtgaccggcttattaagcacaccagcttctcctctgatgtgaaggacttaaccaaaaggatacgcacggtgctaatggccaccgcccagatgaaggagcatgagaacgacccagagatgctggtggacctccagtacagcctggccaaatcctatgccagcacgcccgagctcaggaagacgtggctcgacagcatggccaggatccatgtcaaaaatggcgatctctcagaggcagcaatgtgctatgtccacgtaacagccctagtggcagaatatctcacacggaaaggcgtgtttagacaaggatgcaccgccttcagggtcattaccccaaacatcgacgaggaggcctccatgatggaagacgtggggatgcaggatgtccatttcaacgaggatgtgctgatggagctccttgagcagtgcgcagatggactctggaaagccgagcgctacgagctcatcgccgacatctacaaacttatcatccccatttatgagaagcggagggattttgagaggctggcccatctgtatgacacgctgcaccgggcctacagcaaagtgaccgaggtcatgcactcgggccgcaggcttctggggacctacttccgggtagccttcttcgggcagcaataccagtttacagacagtgaaacagatgtggagggattctttgaagatgaagatggaaaggagtatatttacaaggaacccaaactcacaccgctgtcggaaatttctcagagactccttaaactgtactcggataaatttggttctgaaaatgtcaaaatgatacaggattctggcaaggtcaaccctaaggatctggattctaagtatgcatacatccaggtgactcacgtcatccccttctttgacgaaaaagagttgcaagaaaggaaaacagagtttgagagatcccacaacatccgccgcttcatgtttgagatgccatttacgcagaccgggaagaggcagggcggggtggaagagcagtgcaaacggcgcaccatcctgacagccatacactgcttcccttatgtgaagaagcgcatccctgtcatgtaccagcaccacactgacctgaaccccatcgaggtggccattgacgagatgagtaagaaggtggcggagctccggcagctgtgctcctcggccgaggtggacatgatcaaactgcagctcaaactccagggcagcgtgagtgttcaggtcaatgctggcccactagcatatgcgcgagctttcttagatgatacaaacacaaagcgatatcctgacaataaagtgaagctgcttaaggaagttttcaggcaatttgtggaagcttgcggtcaagccttagcggtaaacgaacgtctgattaaagaagaccagctcgagtatcaggaagaaatgaaagccaactacagggaaatggcgaaggagctttctgaaatcatgcatgagcagatctgccccctggaggagaagacgagcgtcttaccgaattcccttcacatcttcaacgccatcagtgggactccaacaagcacaatggttcacgggatgaccagctcgtcttcggtcgtgtgattacatctcatggcccgtgtgtggggacttgctttgtcatttgcaaactcaggatgctttccaaagccaatcactggggagaccgagcacagggaggaccaaggggaaggggagagaaaggaaataaagaacaacgttatttcttaacagactttctataggagttgtaagaaggtgcacatatttttttaaatctcactggcaatattcaaagttttcattgtgtcttaacaaaggtgtggtagacactcttgagctggacttagattttattcttccttgcagagtagtgttagaatagatggcctacagaaaaaaaaggttctgggatctacatggcagggagggctgcactgacattgatgcctgggggaccttttgcctcgaggctgagctggaaaatcttgaaaatattttttttttcctgtggcacattcaggttgaatacaagaactatttttgtgactagtttttgatgacctaagggaactgaccattgtaatttttgtaccagtgaaccaggagatttagtgcttttatattcatttccttgcatttaagaaaatatgaaagcttaaggaattatgtgagcttaaaactagtcaagcagtttagaaccaaaggcctatattaataaccgcaactatgctgaaaagtacaaagtagtacagtatattgttatgtacatatcattgttaatacagtcctggcattctgtacatatatgtattacatttctacatttttaatactcacatgggcttatgcattaagtttaattgtgataaatttgtgctgttccagtatatgcaatacactttaatgttttattcttgtacataaaaatgtgcaatatggagatgtatacagtctttactatattaggtttataaacagttttaagaatttcatccttttgccaaaatggtggagtatgtaattggtaaatcataaatcctgtggtgaatggtggtgtactttaaagctgtcaccatgttatattttcttttaagactttaatttagtaattttatatttgggaaaataaaggtttttaattttatttaactggaatcactgccctgctgtaattaaacattctgtaccacatctgtattaaaaagacattgctgaccatt

SEQ ID NO: 125877 - DNA, 1169 bp, Homo sapiens
  Payload ID: 4658
  Gene Symbol: DOCK9
  Gene Name: dedicator of cytokinesis 9
  ENST ID: ENST00000419908
  CDS Start-End: 1-1169
cccagatgaaggagcatgagaacgacccagagatgctggtggacctccagtacagcctggccaaatcctatgccagcacgcccgagctcaggaagacgtggctcgacagcatggccaggatccatgtcaaaaatggcgatctctcagaggcagcaatgtgctatgtccacgtaacagccctagtggcagaatatctcacacggaaagaagcagtccagtgggagccgccccttctcccccacagccatagcgcctgcctgaggaggagccggggaggcgtgtttagacaaggatgcaccgccttcagggtcattaccccaaacatcgacgaggaggcctccatgatggaagacgtggggatgcaggatgtccatttcaacgaggatgtgctgatggagctccttgagcagtgcgcagatggactctggaaagccgagcgctacgagctcatcgccgacatctacaaacttatcatccccatttatgagaagcggagggattttgagaggctggcccatctgtatgacacgctgcaccgggcctacagcaaagtgaccgaggtcatgcactcgggccgcaggcttctggggacctacttccgggtagccttcttcgggcagggattctttgaagatgaagatggaaaggagtatatttacaaggaacccaaactcacaccgctgtcggaaatttctcagagactccttaaactgtactcggataaatttggttctgaaaatgtcaaaatgatacaggattctggcaaggtcaaccctaaggatctggattctaagtatgcatacatccaggtgactcacgtcatccccttctttgacgaaaaagagttgcaagaaaggaaaacagagtttgagagatcccacaacatccgccgcttcatgtttgagatgccatttacgcagaccgggaagaggcagggcggggtggaagagcagtgcaaacggcgcaccatcctgacagccatacactgcttcccttatgtgaagaagcgcatccctgtcatgtaccagcaccacactgacctgaaccccatcgaggtggccattgacgagatgagtaagaaggtggcggagctccggcagctgtgctcctcggccgaggtggacatgatcaaactgcagctcaaactccagggcagcgtgagtgttcag

SEQ ID NO: 125878 - DNA, 348 bp, Homo sapiens
  Payload ID: 4658
  Gene Symbol: DOCK9
  Gene Name: dedicator of cytokinesis 9
  ENST ID: ENST00000450257
  CDS Start-End: 1-348
catctgaacttatggatttttttacaatatctgaagtctgcctgcaccagttccagtacatggggaagcgatacatagccaggaaccaggaggggttgggacccatagttcatgatcgaaagtctcagacattgcctgtttcccgtaacagaacaggaatgatgcatgccagattgcagcagctgggcagcctggataactctctcacttttaaccacagctatggccactcggacgcagatgttctgcaccagtcattacttgaagccaacattgctactgaggtttgcctgacagctctggacacgctttctctatttacattggcgtttaagaaccagctcctgg

SEQ ID NO: 125879 - DNA, 7457 bp, Homo sapiens
  Payload ID: 4658
  Gene Symbol: DOCK9
  Gene Name: dedicator of cytokinesis 9
  ENST ID: ENST00000448493
  CDS Start-End: 56-6295
gcggccgggccgggccgcgggagcaggcggaggcggaggcggcgggggcaggaggatgtcgcagccgccgctgctccccgcctcggcggagactcggaagttcacccgggcgctgagtaagccgggcacggcggccgagctgcggcagagcgtgtctgaggtggtgcgcggctccgtgctcctggcaaagccaaagctaattgagccactcgactatgaaaatgtcatcgtccagaagaagactcagatcctgaacgactgtttacgggagatgctgctcttcccttacgatgactttcagacggccatcctgagacgacagggtcgatacatatgctcaacagtgcctgcgaaggcggaagaggaagcacagagcttgtttgttacagagtgcatcaaaacctataactctgactggcatcttgtgaactataaatatgaagattactcaggagagtttcgacagcttccgaacaaagtggtcaagttggataaacttccagttcatgtctatgaagttgacgaggaggtcgacaaagatgaggatgctgcctcccttggttcccagaagggtgggatcaccaagcatggctggctgtacaaaggcaacatgaacagtgccatcagcgtgaccatgaggtcatttaagagacgatttttccacctgattcaacttggcgatggatcctataatttgaatttttataaagatgaaaagatctccaaagaaccaaaaggatcaatatttctggattcctgtatgggtgtcgttcagaacaacaaagtcaggcgttttgcttttgagctcaagatgcaggacaaaagtagttatctcttggcagcagacagtgaagtggaaatggaagaatggatcacaattctaaataagatcctccagctcaactttgaagctgcaatgcaagaaaagcgaaatggcgactctcacgaagatgatgaacaaagcaaattggaaggttctggttccggtttagatagctacctgccggaacttgccaagagtgcaagagaagcagaaatcaaactgaaaagtgaaagcagagtcaaacttttttatttggacccagatgcccagaagcttgacttctcatcagctgagccagaagtgaagtcatttgaagagaagtttggaaaaaggatccttgtcaagtgcaatgatttatctttcaatttgcaatgctgtgttgccgaaaatgaagaaggacccactacaaatgttgaacctttctttgttactctatccctgtttgacataaaatacaaccggaagatttctgccgatttccacgtagacctgaaccatttctcagtgaggcaaatgctcgccaccacgtccccggcgctgatgaatggcagtgggcagagcccatctgtcctcaagggcatccttcatgaagccgccatgcagtatccgaagcagggaatattttcagtcacttgtcctcatccagatatatttcttgtggccagaattgaaaaagtccttcaggggagcatcacacattgcgctgagccatatatgaaaagttcagactcttctaaggtggcccagaaggtgctgaagaatgccaagcaggcatgccaaagactaggacagtatagaatgccatttgcttgggcagcaaggacattgtttaaggatgcatctggaaatcttgacaaaaatgccagattttctgccatctacaggcaagacagcaataagctatccaatgatgacatgctcaagttacttgcagactttcggaaacctgagaagatggctaagctcccagtgattttaggcaatctagacattacaattgataatgtttcctcagacttccctaattatgttaattcatcatacattcccacaaaacaatttgaaacctgcagtaaaactcccatcacgtttgaagtggaggaatttgtgccctgcataccaaaacacactcagccttacaccatctacaccaatcacctttacgtttatcctaagtacttgaaatacgacagtcagaagtcttttgccaaggctagaaatattgcgatttgcattgaattcaaagattcagatgaggaagactctcagccccttaagtgcatttatggcagacctggtgggccagttttcacaagaagcgcctttgctgcagttttacaccatcaccaaaacccagaattttatgatgagattaaaatagagttgcccactcagctgcatgaaaagcaccacctgttgctcacattcttccatgtcagctgtgacaactcaagtaaaggaagcacgaagaagagggatgtcgttgaaacccaagttggctactcctggcttcccctcctgaaagacggaagggtggtgacaagcgagcagcacatcccggtctcggcgaaccttccttcgggctatcttggctaccaggagcttgggatgggcaggcattatggtccggaaattaaatgggtagatggaggcaagccactgctgaaaatttccactcatctggtttctacagtgtatactcaggatcagcatttacataattttttccagtactgtcagaaaaccgaatctggagcccaagccttaggaaacgaacttgtaaagtaccttaagagtctgcatgcgatggaaggccacgtgatgatcgccttcttgcccactatcctaaaccagctgttccgagtcctcaccagagccacacaggaagaagtcgcggttaacgtgactcgggtcattattcatgtggttgcccagtgccatgaggaaggattggagagccacttgaggtcatatgttaagtacgcgtataaggctgagccatatgttgcctctgaatacaagacagtgcatgaagaactgaccaaatccatgaccacgattctcaagccttctgccgatttcctcaccagcaacaaactactgaagtactcatggtttttctttgatgtactgatcaaatctatggctcagcatttgatagagaactccaaagttaagttgctgcgaaaccagagatttcctgcatcctatcatcatgcagtggaaaccgttgtaaatatgctgatgccacacatcactcagaagtttcgagataatccagaggcatctaagaacgcgaatcatagccttgctgtcttcatcaagagatgtttcaccttcatggacaggggctttgtcttcaagcagatcaacaactacattagctgttttgctcctggagacccaaagaccctctttgaatacaagtttgaatttctccgtgtagtgtgcaaccatgaacattatattccgttgaacttaccaatgccatttggaaaaggcaggattcaaagataccaagacctccagcttgactactcattaacagatgagttctgcagaaaccacttcttggtgggactgttactgagggaggtggggacagccctccaggagttccgggaggtccgtctgatcgccatcagtgtgctcaagaacctgctgataaagcattcttttgatgacagatatgcttcaaggagccatcaggcaaggatagccaccctctacctgcctctgtttggtctgctgattgaaaacgtccagcggatcaatgtgagggatgtgtcacccttccctgtgaacgcgggcatgactgtgaaggatgaatccctggctctaccagctgtgaatccgctggtgacgccgcagaagggaagcaccctggacaacagcctgcacaaggacctgctgggcgccatctccggcattgcttctccatatacaacctcaactccaaacatcaacagtgtgagaaatgctgattcgagaggatctctcataagcacagattcgggtaacagccttccagaaaggaatagtgagaagagcaattccctggataagcaccaacaaagtagcacattgggaaattccgtggttcgctgtgataaacttgaccagtctgagattaagagcctactgatgtgtttcctctacatcttaaagagcatgtctgatgatgctttgtttacatattggaacaaggcttcaacatctgaacttatggatttttttacaatatctgaagtctgcctgcaccagttccagtacatggggaagcgatacatagccagaacaggaatgatgcatgccagattgcagcagctgggcagcctggataactctctcacttttaaccacagctatggccactcggacgcagatgttctgcaccagtcattacttgaagccaacattgctactgaggtttgcctgacagctctggacacgctttctctatttacattggcgtttaagaaccagctcctggccgaccatggacataatcctctcatgaaaaaagtttttgatgtctacctgtgttttcttcaaaaacatcagtctgaaacggctttaaaaaatgtcttcactgccttaaggtccttaatttataagtttccctcaacattctatgaagggagagcggacatgtgtgcggctctgtgttacgagattctcaagtgctgtaactccaagctgagctccatcaggacggaggcctcccagctgctctacttcctgatgaggaacaactttgattacactggaaagaagtcctttgtccggacacatttgcaagtcatcatatctgtcagccagctgatagcagacgttgttggcattgggggaaccagattccagcagtccctgtccatcatcaacaactgtgccaacagtgaccggcttattaagcacaccagcttctcctctgatgtgaaggacttaaccaaaaggatacgcacggtgctaatggccaccgcccagatgaaggagcatgagaacgacccagagatgctggtggacctccagtacagcctggccaaatcctatgccagcacgcccgagctcaggaagacgtggctcgacagcatggccaggatccatgtcaaaaatggcgatctctcagaggcagcaatgtgctatgtccacgtaacagccctagtggcagaatatctcacacggaaaggcgtgtttagacaaggatgcaccgccttcagggtcattaccccaaacatcgacgaggaggcctccatgatggaagacgtggggatgcaggatgtccatttcaacgaggatgtgctgatggagctccttgagcagtgcgcagatggactctggaaagccgagcgctacgagctcatcgccgacatctacaaacttatcatccccatttatgagaagcggagggattttgagaggctggcccatctgtatgacacgctgcaccgggcctacagcaaagtgaccgaggtcatgcactcgggccgcaggcttctggggacctacttccgggtagccttcttcgggcaggcagcgcaataccagtttacagacagtgaaacagatgtggagggattctttgaagatgaagatggaaaggagtatatttacaaggaacccaaactcacaccgctgtcggaaatttctcagagactccttaaactgtactcggataaatttggttctgaaaatgtcaaaatgatacaggattctggcaaggtcaaccctaaggatctggattctaagtatgcatacatccaggtgactcacgtcatccccttctttgacgaaaaagagttgcaagaaaggaaaacagagtttgagagatcccacaacatccgccgcttcatgtttgagatgccatttacgcagaccgggaagaggcagggcggggtggaagagcagtgcaaacggcgcaccatcctgacagccatacactgcttcccttatgtgaagaagcgcatccctgtcatgtaccagcaccacactgacctgaaccccatcgaggtggccattgacgagatgagtaagaaggtggcggagctccggcagctgtgctcctcggccgaggtggacatgatcaaactgcagctcaaactccagggcagcgtgagtgttcaggtcaatgctggcccactagcatatgcgcgagctttcttagatgatacaaacacaaagcgatatcctgacaataaagtgaagctgcttaaggaagttttcaggcaatttgtggaagcttgcggtcaagccttagcggtaaacgaacgtctgattaaagaagaccagctcgagtatcaggaagaaatgaaagccaactacagggaaatggcgaaggagctttctgaaatcatgcatgagcaggtgagaagatctgccccctggaggagaagacgagcgtcttaccgaattcccttcacatcttcaacgccatcagtgggactccaacaagcacaatggttcacgggatgaccagctcgtcttcggtcgtgtgattacatctcatggcccgtgtgtggggacttgctttgtcatttgcaaactcaggatgctttccaaagccaatcactggggagaccgagcacagggaggaccaaggggaaggggagagaaaggaaataaagaacaacgttatttcttaacagactttctataggagttgtaagaaggtgcacatatttttttaaatctcactggcaatattcaaagttttcattgtgtcttaacaaaggtgtggtagacactcttgagctggacttagattttattcttccttgcagagtagtgttagaatagatggcctacagaaaaaaaaggttctgggatctacatggcagggagggctgcactgacattgatgcctgggggaccttttgcctcgaggctgagctggaaaatcttgaaaatattttttttttcctgtggcacattcaggttgaatacaagaactatttttgtgactagtttttgatgacctaagggaactgaccattgtaatttttgtaccagtgaaccaggagatttagtgcttttatattcatttccttgcatttaagaaaatatgaaagcttaaggaattatgtgagcttaaaactagtcaagcagtttagaaccaaaggcctatattaataaccgcaactatgctgaaaagtacaaagtagtacagtatattgttatgtacatatcattgttaatacagtcctggcattctgtacatatatgtattacatttctacatttttaatactcacatgggcttatgcattaagtttaattgtgataaatttgtgctgttccagtatatgcaatacactttaatgttttattcttgtacataaaaatgtgcaatatggagatgtatacagtctttactatattaggtttataaacagttttaagaatttcatccttttgccaaaatggtggagtatgtaattggtaaatcataaatcctgtggtgaatggtggtgtactttaaagctgtcaccatgttatattttcttttaagactttaatttagtaattttatatttgggaaaataaaggtttttaattttatttaactggaatcactgccctgctgtaattaaacattctgtaccacatctgtattaaaaagacattgctgaccatt

SEQ ID NO: 125880 - DNA, 750 bp, Homo sapiens
  Payload ID: 4658
  Gene Symbol: DOCK9
  Gene Name: dedicator of cytokinesis 9
  ENST ID: ENST00000449796
  CDS Start-End: 1-750
gctgattcgagaggatctctcataagcacagattcgggtaacagccttccagaaaggaatagtgagaagagcaattccctggataagcaccaacaaagtagcacattgggaaattccgtggttcgctgtgataaacttgaccagtctgagattaagagcctactgatgtgtttcctctacatcttaaagagcatgtctgatgatgctttgtttacatattggaacaaggcttcaacatctgaacttatggatttttttacaatatctgaagtctgcctgcaccagttccagtacatggggaagcgatacatagccagtgtgagaaagatatcaagtgtgcttggaatttctgtagacaatggctatggccactcggacgcagatgttctgcaccagtcattacttgaagccaacattgctactgaggtttgcctgacagctctggacacgctttctctatttacattggcgtttaagaaccagctcctggccgaccatggacataatcctctcatgaaaaaagtttttgatgtctacctgtgttttcttcaaaaacatcagtctgaaacggctttaaaaaatgtcttcactgccttaaggtccttaatttataagtttccctcaacattctatgaagggagagcggacatgtgtgcggctctgtgttacgagattctcaagtgctgtaactccaagctgagctccatcaggacggaggcctcccagctgctctacttcctgatgaggaac

SEQ ID NO: 125881 - DNA, 7643 bp, Homo sapiens
  Payload ID: 4658
  Gene Symbol: DOCK9
  Gene Name: dedicator of cytokinesis 9
  ENST ID: ENST00000442173
  CDS Start-End: 176-6481
gtcatgccttcccaccccacaggctctgcagacccagccagcggggctgaccacttgtgcctgggaagccagtttcctttccttccttggaccactggcatgcctgtgccttgcacggccagggactcgcagctgttccagttgcagactttctgacttgcgttttcagccgagaatgcaggctgataaatgcaggacaagtagtagaagtgtcaaaaaggaactggtgattgagtcccccctgcaatacaaggatgcagctcagggcgaagtggaagcagagagcccgggccctgtgccggcaaagccaaagctaattgagccactcgactatgaaaatgtcatcgtccagaagaagactcagatcctgaacgactgtttacgggagatgctgctcttcccttacgatgactttcagacggccatcctgagacgacagggtcgatacatatgctcaacagtgcctgcgaaggcggaagaggaagcacagagcttgtttgttacagagtgcatcaaaacctataactctgactggcatcttgtgaactataaatatgaagattactcaggagagtttcgacagcttccgaacaaagtggtcaagttggataaacttccagttcatgtctatgaagttgacgaggaggtcgacaaagatgaggatgctgcctcccttggttcccagaagggtgggatcaccaagcatggctggctgtacaaaggcaacatgaacagtgccatcagcgtgaccatgaggtcatttaagagacgatttttccacctgattcaacttggcgatggatcctataatttgaatttttataaagatgaaaagatctccaaagaaccaaaaggatcaatatttctggattcctgtatgggtgtcgttcagaacaacaaagtcaggcgttttgcttttgagctcaagatgcaggacaaaagtagttatctcttggcagcagacagtgaagtggaaatggaagaatggatcacaattctaaataagatcctccagctcaactttgaagctgcaatgcaagaaaagcgaaatggcgactctcacgaagatgatgaacaaagcaaattggaaggttctggttccggtttagatagctacctgccggaacttgccaagagtgcaagagaagcagaaatcaaactgaaaagtgaaagcagagtcaaacttttttatttggacccagatgcccagaagcttgacttctcatcagctgagccagaagtgaagtcatttgaagagaagtttggaaaaaggatccttgtcaagtgcaatgatttatctttcaatttgcaatgctgtgttgccgaaaatgaagaaggacccactacaaatgttgaacctttctttgttactctatccctgtttgacataaaatacaaccggaagatttctgccgatttccacgtagacctgaaccatttctcagtgaggcaaatgctcgccaccacgtccccggcgctgatgaatggcagtgggcagagcccatctgtcctcaagggcatccttcatgaagccgccatgcagtatccgaagcagggaatattttcagtcacttgtcctcatccagatatatttcttgtggccagaattgaaaaagtccttcaggggagcatcacacattgcgctgagccatatatgaaaagttcagactcttctaaggtggcccagaaggtgctgaagaatgccaagcaggcatgccaaagactaggacagtatagaatgccatttgcttgggcagcaaggacattgtttaaggatgcatctggaaatcttgacaaaaatgccagattttctgccatctacaggcaagacagcaataagctatccaatgatgacatgctcaagttacttgcagactttcggaaacctgagaagatggctaagctcccagtgattttaggcaatctagacattacaattgataatgtttcctcagacttccctaattatgttaattcatcatacattcccacaaaacaatttgaaacctgcagtaaaactcccatcacgtttgaagtggaggaatttgtgccctgcataccaaaacacactcagccttacaccatctacaccaatcacctttacgtttatcctaagtacttgaaatacgacagtcagaagtcttttgccaaggctagaaatattgcgatttgcattgaattcaaagattcagatgaggaagactctcagccccttaagtgcatttatggcagacctggtgggccagttttcacaagaagcgcctttgctgcagttttacaccatcaccaaaacccagaattttatgatgagattaaaatagagttgcccactcagctgcatgaaaagcaccacctgttgctcacattcttccatgtcagctgtgacaactcaagtaaaggaagcacgaagaagagggatgtcgttgaaacccaagttggctactcctggcttcccctcctgaaagacggaagggtggtgacaagcgagcagcacatcccggtctcggcgaaccttccttcgggctatcttggctaccaggagcttgggatgggcaggcattatggtccggaaattaaatgggtagatggaggcaagccactgctgaaaatttccactcatctggtttctacagtgtatactcaggatcagcatttacataattttttccagtactgtcagaaaaccgaatctggagcccaagccttaggaaacgaacttgtaaagtaccttaagagtctgcatgcgatggaaggccacgtgatgatcgccttcttgcccactatcctaaaccagctgttccgagtcctcaccagagccacacaggaagaagtcgcggttaacgtgactcgggtcattattcatgtggttgcccagtgccatgaggaaggattggagagccacttgaggtcatatgttaagtacgcgtataaggctgagccatatgttgcctctgaatacaagacagtgcatgaagaactgaccaaatccatgaccacgattctcaagccttctgccgatttcctcaccagcaacaaactactgaagtactcatggtttttctttgatgtactgatcaaatctatggctcagcatttgatagagaactccaaagttaagttgctgcgaaaccagagatttcctgcatcctatcatcatgcagtggaaaccgttgtaaatatgctgatgccacacatcactcagaagtttcgagataatccagaggcatctaagaacgcgaatcatagccttgctgtcttcatcaagagatgtttcaccttcatggacaggggctttgtcttcaagcagatcaacaactacattagctgttttgctcctggagacccaaagaccctctttgaatacaagtttgaatttctccgtgtagtgtgcaaccatgaacattatattccgttgaacttaccaatgccatttggaaaaggcaggattcaaagataccaagacctccagcttgactactcattaacagatgagttctgcagaaaccacttcttggtgggactgttactgagggaggtggggacagccctccaggagttccgggaggtccgtctgatcgccatcagtgtgctcaagaacctgctgataaagcattcttttgatgacagatatgcttcaaggagccatcaggcaaggatagccaccctctacctgcctctgtttggtctgctgattgaaaacgtccagcggatcaatgtgagggatgtgtcacccttccctgtgaacgcgggcatgactgtgaaggatgaatccctggctctaccagctgtgaatccgctggtgacgccgcagaagggaagcaccctggacaacagcctgcacaaggacctgctgggcgccatctccggcattgcttctccatatacaacctcaactccaaacatcaacagtgtgagaaatgctgattcgagaggatctctcataagcacagattcgggtaacagccttccagaaaggaatagtgagaagagcaattccctggataagcaccaacaaagtagcacattgggaaattccgtggttcgctgtgataaacttgaccagtctgagattaagagcctactgatgtgtttcctctacatcttaaagagcatgtctgatgatgctttgtttacatattggaacaaggcttcaacatctgaacttatggatttttttacaatatctgaagtctgcctgcaccagttccagtacatggggaagcgatacatagccagaacaggaatgatgcatgccagattgcagcagctgggcagcctggataactctctcacttttaaccacagctatggccactcggacgcagatgttctgcaccagtcattacttgaagccaacattgctactgaggtttgcctgacagctctggacacgctttctctatttacattggcgtttaagaaccagctcctggccgaccatggacataatcctctcatgaaaaaagtttttgatgtctacctgtgttttcttcaaaaacatcagtctgaaacggctttaaaaaatgtcttcactgccttaaggtccttaatttataagtttccctcaacattctatgaagggagagcggacatgtgtgcggctctgtgttacgagattctcaagtgctgtaactccaagctgagctccatcaggacggaggcctcccagctgctctacttcctgatgaggaacaactttgattacactggaaagaagtcctttgtccggacacatttgcaagtcatcatatctgtcagccagctgatagcagacgttgttggcattgggggaaccagattccagcagtccctgtccatcatcaacaactgtgccaacagtgaccggcttattaagcacaccagcttctcctctgatgtgaaggacttaaccaaaaggatacgcacggtgctaatggccaccgcccagatgaaggagcatgagaacgacccagagatgctggtggacctccagtacagcctggccaaatcctatgccagcacgcccgagctcaggaagacgtggctcgacagcatggccaggatccatgtcaaaaatggcgatctctcagaggcagcaatgtgctatgtccacgtaacagccctagtggcagaatatctcacacggaaagaagcagtccagtgggagccgccccttctcccccacagccatagcgcctgcctgaggaggagccggggaggcgtgtttagacaaggatgcaccgccttcagggtcattaccccaaacatcgacgaggaggcctccatgatggaagacgtggggatgcaggatgtccatttcaacgaggatgtgctgatggagctccttgagcagtgcgcagatggactctggaaagccgagcgctacgagctcatcgccgacatctacaaacttatcatccccatttatgagaagcggagggattttgagaggctggcccatctgtatgacacgctgcaccgggcctacagcaaagtgaccgaggtcatgcactcgggccgcaggcttctggggacctacttccgggtagccttcttcgggcaggcagcgcaataccagtttacagacagtgaaacagatgtggagggattctttgaagatgaagatggaaaggagtatatttacaaggaacccaaactcacaccgctgtcggaaatttctcagagactccttaaactgtactcggataaatttggttctgaaaatgtcaaaatgatacaggattctggcaaggtcaaccctaaggatctggattctaagtatgcatacatccaggtgactcacgtcatccccttctttgacgaaaaagagttgcaagaaaggaaaacagagtttgagagatcccacaacatccgccgcttcatgtttgagatgccatttacgcagaccgggaagaggcagggcggggtggaagagcagtgcaaacggcgcaccatcctgacagccatacactgcttcccttatgtgaagaagcgcatccctgtcatgtaccagcaccacactgacctgaaccccatcgaggtggccattgacgagatgagtaagaaggtggcggagctccggcagctgtgctcctcggccgaggtggacatgatcaaactgcagctcaaactccagggcagcgtgagtgttcaggtcaatgctggcccactagcatatgcgcgagctttcttagatgatacaaacacaaagcgatatcctgacaataaagtgaagctgcttaaggaagttttcaggcaatttgtggaagcttgcggtcaagccttagcggtaaacgaacgtctgattaaagaagaccagctcgagtatcaggaagaaatgaaagccaactacagggaaatggcgaaggagctttctgaaatcatgcatgagcaggtgagaagatctgccccctggaggagaagacgagcgtcttaccgaattcccttcacatcttcaacgccatcagtgggactccaacaagcacaatggttcacgggatgaccagctcgtcttcggtcgtgtgattacatctcatggcccgtgtgtggggacttgctttgtcatttgcaaactcaggatgctttccaaagccaatcactggggagaccgagcacagggaggaccaaggggaaggggagagaaaggaaataaagaacaacgttatttcttaacagactttctataggagttgtaagaaggtgcacatatttttttaaatctcactggcaatattcaaagttttcattgtgtcttaacaaaggtgtggtagacactcttgagctggacttagattttattcttccttgcagagtagtgttagaatagatggcctacagaaaaaaaaggttctgggatctacatggcagggagggctgcactgacattgatgcctgggggaccttttgcctcgaggctgagctggaaaatcttgaaaatattttttttttcctgtggcacattcaggttgaatacaagaactatttttgtgactagtttttgatgacctaagggaactgaccattgtaatttttgtaccagtgaaccaggagatttagtgcttttatattcatttccttgcatttaagaaaatatgaaagcttaaggaattatgtgagcttaaaactagtcaagcagtttagaaccaaaggcctatattaataaccgcaactatgctgaaaagtacaaagtagtacagtatattgttatgtacatatcattgttaatacagtcctggcattctgtacatatatgtattacatttctacatttttaatactcacatgggcttatgcattaagtttaattgtgataaatttgtgctgttccagtatatgcaatacactttaatgttttattcttgtacataaaaatgtgcaatatggagatgtatacagtctttactatattaggtttataaacagttttaagaatttcatccttttgccaaaatggtggagtatgtaattggtaaatcataaatcctgtggtgaatggtggtgtactttaaagctgtcaccatgttatattttcttttaagactttaatttagtaattttatatttgggaaaataaaggtttttaattttatttaactggaatcactgccctgctgtaattaaacattctgtaccacatctgtattaaaaagacattgctgaccatt

SEQ ID NO: 125882 - DNA, 609 bp, Homo sapiens
  Payload ID: 4658
  Gene Symbol: DOCK9
  Gene Name: dedicator of cytokinesis 9
  ENST ID: ENST00000451563
  CDS Start-End: 1-609
aggaagacgtggctcgacagcatggccaggatccatgtcaaaaatggcgatctctcagaggcagcaatgtgctatgtccacgtaacagccctagtggcagaatatctcacacggaaaggcgtgtttagacaaggatgcaccgccttcagggtcattaccccaaacatcgacgaggaggcctccatgatggaagacgtggggatgcaggatgtccatttcaacgaggatgtgctgatggagctccttgagcagtgcgcagatggactctggaaagccgagcgctacgagctcatcgccgacatctacaaacttatcatccccatttatgagaagcggagggattttgagaggctggcccatctgtatgacacgctgcaccgggcctacagcaaagtgaccgaggtcatgcactcgggccgcaggcttctggggacctacttccgggtagccttcttcgggcagggattctttgaagatgaagatggaaaggagtatatttacaaggaacccaaactcacaccgctgtcggaaatttctcagagactccttaaactgtactcggataaatttggttctgaaaatgtcaaaatgatacaggattctggcaag

SEQ ID NO: 125883 - DNA, 4176 bp, Homo sapiens
  Payload ID: 4658
  Gene Symbol: DOCK9
  Gene Name: dedicator of cytokinesis 9
  ENST ID: ENST00000427887
  CDS Start-End: 275-4039
cgccacacgcacggtcgcccggagcgagcccgggcgctgctgcgatcgcggggggccgcggacgccgaggggggcgccttggggcgtgacacggtgcagagggcgcggcctgggctgcggcggccggactcgcggcgagcagcggggggagcaggcggcggcggcgccgggagcggcgggcggagcgggccgggcgccgagggcgcacctggcggccgcgcggccgggccgggccgcgggagcaggcggaggcggaggcggcgggggcaggaggatgtcgcagccgccgctgctccccgcctcggcggagactcggaagttcacccgggcgctgagtaagccgggcacggcggccgagctgcggcagagcgtgtctgaggtggtgcgcggctccgtgctcctggcaaagccaaagctaattgagccactcgactatgaaaatgtcatcgtccagaagaagactcagatcctgaacgactgtttacgggagatgctgctcttcccttacgatgactttcagacggccatcctgagacgacagggtcgatacatatgctcaacagtgcctgcgaaggcggaagaggaagcacagagcttgtttgttacagagtgcatcaaaacctataactctgactggcatcttgtgaactataaatatgaagattactcaggagagtttcgacagcttccgaacaaagtggtcaagttggataaacttccagttcatgtctatgaagttgacgaggaggtcgacaaagatgaggatgctgcctcccttggttcccagaagggtgggatcaccaagcatggctggctgtacaaaggcaacatgaacagtgccatcagcgtgaccatgaggtcatttaagagacgatttttccacctgattcaacttggcgatggatcctataatttgaatttttataaagatgaaaagatctccaaagaaccaaaaggatcaatatttctggattcctgtatgggtgtcgttcagaacaacaaagtcaggcgttttgcttttgagctcaagatgcaggacaaaagtagttatctcttggcagcagacagtgaagtggaaatggaagaatggatcacaattctaaataagatcctccagctcaactttgaagctgcaatgcaagaaaagcgaaatggcgactctcacgaagatgatgaacaaagcaaattggaaggttctggttccggtttagatagctacctgccggaacttgccaagagtgcaagagaagcagaaatcaaactgaaaagtgaaagcagagtcaaacttttttatttggacccagatgcccagaagcttgacttctcatcagctgagccagaagtgaagtcatttgaagagaagtttggaaaaaggatccttgtcaagtgcaatgatttatctttcaatttgcaatgctgtgttgccgaaaatgaagaaggacccactacaaatgttgaacctttctttgttactctatccctgtttgacataaaatacaaccggaagatttctgccgatttccacgtagacctgaaccatttctcagtgaggcaaatgctcgccaccacgtccccggcgctgatgaatggcagtgggcagagcccatctgtcctcaagggcatccttcatgaagccgccatgcagtatccgaagcagggaatattttcagtcacttgtcctcatccagatatatttcttgtggccagaattgaaaaagtccttcaggggagcatcacacattgcgctgagccatatatgaaaagttcagactcttctaaggtggcccagaaggtgctgaagaatgccaagcaggcatgccaaagactaggacagtatagaatgccatttgcttgggcagcaaggacattgtttaaggatgcatctggaaatcttgacaaaaatgccagattttctgccatctacaggcaagacagcaataagctatccaatgatgacatgctcaagttacttgcagactttcggaaacctgagaagatggctaagctcccagtgattttaggcaatctagacattacaattgataatgtttcctcagacttccctaattatgttaattcatcatacattcccacaaaacaatttgaaacctgcagtaaaactcccatcacgtttgaagtggaggaatttgtgccctgcataccaaaacacactcagccttacaccatctacaccaatcacctttacgtttatcctaagtacttgaaatacgacagtcagaagtcttttgccaaggctagaaatattgcgatttgcattgaattcaaagattcagatgaggaagactctcagccccttaagtgcatttatggcagacctggtgggccagttttcacaagaagcgcctttgctgcagttttacaccatcaccaaaacccagaattttatgatgagattaaaatagagttgcccactcagctgcatgaaaagcaccacctgttgctcacattcttccatgtcagctgtgacaactcaagtaaaggaagcacgaagaagagggatgtcgttgaaacccaagttggctactcctggcttcccctcctgaaagacggaagggtggtgacaagcgagcagcacatcccggtctcggcgaaccttccttcgggctatcttggctaccaggagcttgggatgggcaggcattatggtccggaaattaaatgggtagatggaggcaagccactgctgaaaatttccactcatctggtttctacagtgtatactcaggatcagcatttacataattttttccagtactgtcagaaaaccgaatctggagcccaagccttaggaaacgaacttgtaaagtaccttaagagtctgcatgcgatggaaggccacgtgatgatcgccttcttgcccactatcctaaaccagctgttccgagtcctcaccagagccacacaggaagaagtcgcggttaacgtgactcgggtcattattcatgtggttgcccagtgccatgaggaaggattggagagccacttgaggtcatatgttaagtacgcgtataaggctgagccatatgttgcctctgaatacaagacagtgcatgaagaactgaccaaatccatgaccacgattctcaagccttctgccgatttcctcaccagcaacaaactactgaagtactcatggtttttctttgatgtactgatcaaatctatggctcagcatttgatagagaactccaaagttaagttgctgcgaaaccagagatttcctgcatcctatcatcatgcagtggaaaccgttgtaaatatgctgatgccacacatcactcagaagtttcgagataatccagaggcatctaagaacgcgaatcatagccttgctgtcttcatcaagagatgtttcaccttcatggacaggggctttgtcttcaagcagatcaacaactacattagctgttttgctcctggagacccaaagaccctctttgaatacaagtttgaatttctccgtgtagtgtgcaaccatgaacattatattccgttgaacttaccaatgccatttggaaaaggcaggattcaaagataccaagacctccagcttgactactcattaacagatgagttctgcagaaaccacttcttggtgggactgttactgagggaggtggggacagccctccaggagttccgggaggtccgtctgatcgccatcagtgtgctcaagaacctgctgataaagcattcttttgatgacagatatgcttcaaggagccatcaggcaaggatagccaccctctacctgcctctgtttggtctgctgattgaaaacgtccagcggatcaatgtgagggatgtgtcacccttccctgtgaacgcgggcatgactgtgaaggatgaatccctggctctaccagctgtgaatccgctggtgacgccgcagaagggaagcaccctggacaacagcctgcacaaggacctgctgggcgccatctccggcattggtaacgctccatgctcttgtgggcttctctccaccatcactctgaaagtgtcttggagccaatagttggtgaacgtgtcacacttgtgtggtaggaccttgaagtctaagttgctttcctgagtattcttttcctgcttgtgatagtcaacaactgaaacccctcagccatgccctgaaataaaggtcccggatgcctgtga

SEQ ID NO: 125884 - DNA, 420 bp, Homo sapiens
  Payload ID: 4658
  Gene Symbol: DOCK9
  Gene Name: dedicator of cytokinesis 9
  ENST ID: ENST00000479769
  CDS Start-End: 43-252
gccgcgggagcaggcggaggcggaggcggcgggggcaggaggatgtcgcagccgccgctgctccccgcctcggcggagactcggaagttcacccgggcgctgagtaagccgggcacggcggccgagctgcggcagagcgtgtctgaggtggtgcgcggctccgtgctcctggcagcaggtgagccactcccagttgatcccttttccctggagtcagtcatgtgtcccggaagtgcttccagcagctgctgaagacctctgccctatgaggtcactaggagttctttcattaagtgacctgaggcaaagccaaagctaattgagccactcgactatgaaaatgtcatcgtccagaagaagactcagatcctgaacgactgtttacgggagatgctgctcttcccttacgatgactttcag

SEQ ID NO: 125885 - DNA, 11831 bp, Homo sapiens
  Payload ID: 4658
  Gene Symbol: DOCK9
  Gene Name: dedicator of cytokinesis 9
  ENST ID: ENST00000630992
  CDS Start-End: 153-2270
ctctgcagacccagccagcggggctgaccacttgtgcctgggaagccagtttcctttccttccttggaccactggcatgcctgtgccttgcacggccagggactcgcagctgttccagttgcagactttctgacttgcgttttcagccgagaatgcaggctgataaatgcaggacaagtagtagaagtgtcaaaaaggaactggtgattgagtcccccctgcaatacaaggatgcagctcagggcgaagtggaagcagagagcccgggccctgtgccggcaaagccaaagctaattgagccactcgactatgaaaatgtcatcgtccagaagaagactcagatcctgaacgactgtttacgggagatgctgctcttcccttacgatgactttcagacggccatcctgagacgacagggtcgatacatatgctcaacagtgcctgcgaaggcggaagaggaagcacagagcttgtttgttacagagtgcatcaaaacctataactctgactggcatcttgtgaactataaatatgaagattactcaggagagtttcgacagcttccgaacaaagtggtcaagttggataaacttccagttcatgtctatgaagttgacgaggaggtcgacaaagatgaggatgctgcctcccttggttcccagaagggtgggatcaccaagcatggctggctgtacaaaggcaacatgaacagtgccatcagcgtgaccatgaggtcatttaagagacgatttttccacctgattcaacttggcgatggatcctataatttgaatttttataaagatgaaaagatctccaaagaaccaaaaggatcaatatttctggattcctgtatgggtgtcgttcagaacaacaaagtcaggcgttttgcttttgagctcaagatgcaggacaaaagtagttatctcttggcagcagacagtgaagtggaaatggaagaatggatcacaattctaaataagatcctccagctcaactttgaagctgcaatgcaagaaaagcgaaatggcgactctcacgaagatgatgaacaaagcaaattggaaggttctggttccggtttagatagctacctgccggaacttgccaagagtgcaagagaagcagaaatcaaactgaaaagtgaaagcagagtcaaacttttttatttggacccagatgcccagaagcttgacttctcatcagctgagccagaagtgaagtcatttgaagagaagtttggaaaaaggatccttgtcaagtgcaatgatttatctttcaatttgcaatgctgtgttgccgaaaatgaagaaggacccactacaaatgttgaacctttctttgttactctatccctgtttgacataaaatacaaccggaagatttctgccgatttccacgtagacctgaaccatttctcagtgaggcaaatgctcgccaccacgtccccggcgctgatgaatggcagtgggcagagcccatctgtcctcaagggcatccttcatgaagccgccatgcagtatccgaagcagggaatattttcagtcacttgtcctcatccagatatatttcttgtggccagaattgaaaaagtccttcaggggagcatcacacattgcgctgagccatatatgaaaagttcagactcttctaaggtggcccagaaggtgctgaagaatgccaagcaggcatgccaaagactaggacagtatagaatgccatttgcttgggcagcaaggacattgtttaaggatgcatctggaaatcttgacaaaaatgccagattttctgccatctacaggcaagacagcaataagctatccaatgatgacatgctcaagttacttgcagactttcggaaacctgagaagatggctaagctcccagtgattttaggcaatctagacattacaattgataatgtttcctcagacttccctaattatgttaattcatcatacattcccacaaaacaatttgaaacctgcagtaaaactcccatcacgtttgaagtggaggaatttgtgccctgcataccaaaacacactcagccttacaccatctacaccaatcacctttacgtttatcctaagtacttgaaatacgacagtcagaagtcttttgccaaggctagaaatattgcgatttgcattgaattcaaagattcagatgaggaagactctcagccccttaagacctggtgggccagttttcacaagaagcgcctttgctgcagttttacaccatcaccaaaacccagaattttatgatgagattaaaatagagttgcccactcagctgcatgaaaagcaccacctgttgctcacattcttccatgtcagctgtgacaactcaagtaaaggaagcacgaagaagagggatgtcgttgaaacccaagttggctactcctggcttcccctcctgaaagacggaagggtggtgacaagcgagcagcacatcccggtctcggcgaaccttccttcgggctatcttggctaccaggagcttgggatgggcaggcattatggtccggaaattaaatgggtagatggaggcaagccactgctgaaaatttccactcatctggtttctacagtgtatactcaggatcagcatttacataattttttccagtactgtcagaaaaccgaatctggagcccaagccttaggaaacgaacttgtaaagtaccttaagagtctgcatgcgatggaaggccacgtgatgatcgccttcttgcccactatcctaaaccagctgttccgagtcctcaccagagccacacaggaagaagtcgcggttaacgtgactcgggtcattattcatgtggttgcccagtgccatgaggaaggattggagagccacttgaggtcatatgttaagtacgcgtataaggctgagccatatgttgcctctgaatacaagacagtgcatgaagaactgaccaaatccatgaccacgattctcaagccttctgccgatttcctcaccagcaacaaactactgaagtactcatggtttttctttgatgtactgatcaaatctatggctcagcatttgatagagaactccaaagttaagttgctgcgaaaccagagatttcctgcatcctatcatcatgcagtggaaaccgttgtaaatatgctgatgccacacatcactcagaagtttcgagataatccagaggcatctaagaacgcgaatcatagccttgctgtcttcatcaagagatgtttcaccttcatggacaggggctttgtcttcaagcagatcaacaactacattagctgttttgctcctggagacccaaagaccctctttgaatacaagtttgaatttctccgtgtagtgtgcaaccatgaacattatattccgttgaacttaccaatgccatttggaaaaggcaggattcaaagataccaagacctccagcttgactactcattaacagatgagttctgcagaaaccacttcttggtgggactgttactgagggaggtggggacagccctccaggagttccgggaggtccgtctgatcgccatcagtgtgctcaagaacctgctgataaagcattcttttgatgacagatatgcttcaaggagccatcaggcaaggatagccaccctctacctgcctctgtttggtctgctgattgaaaacgtccagcggatcaatgtgagggatgtgtcacccttccctgtgaacgcgggcatgactgtgaaggatgaatccctggctctaccagctgtgaatccgctggtgacgccgcagaagggaagcaccctggacaacagcctgcacaaggacctgctgggcgccatctccggcattggtaacgctccatgctcttgtgggcttctctccaccatcactctgaaagtgtcttggagccaatagttggtgaacgtgtcacacttgtgtggtaggaccttgaagtctaagttgctttcctgagtattcttttcctgcttgtgatagtcaacaactgaaacccctcagccatgccctgaaataaaggtcccggatgcctgtgactcctcaggatcatacagttaatcactggctcacgctgtttgctttttgttcaacgtttgttgagttttcattttaaatcttaattggattgtgtatactgttaagggatatttttgcaggtggtggggggaggggaacactgatttgtagtgttagcaattttgatgaaatatgacatagtaattccagaagaacgtagcagtttgtggctagaattcagtgctaaaatcagttctcaaaagtcttctgtcccgcaagactttttctgtgtgaaataacagaagagcggccacctctgagagaaaaacacgtgacacaaatcaagattctaatagtttctccataagaaaatgccggacataatgtacttattaatattctgactaaatgaacgcctgtgctagcttttcctcagagatagcagtttacatatatatatatatatatacacacacacacacacacacacacaaacacacatatcctccaagaattgtcacaggtgctcacagccttcttcagtctttatttctccctgtctttatcacattttgaataaagaaagcatcctactatggctagtggctagactacctaataatgggactaattcatgggataaaataaatggcagcctttatccaattaactcacaggacttgcccactctgagattatgtctttacctttgccggtggtggtggtggtaatacgccatttcatgtaggggatgaaactgggtagaatttaacatgagaaaccccacaccaatgcccaaatttatcctgcaataataataccagtccttaacctggttgatatttatgtgtctttttcacagttatgctctccttagttgacactgtaaagattaaaagagttaattcatgcaaaatgcttgcaacagagcctggcacacggtaaatgctcagcaaatgttggctgctgtcacgagtttccatttgcctttcttctgggccttcactctgtctctgccctgctttgccccattcccagccactgctccagaagcagggaggggaccttccttagagggttttgtctgcagtggttcacagcactagctttaaagtcagacagatgcagccttggatctggaatcgaccatttactagttaccatggcaggatgttgtctatcttctttgccctccatacccatgtcttcaaaacggtcgttagagggattaagagctgatacaaagtgtatggtggttggcagagaggagtcagatgagtggaaacatcacttcactgtaaccttgatcatttccacaaagttttaatacttctgtttgactcttttgactcttctccaattcagaattcaccttgttaggattggggacttctttagaacttggagataggccactggggatctttagcatcatagcctccaattgctccgcactgacattgcagctgtgaaaagtacttgaaactgacttaatcctttttcactcttgaattttaagatccaaatccacttttcataggaattcacctcgacaggcttattatactcaggttatctatattgcctcctttcttgaagatttaaatccctgttctcttttaggagtaccttccagggaagcctcatctttgaactgggtttactagtttttttctggcagctttaacaattctttgttcatcagggagtttctagctaattttagtcctggtgcttctccttcaagagcaaactctccttacatctctgttagaagaatcctgtttccacacatactgagaatgtgccgtcacagttttttaaatgtctttggatcatggtgcctgagagttttaaaagtgattcactgcctggataaaaactactctgagattacattcattttaaaaggcaagcgtcctgaggctcagggtttctttttccacctactcagtggtaccaagggaagagggacgaatttatcttcttttcattttactcaagtgtcgtttaaggactttaaaagctatgcactgggccaggatattaaatacaaacacatacacaaagacataaaaataggaacaaactaagcatattgattttgatatattgcatttccatctgtttgtcttaaattaggactctagttctggaatcaagcttgagactctgagaacttagggcctaattttactttactgaggacctctttctcttgagttctgtgttctttttcatgacttctgtgttcttcaaatgctgttctacattaaatatgaaatatgattatattagaaaaattataatttggtcatagcatgtgtttcttatctgagtacagaaaaaggccatagttttttcacagggtttttacctgtcccttgcgacaatcattcacatggtttctctcctggggagacgcagccactggctgacaataaggcttaatgaaaccatgttcaagcctttgcttcttttttcaaattctcctggctcttcttttcttgatctttaatacactgaatcagtttcagggatagcagtgaataaatctgagtgttcaacagagggaaggatttatgaccttgatgtcacaggtcttccttctaaggttaaagagttaaagactgaccaggcacggtggctcatgcctgtaatcccagcactttgggaggccgaggtgggcagatcacctgaggtcaggagttcgacaccagcctggccaacatggtgaaaacccgtctctactagaaatacaaaaaaattagccagggttggtggcagtcgcctgtaatcacagctacttgggaggctgaggcagaggagtcactttcaaatatacttttggtgtaacctagaggctggctatatttattttgttgtttatttattttttaacttagaagtatcccagtccatggcagctcatttgcctactgagatctgaaaacaaccagcctgttgtgaagtgccaagtaatggcatcttcagcttgcgtctgggagaatgtgtgctcacagctgccagacacagagtccaaatctcctgatgccatctgccaaaccagccaggcctttccgctggaggcacgccttttggttcagcacggaatgtacaagtccaaagagtcgttttaaattatgtgatttatttaaatcttatctaagcaggaagtcaatctattaccttaaaaaattccatagtaccaagatagggagtgatttctgccttcaaatactgtttttttcatggacatcacaaattttatttccacattagatttcctttctgctcatagttgtttatagcagattcccagatattccccgttcacagcacccttagtgtcactttatttcgtggcatccctaggctgaaagacacacccagcagttctctttattaggtacttaggaccaaataacttaataagtacttacatcctaacaatttagtaggcacttaaaagaaataatacacataaatttaaaggaaacaattaattttatttttaataaccacaactcactacaaatgggtggtgtgtacctgttggacactgacagcttctcagcctttgggtcagattggccagcaccattcgcatttcctgtccctcattgattacttgccttttatcatagcaggcccccaaatacccagcttcacaaatatgtcttcaaaaggagcatagcacaacctgctgctgaaacagcagcttctggctgaggtcacatatcactgtgttctcctcgaaaatttaaaataccccatgacacccctcagagttgggtaggctcctcagtgtttattaccagtttgaatgctacaagtttgttgtgtggtttaattttgtgatttgatagttgtaggtggatttatcttttaatttttttaagtcttcattctatcacattctgaaacaggtatgcatttagtctttagcgatcaaaggtggtttctaacaagtgaattgatgtttacatctgaatgtttcagactagtttctttttatctcattgtatatgacctggttctttaaaggtgaagtaatggaatgcaactcttgagccaacttcctaacagaaaaaataagtgcaataaaagcaatttcccttaaagttcagtactcatctttattttgttctgtcttaataaaactttattgttggcttgatttccatttagcttctccatatacaacctcaactccaaacatcaacagtgtgagaaatgctgattcgagaggatctctcataagcacagattcgggtaacagccttccagaaaggaatagtgagaagagcaattccctggataagcaccaacaaagtagcacattgggaaattccgtggttcgctgtgataaacttgaccagtctgagattaagagcctactgatgtgtttcctctacatcttaaagagcatgtctgatgatgctttgtttacatattggaacaaggcttcaacatctgaacttatggatttttttacaatatctgaagtctgcctgcaccagttccagtacatggggaagcgatacatagccagtgtgagaaagatatcaagtgtgcttggaatttctgtagacaatggctatggccactcggacgcagatgttctgcaccagtcattacttgaagccaacattgctactgaggtttgcctgacagctctggacacgctttctctatttacattggcgtttaagaaccagctcctggccgaccatggacataatcctctcatgaaaaaagtttttgatgtctacctgtgttttcttcaaaaacatcagtctgaaacggctttaaaaaatgtcttcactgccttaaggtccttaatttataagtttccctcaacattctatgaagggagagcggacatgtgtgcggctctgtgttacgagattctcaagtgctgtaactccaagctgagctccatcaggacggaggcctcccagctgctctacttcctgatgaggaacaactttgattacactggaaagaagtcctttgtccggacacatttgcaagtcatcatatctgtcagccagctgatagcagacgttgttggcattgggggaaccagattccagcagtccctgtccatcatcaacaactgtgccaacagtgaccggcttattaagcacaccagcttctcctctgatgtgaaggacttaaccaaaaggatacgcacggtgctaatggccaccgcccagatgaaggagcatgagaacgacccagagatgctggtggacctccagtacagcctggccaaatcctatgccagcacgcccgagctcaggaagacgtggctcgacagcatggccaggatccatgtcaaaaatggcgatctctcagaggcagcaatgtgctatgtccacgtaacagccctagtggcagaatatctcacacggaaaggcgtgtttagacaaggatgcaccgccttcagggtcattaccccaaacatcgacgaggaggcctccatgatggaagacgtggggatgcaggatgtccatttcaacgaggatgtgctgatggagctccttgagcagtgcgcagatggactctggaaagccgagcgctacgagctcatcgccgacatctacaaacttatcatccccatttatgagaagcggagggattttgagaggctggcccatctgtatgacacgctgcaccgggcctacagcaaagtgaccgaggtcatgcactcgggccgcaggcttctggggacctacttccgggtagccttcttcgggcagggattctttgaagatgaagatggaaaggagtatatttacaaggaacccaaactcacaccgctgtcggaaatttctcagagactccttaaactgtactcggataaatttggttctgaaaatgtcaaaatgatacaggattctggcaaggtcaaccctaaggatctggattctaagtatgcatacatccaggtgactcacgtcatccccttctttgacgaaaaagagttgcaagaaaggaaaacagagtttgagagatcccacaacatccgccgcttcatgtttgagatgccatttacgcagaccgggaagaggcagggcggggtggaagagcagtgcaaacggcgcaccatcctgacagccatacactgcttcccttatgtgaagaagcgcatccctgtcatgtaccagcaccacactgacctgaaccccatcgaggtggccattgacgagatgagtaagaaggtggcggagctccggcagctgtgctcctcggccgaggtggacatgatcaaactgcagctcaaactccagggcagcgtgagtgttcaggtcaatgctggcccactagcatatgcgcgagctttcttagatgatacaaacacaaagcgatatcctgacaataaagtgaagctgcttaaggaagttttcaggcaatttgtggaagcttgcggtcaagccttagcggtaaacgaacgtctgattaaagaagaccagctcgagtatcaggaagaaatgaaagccaactacagggaaatggcgaaggagctttctgaaatcatgcatgagcagatctgccccctggaggagaagacgagcgtcttaccgaattcccttcacatcttcaacgccatcagtgggactccaacaagcacaatggttcacgggatgaccagctcgtcttcggtcgtgtgattacatctcatggcccgtgtgtggggacttgctttgtcatttgcaaactcaggatgctttccaaagccaatcactggggagaccgagcacagggaggaccaaggggaaggggagagaaaggaaataaagaacaacgttatttcttaacagactttctataggagttgtaagaaggtgcacatatttttttaaatctcactggcaatattcaaagttttcattgtgtcttaacaaaggtgtggtagacactcttgagctggacttagattttattcttccttgcagagtagtgttagaatagatggcctacagaaaaaaaaggttctgggatctacatggcagggagggctgcactgacattgatgcctgggggaccttttgcctcgaggctgagctggaaaatcttgaaaatattttttttttcctgtggcacattcaggttgaatacaagaactatttttgtgactagtttttgatgacctaagggaactgaccattgtaatttttgtaccagtgaaccaggagatttagtgcttttatattcatttccttgcatttaagaaaatatgaaagcttaaggaattatgtgagcttaaaactagtcaagcagtttagaaccaaaggcctatattaataaccgcaactatgctgaaaagtacaaagtagtacagtatattgttatgtacatatcattgttaatacagtcctggcattctgtacatatatgtattacatttctacatttttaatactcacatgggcttatgcattaagtttaattgtgataaatttgtgctgttccagtatatgcaatacactttaatgttttattcttgtacataaaaatgtgcaatatggagatgtatacagtctttactatattaggtttataaacagttttaagaatttcatccttttgccaaaatggtggagtatgtaattggtaaatcataaatcctgtggtgaatggtggtgtactttaaagctgtcaccatgttatattttcttttaagactttaatttagtaattttatatttgggaaaataaaggtttttaattttatttaactggaatcactgccctgctgtaattaaacattctgtaccacatctgtattaaaaagacattgctga

SEQ ID NO: 125886 - DNA, 4096 bp, Homo sapiens
  Payload ID: 4658
  Gene Symbol: DOCK9
  Gene Name: dedicator of cytokinesis 9
  Uniprot ID: Q9BZ29
  ENST ID: ENST00000627024
  CDS Start-End: 176-3937
gtcatgccttcccaccccacaggctctgcagacccagccagcggggctgaccacttgtgcctgggaagccagtttcctttccttccttggaccactggcatgcctgtgccttgcacggccagggactcgcagctgttccagttgcagactttctgacttgcgttttcagccgagaatgcaggctgataaatgcaggacaagtagtagaagtgtcaaaaaggaactggtgattgagtcccccctgcaatacaaggatgcagctcagggcgaagtggaagcagagagcccgggccctgtgccggcaaagccaaagctaattgagccactcgactatgaaaatgtcatcgtccagaagaagactcagatcctgaacgactgtttacgggagatgctgctcttcccttacgatgactttcagacggccatcctgagacgacagggtcgatacatatgctcaacagtgcctgcgaaggcggaagaggaagcacagagcttgtttgttacagagtgcatcaaaacctataactctgactggcatcttgtgaactataaatatgaagattactcaggagagtttcgacagcttccgaacaaagtggtcaagttggataaacttccagttcatgtctatgaagttgacgaggaggtcgacaaagatgaggatgctgcctcccttggttcccagaagggtgggatcaccaagcatggctggctgtacaaaggcaacatgaacagtgccatcagcgtgaccatgaggtcatttaagagacgatttttccacctgattcaacttggcgatggatcctataatttgaatttttataaagatgaaaagatctccaaagaaccaaaaggatcaatatttctggattcctgtatgggtgtcgttcagaacaacaaagtcaggcgttttgcttttgagctcaagatgcaggacaaaagtagttatctcttggcagcagacagtgaagtggaaatggaagaatggatcacaattctaaataagatcctccagctcaactttgaagctgcaatgcaagaaaagcgaaatggcgactctcacgaagatgatgaacaaagcaaattggaaggttctggttccggtttagatagctacctgccggaacttgccaagagtgcaagagaagcagaaatcaaactgaaaagtgaaagcagagtcaaacttttttatttggacccagatgcccagaagcttgacttctcatcagctgagccagaagtgaagtcatttgaagagaagtttggaaaaaggatccttgtcaagtgcaatgatttatctttcaatttgcaatgctgtgttgccgaaaatgaagaaggacccactacaaatgttgaacctttctttgttactctatccctgtttgacataaaatacaaccggaagatttctgccgatttccacgtagacctgaaccatttctcagtgaggcaaatgctcgccaccacgtccccggcgctgatgaatggcagtgggcagagcccatctgtcctcaagggcatccttcatgaagccgccatgcagtatccgaagcagggaatattttcagtcacttgtcctcatccagatatatttcttgtggccagaattgaaaaagtccttcaggggagcatcacacattgcgctgagccatatatgaaaagttcagactcttctaaggtggcccagaaggtgctgaagaatgccaagcaggcatgccaaagactaggacagtatagaatgccatttgcttgggcagcaaggacattgtttaaggatgcatctggaaatcttgacaaaaatgccagattttctgccatctacaggcaagacagcaataagctatccaatgatgacatgctcaagttacttgcagactttcggaaacctgagaagatggctaagctcccagtgattttaggcaatctagacattacaattgataatgtttcctcagacttccctaattatgttaattcatcatacattcccacaaaacaatttgaaacctgcagtaaaactcccatcacgtttgaagtggaggaatttgtgccctgcataccaaaacacactcagccttacaccatctacaccaatcacctttacgtttatcctaagtacttgaaatacgacagtcagaagtcttttgccaaggctagaaatattgcgatttgcattgaattcaaagattcagatgaggaagactctcagccccttaagtgcatttatggcagacctggtgggccagttttcacaagaagcgcctttgctgcagttttacaccatcaccaaaacccagaattttatgatgagattaaaatagagttgcccactcagctgcatgaaaagcaccacctgttgctcacattcttccatgtcagctgtgacaactcaagtaaaggaagcacgaagaagagggatgtcgttgaaacccaagttggctactcctggcttcccctcctgaaagacggaagggtggtgacaagcgagcagcacatcccggtctcggcgaaccttccttcgggctatcttggctaccaggagcttgggatgggcaggcattatggtccggaaattaaatgggtagatggaggcaagccactgctgaaaatttccactcatctggtttctacagtgtatactcaggatcagcatttacataattttttccagtactgtcagaaaaccgaatctggagcccaagccttaggaaacgaacttgtaaagtaccttaagagtctgcatgcgatggaaggccacgtgatgatcgccttcttgcccactatcctaaaccagctgttccgagtcctcaccagagccacacaggaagaagtcgcggttaacgtgactcgggtcattattcatgtggttgcccagtgccatgaggaaggattggagagccacttgaggtcatatgttaagtacgcgtataaggctgagccatatgttgcctctgaatacaagacagtgcatgaagaactgaccaaatccatgaccacgattctcaagccttctgccgatttcctcaccagcaacaaactactgaagtactcatggtttttctttgatgtactgatcaaatctatggctcagcatttgatagagaactccaaagttaagttgctgcgaaaccagagatttcctgcatcctatcatcatgcagtggaaaccgttgtaaatatgctgatgccacacatcactcagaagtttcgagataatccagaggcatctaagaacgcgaatcatagccttgctgtcttcatcaagagatgtttcaccttcatggacaggggctttgtcttcaagcagatcaacaactacattagctgttttgctcctggagacccaaagaccctctttgaatacaagtttgaatttctccgtgtagtgtgcaaccatgaacattatattccgttgaacttaccaatgccatttggaaaaggcaggattcaaagataccaagacctccagcttgactactcattaacagatgagttctgcagaaaccacttcttggtgggactgttactgagggaggtggggacagccctccaggagttccgggaggtccgtctgatcgccatcagtgtgctcaagaacctgctgataaagcattcttttgatgacagatatgcttcaaggagccatcaggcaaggatagccaccctctacctgcctctgtttggtctgctgattgaaaacgtccagcggatcaatgtgagggatgtgtcacccttccctgtgaacgcgggcatgactgtgaaggatgaatccctggctctaccagctgtgaatccgctggtgacgccgcagaagggaagcaccctggacaacagcctgcacaaggacctgctgggcgccatctccggcattggtaacgctccatgctcttgtgggcttctctccaccatcactctgaaagtgtcttggagccaatagttggtgaacgtgtcacacttgtgtggtaggaccttgaagtctaagttgctttcctgagtattcttttcctgcttgtgatagtcaacaactgaaacccctcagccatgccctgaaataaaggtcccggatgcctgtgactcctcaggatcatacagttaa

SEQ ID NO: 125887 - DNA, 2267 bp, Homo sapiens
  Payload ID: 4659
  Gene Symbol: DET1
  Gene Name: de-etiolated homolog 1 (Arabidopsis)
  Uniprot ID: Q7L5Y6
  ENST ID: ENST00000268148
  CDS Start-End: 147-1799
ggtggctggcggaaacgggaacgtgcagccgcgggtgcaggagtcctggggcatggcgggggcggggcagggggaggcgcgcacagaacaggctggggcatccctcgccctggctctttgagcccggaccagacagagatgtgataatggatcatcatgtttctaccatcaagcctcgaagaatccaaaaccaaaatgtcattcaccgcttggaacgccggcggatcagttcaggcaaggcaggtacccactggcaccaagtccgagtgttccatcagaatgtcttccccaacttcacagttgtcaacgttgaaaagcctccttgtttcttgcgtaaattctcacctgatggacgctactttattgctttttcttcagaccagacatctcttgaaatctatgagtaccagggctgccaggcagcagaggacctactgcagggatacgaaggagaaatcctgtccaatggcaatgaccagcggtcagtgaatatccggggccggctctttgaacgcttttttgtcctgctgcacattaccaatgttgcggccaatggtgagcacctgaaccgggagtgtagtctcttcactgatgactgccgctgtgtcatcgtgggctcagctgcctacctcccagatgagcctcaccctccattttttgaggtatatcggaacagtgaatcagtgacccccaacccacggtcccctctagaagactattccctccatatcattgaccttcacaccggccgcttatgtgatacacgcacgttcaagtgtgacaaggtggtcttgtcacacaaccaagggctgtacttgtacaaaaacatcctggccatcttgtctgtgcaacaacagaccatccatgtcttccaggtgactcctgaaggcactttcattgatgtgcggaccattggccgcttttgctatgaggatgacctgctcactgtgtcagctgttttccctgaggtacagcgggacagtcagacaggcatggccaatccctttagggatcctttcatcaattccctcaaacaccggttgctggtatatttgtggcgccgggcagaacaggatggtagtgcaatggccaagaggcgcttcttccagtattttgaccaactgcggcagctgcgaatgtggaaaatgcagcttctggatgaaaaccacctgtttatcaagtacactagtgaggatgtagtaacactgcgagtcacagatccatcacaggcatctttctttgtggtgtacaatatggtgacgacagaggtgattgctgtgtttgagaatacatcagatgagcttttggagctctttgagaacttctgtgacctttttcgtaatgctaccctgcacagtgaagttcagtttccctgctcagcttctagcaacaattttgcaaggcagatccagcgccggttcaaagacactattataaatgccaagtatggagggcacacagaggcagtacgccggctgctgggtcagctccccatcagtgctcagtcttacagcggtagcccctatctggatttgtctctcttcagttatgatgacaagtgggtatctgtcatggagcggcccaagacttgtggagatcacccaatcaggttctatgcccgggactcgggcctgctcaagtttgagatccaggcggggttattgggccgccccatcaaccacacagtgcgacgccttgttgccttcacctttcacccttttgagcctttcgctatttctgtgcagaggactaatgctgagtatgttgtcaacttccatatgcgacactgctgcacgtaggtgcctcaccagagccagattatctggtcttccaagactttgccactcacttatctcagtggactccaaagcaaaagctcccgactactagctctgttagttccagcctgctatacctcagatgggagagagccagagagaggagtgagggtggctcaacctaatggaatttttaaattgtatacaatactgctactgattgttataatatcctcttgcgttttccctgtgggaatgcccagcattaattaagtccatttcatttttgctttactttgcatttgattgctgtgaagatgaaagcattagacttttatccccttcatgtcacttcttcggcattatggtttgcatctgaaagcagttaaatcttgtttactgatgagaatgacatacatcctttccatttagctcataagcacggctatctttttaagagaaaaataaagccatggtattttcatactt

SEQ ID NO: 125888 - DNA, 2154 bp, Homo sapiens
  Payload ID: 4659
  Gene Symbol: DET1
  Gene Name: de-etiolated homolog 1 (Arabidopsis)
  Uniprot ID: Q7L5Y6
  ENST ID: ENST00000444300
  CDS Start-End: 1-1686
atggtgggacagatactaaaaagagatgtgataatggatcatcatgtttctaccatcaagcctcgaagaatccaaaaccaaaatgtcattcaccgcttggaacgccggcggatcagttcaggcaaggcaggtacccactggcaccaagtccgagtgttccatcagaatgtcttccccaacttcacagttgtcaacgttgaaaagcctccttgtttcttgcgtaaattctcacctgatggacgctactttattgctttttcttcagaccagacatctcttgaaatctatgagtaccagggctgccaggcagcagaggacctactgcagggatacgaaggagaaatcctgtccaatggcaatgaccagcggtcagtgaatatccggggccggctctttgaacgcttttttgtcctgctgcacattaccaatgttgcggccaatggtgagcacctgaaccgggagtgtagtctcttcactgatgactgccgctgtgtcatcgtgggctcagctgcctacctcccagatgagcctcaccctccattttttgaggtatatcggaacagtgaatcagtgacccccaacccacggtcccctctagaagactattccctccatatcattgaccttcacaccggccgcttatgtgatacacgcacgttcaagtgtgacaaggtggtcttgtcacacaaccaagggctgtacttgtacaaaaacatcctggccatcttgtctgtgcaacaacagaccatccatgtcttccaggtgactcctgaaggcactttcattgatgtgcggaccattggccgcttttgctatgaggatgacctgctcactgtgtcagctgttttccctgaggtacagcgggacagtcagacaggcatggccaatccctttagggatcctttcatcaattccctcaaacaccggttgctggtatatttgtggcgccgggcagaacaggatggtagtgcaatggccaagaggcgcttcttccagtattttgaccaactgcggcagctgcgaatgtggaaaatgcagcttctggatgaaaaccacctgtttatcaagtacactagtgaggatgtagtaacactgcgagtcacagatccatcacaggcatctttctttgtggtgtacaatatggtgacgacagaggtgattgctgtgtttgagaatacatcagatgagcttttggagctctttgagaacttctgtgacctttttcgtaatgctaccctgcacagtgaagttcagtttccctgctcagcttctagcaacaattttgcaaggcagatccagcgccggttcaaagacactattataaatgccaagtatggagggcacacagaggcagtacgccggctgctgggtcagctccccatcagtgctcagtcttacagcggtagcccctatctggatttgtctctcttcagttatgatgacaagtgggtatctgtcatggagcggcccaagacttgtggagatcacccaatcaggttctatgcccgggactcgggcctgctcaagtttgagatccaggcggggttattgggccgccccatcaaccacacagtgcgacgccttgttgccttcacctttcacccttttgagcctttcgctatttctgtgcagaggactaatgctgagtatgttgtcaacttccatatgcgacactgctgcacgtaggtgcctcaccagagccagattatctggtcttccaagactttgccactcacttatctcagtggactccaaagcaaaagctcccgactactagctctgttagttccagcctgctatacctcagatgggagagagccagagagaggagtgagggtggctcaacctaatggaatttttaaattgtatacaatactgctactgattgttataatatcctcttgcgttttccctgtgggaatgcccagcattaattaagtccatttcatttttgctttactttgcatttgattgctgtgaagatgaaagcattagacttttatccccttcatgtcacttcttcggcattatggtttgcatctgaaagcagttaaatcttgtttactgatgagaatgacatacatcctttccatttagctcataagcacggctatctttttaagagaaaaataaagccatggtattttcatactt

SEQ ID NO: 125889 - DNA, 1925 bp, Homo sapiens
  Payload ID: 4659
  Gene Symbol: DET1
  Gene Name: de-etiolated homolog 1 (Arabidopsis)
  ENST ID: ENST00000557837
  CDS Start-End: 132-335
cgggaacgtgcagccgcgggtgcaggagtcctggggcatggcgggggcggggcagggggaggcgcgcacagaacaggctggggcatccctcgccctggctctttgagcccggaccagacagagatgtgataatggatcatcatgtttctaccatcaagcctcgaagaatccaaaaccaaaatgtcattcaccgcttggaacgccggcggatcagttcaggcaagaccagacatctcttgaaatctatgagtaccagggctgccaggcagcagaggacctactgcagggatacgaaggagaaatcctgtccaatggcaatgaccagcggtcagtgaatatccggggccggctctttgaacgcttttttgtcctgctgcacattaccaatgttgcggccaatggtgagcacctgaaccgggagtgtagtctcttcactgatgactgccgctgtgtcatcgtgggctcagctgcctacctcccagatgagcctcaccctccattttttgaggtatatcggaacagtgaatcagtgacccccaacccacggtcccctctagaagactattccctccatatcattgaccttcacaccggccgcttatgtgatacacgcacgttcaagtgtgacaaggtggtcttgtcacacaaccaagggctgtacttgtacaaaaacatcctggccatcttgtctgtgcaacaacagaccatccatgtcttccaggtgactcctgaaggcactttcattgatgtgcggaccattggccgcttttgctatgaggatgacctgctcactgtgtcagctgttttccctgaggtacagcgggacagtcagacaggcatggccaatccctttagggatcctttcatcaattccctcaaacaccggttgctggtatatttgtggcgccgggcagaacaggatggtagtgcaatggccaagaggcgcttcttccagtattttgaccaactgcggcagctgcgaatgtggaaaatgcagcttctggatgaaaaccacctgtttatcaagtacactagtgaggatgtagtaacactgcgagtcacagatccatcacaggttcaaagacactattataaatgccaagtatggagggcacacagaggcagtacgccggctgctgggtcagctccccatcagtgctcagtcttacagcggtagcccctatctggatttgtctctcttcagttatgatgacaagtgggtatctgtcatggagcggcccaagacttgtggagatcacccaatcaggttctatgcccgggactcgggcctgctcaagtttgagatccaggcggggttattgggccgccccatcaaccacacagtgcgacgccttgttgccttcacctttcacccttttgagcctttcgctatttctgtgcagaggactaatgctgagtatgttgtcaacttccatatgcgacactgctgcacgtaggtgcctcaccagagccagattatctggtcttccaagactttgccactcacttatctcagtggactccaaagcaaaagctcccgactactagctctgttagttccagcctgctatacctcagatgggagagagccagagagaggagtgagggtggctcaacctaatggaatttttaaattgtatacaatactgctactgattgttataatatcctcttgcgttttccctgtgggaatgcccagcattaattaagtccatttcatttttgctttactttgcatttgattgctgtgaagatgaaagcattagacttttatccccttcatgtcacttcttcggcattatggtttgcatctgaaagcagttaaatcttgtttactgatgagaatgacatacatcctttccatttagctcataagcacggctatctttttaagagaaaaataaagccatggtattttcatactt

SEQ ID NO: 125890 - DNA, 2258 bp, Homo sapiens
  Payload ID: 4659
  Gene Symbol: DET1
  Gene Name: de-etiolated homolog 1 (Arabidopsis)
  ENST ID: ENST00000557842
  CDS Start-End: 117-320
gcgggtgcaggagtcctggggcatggcgggggcggggcagggggaggcgcgcacagaacaggctggggcatccctcgccctggctctttgagcccggaccagacagagatgtgataatggatcatcatgtttctaccatcaagcctcgaagaatccaaaaccaaaatgtcattcaccgcttggaacgccggcggatcagttcaggcaagaccagacatctcttgaaatctatgagtaccagggctgccaggcagcagaggacctactgcagggatacgaaggagaaatcctgtccaatggcaatgaccagcggtcagtgaatatccggggccggctctttgaacgcttttttgtcctgctgcacattaccaatgttgcggccaatggtgagcacctgaaccgggagtgtagtctcttcactgatgactgccgctgtgtcatcgtgggctcagctgcctacctcccagatgagcctcaccctccattttttgaggtatatcggaacagtgaatcagtgacccccaacccacggtcccctctagaagactattccctccatatcattgaccttcacaccggccgcttatgtgatacacgcacgttcaagtgtgacaaggtggtcttgtcacacaaccaagggctgtacttgtacaaaaacatcctggccatcttgtctgtgcaacaacagaccatccatgtcttccaggtgactcctgaaggcactttcattgatgtgcggaccattggccgcttttgctatgaggatgacctgctcactgtgtcagctgttttccctgaggtacagcgggacagtcagacaggcatggccaatccctttagggatcctttcatcaattccctcaaacaccggttgctggtatatttgtggcgccgggcagaacaggatggtagtgcaatggccaagaggcgcttcttccagtattttgaccaactgcggcagctgcgaatgtggaaaatgcagcttctggatgaaaaccacctgtttatcaagtacactagtgaggatgtagtaacactgcgagtcacagatccatcacaggcatctttctttgtggtgtacaatatggtgacgacagaggtgattgctgtgtttgagaatacatcagatgagcttttggagctctttgagaacttctgtgacctttttcgtaatgctaccctgcacagtgaagttcagtttccctgctcagcttctagcaacaattttgcaaggcagatccagcgccggttcaaagacactattataaatgccaagtatggagggcacacagaggcagtacgccggctgctgggtcagctccccatcagtgctcagtcttacagcggtagcccctatctggatttgtctctcttcagttatgatgacaagtgggtatctgtcatggagcggcccaagacttgtggagatcacccaatcaggttctatgcccgggactcgggcctgctcaagtttgagatccaggcggggttattgggccgccccatcaaccacacagtgcgacgccttgttgccttcacctttcacccttttgagcctttcgctatttctgtgcagaggactaatgctgagtatgttgtcaacttccatatgcgacactgctgcacgtaggtgcctcaccagagccagattatctggtcttccaagactttgccactcacttatctcagtggactccaaagcaaaagctcccgactactagctctgttagttccagcctgctatacctcagatgggagagagccagagagaggagtgagggtggctcaacctaatggaatttttaaattgtatacaatactgctactgattgttataatatcctcttgcgttttccctgtgggaatgcccagcattaattaagtccatttcatttttgctttactttgcatttgattgctgtgaagatgaaagcattagacttttatccccttcatgtcacttcttcggcattatggtttgcatctgaaagcagttaaatcttgtttactgatgagaatgacatacatcctttccatttagctcataagcacggctatctttttaagagaaaaataaagccatggtattttcatacttaaatatatgtggttggatgactgctttatgttcctatcatactcaatgctttcaagtacttgggttccaggaaggactgtgaaagagatgagaggccatggatgcagcagctgttcctgggagaactaagtgggacagtggagacagatgaaggaagggc

SEQ ID NO: 125891 - DNA, 583 bp, Homo sapiens
  Payload ID: 4659
  Gene Symbol: DET1
  Gene Name: de-etiolated homolog 1 (Arabidopsis)
  ENST ID: ENST00000558413
  CDS Start-End: 106-390
agtcctggggcatggcgggggcggggcagggggaggcgcgcacagaacaggctggggcatccctcgccctggctctttgagcccggaccagacagagatgtgataatggatcatcatgtttctaccatcaagcctcgaagaatccaaaaccaaaatgtcattcaccgcttggaacgccggcggatcagttcaggcaaggcagaccagacatctcttgaaatctatgagtaccagggctgccaggcagcagaggacctactgcagggatacgaaggagaaatcctgtccaatggcaatgaccagcggtcagtgaatatccggggccggctctttgaacgcttttttgtcctgctgcacattaccaatgttgcggccaatggtgactcctgaaggcactttcattgatgtgcggaccattggccgcttttgctatgaggatgacctgctcactgtgtcagctgttttccctgaggtacagcgggacagtcagacaggcatggccaatccctttagggatcctttcatcaattccctcaaacaccggttgctggtatatttgtggcgccgggcagaacaggatggt

SEQ ID NO: 125892 - DNA, 2315 bp, Homo sapiens
  Payload ID: 4659
  Gene Symbol: DET1
  Gene Name: de-etiolated homolog 1 (Arabidopsis)
  Uniprot ID: Q7L5Y6
  ENST ID: ENST00000564406
  CDS Start-End: 162-1847
gtgcagccgcgggtgcaggagtcctggggcatggcgggggcggggcagggggaggcgcgcacagaacaggctggggcatccctcgccctggctctttgagcccggaccagacaggtgctgggaatacagcaaggaattagaccagttccctgctctctggtatggtgggacagatactaaaaagagatgtgataatggatcatcatgtttctaccatcaagcctcgaagaatccaaaaccaaaatgtcattcaccgcttggaacgccggcggatcagttcaggcaaggcaggtacccactggcaccaagtccgagtgttccatcagaatgtcttccccaacttcacagttgtcaacgttgaaaagcctccttgtttcttgcgtaaattctcacctgatggacgctactttattgctttttcttcagaccagacatctcttgaaatctatgagtaccagggctgccaggcagcagaggacctactgcagggatacgaaggagaaatcctgtccaatggcaatgaccagcggtcagtgaatatccggggccggctctttgaacgcttttttgtcctgctgcacattaccaatgttgcggccaatggtgagcacctgaaccgggagtgtagtctcttcactgatgactgccgctgtgtcatcgtgggctcagctgcctacctcccagatgagcctcaccctccattttttgaggtatatcggaacagtgaatcagtgacccccaacccacggtcccctctagaagactattccctccatatcattgaccttcacaccggccgcttatgtgatacacgcacgttcaagtgtgacaaggtggtcttgtcacacaaccaagggctgtacttgtacaaaaacatcctggccatcttgtctgtgcaacaacagaccatccatgtcttccaggtgactcctgaaggcactttcattgatgtgcggaccattggccgcttttgctatgaggatgacctgctcactgtgtcagctgttttccctgaggtacagcgggacagtcagacaggcatggccaatccctttagggatcctttcatcaattccctcaaacaccggttgctggtatatttgtggcgccgggcagaacaggatggtagtgcaatggccaagaggcgcttcttccagtattttgaccaactgcggcagctgcgaatgtggaaaatgcagcttctggatgaaaaccacctgtttatcaagtacactagtgaggatgtagtaacactgcgagtcacagatccatcacaggcatctttctttgtggtgtacaatatggtgacgacagaggtgattgctgtgtttgagaatacatcagatgagcttttggagctctttgagaacttctgtgacctttttcgtaatgctaccctgcacagtgaagttcagtttccctgctcagcttctagcaacaattttgcaaggcagatccagcgccggttcaaagacactattataaatgccaagtatggagggcacacagaggcagtacgccggctgctgggtcagctccccatcagtgctcagtcttacagcggtagcccctatctggatttgtctctcttcagttatgatgacaagtgggtatctgtcatggagcggcccaagacttgtggagatcacccaatcaggttctatgcccgggactcgggcctgctcaagtttgagatccaggcggggttattgggccgccccatcaaccacacagtgcgacgccttgttgccttcacctttcacccttttgagcctttcgctatttctgtgcagaggactaatgctgagtatgttgtcaacttccatatgcgacactgctgcacgtaggtgcctcaccagagccagattatctggtcttccaagactttgccactcacttatctcagtggactccaaagcaaaagctcccgactactagctctgttagttccagcctgctatacctcagatgggagagagccagagagaggagtgagggtggctcaacctaatggaatttttaaattgtatacaatactgctactgattgttataatatcctcttgcgttttccctgtgggaatgcccagcattaattaagtccatttcatttttgctttactttgcatttgattgctgtgaagatgaaagcattagacttttatccccttcatgtcacttcttcggcattatggtttgcatctgaaagcagttaaatcttgtttactgatgagaatgacatacatcctttccatttagctcataagcacggctatctttttaagagaaaaataaagccatggtattttcatactt

SEQ ID NO: 125893 - DNA, 2262 bp, Homo sapiens
  Payload ID: 4660
  Gene Symbol: DEF6
  Gene Name: DEF6 guanine nucleotide exchange factor
  Uniprot ID: Q9H4E7
  ENST ID: ENST00000316637
  CDS Start-End: 6-1901
cagccatggccctgcgcaaggaactgctcaagtccatctggtacgcctttaccgcgctggacgtggagaagagtggcaaagtctccaagtcccagctcaaggtgctgtcccacaacctgtacacggtcctgcacatcccccatgaccccgtggccctggaggaacacttccgagatgatgatgacggccctgtgtccagccagggatacatgccctacctcaacaagtacatcctggacaaggtggaggagggggcttttgttaaagagcactttgatgagctgtgctggacgctgacggccaagaagaactatcgggcagatagcaacgggaacagtatgctctccaatcaggatgccttccgcctctggtgcctcttcaacttcctgtctgaggacaagtaccctctgatcatggttcctgatgaggtggaatacctgctgaaaaaggtactcagcagcatgagcttggaggtgagcttgggtgagctggaggagcttctggcccaggaggcccaggtggcccagaccaccggggggctcagcgtctggcagttcctggagctcttcaattcgggccgctgcctgcggggcgtgggccgggacaccctcagcatggccatccacgaggtctaccaggagctcatccaagatgtcctgaagcagggctacctgtggaagcgagggcacctgagaaggaactgggccgaacgctggttccagctgcagcccagctgcctctgctactttgggagtgaagagtgcaaagagaaaaggggcattatcccgctggatgcacactgctgcgtggaggtgctgccagaccgcgacggaaagcgctgcatgttctgtgtgaagacagccaaccgcacgtatgagatgagcgcctcagacacgcgccagcgccaggagtggacagctgccatccagatggcgatccggctgcaggccgaggggaagacgtccctacacaaggacctgaagcagaaacggcgcgagcagcgggagcagcgggagcggcgccgggcggccaaggaagaggagctgctgcggctgcagcagctgcaggaggagaaggagcggaagctgcaggagctggagctgctgcaggaggcgcagcggcaggccgagcggctgctgcaggaggaggaggaacggcgccgcagccagcaccgcgagctgcagcaggcgctcgagggccaactgcgcgaggcggagcaggcccgggcctccatgcaggctgagatggagctgaaggaggaggaggctgcccggcagcggcagcgcatcaaggagctggaggagatgcagcagcggttgcaggaggccctgcaactagaggtgaaagctcggcgagatgaagaatctgtgcgaatcgctcagaccagactgctggaagaggaggaagagaagctgaagcagttgatgcagctgaaggaggagcaggagcgctacatcgaacgggcgcagcaggagaaggaagagctgcagcaggagatggcacagcagagccgctccctgcagcaggcccagcagcagctggaggaggtgcggcagaaccggcagagggctgacgaggatgtggaggctgcccagagaaaactgcgccaggccagcaccaacgtgaaacactggaatgtccagatgaaccggctgatgcatccaattgagcctggagataagcgtccggtcaccagcagctccttctcaggcttccagccccctctgcttgcccaccgtgactcctccctaaagcgcctgacccgctggggatcccagggcaacaggaccccctcgcccaacagcaatgagcagcagaagtccctcaatggtggggatgaggctcctgccccggcttccacccctcaggaagataaactggatccagcaccagaaaattagcctctcttagccccttgttcttcccaatgtcatatccaccaggacctggccacagctggcctgtgggtgatcccagctcttactaggagagggagctgaggtcctggtgccaggggcccaggccctccaaccataaacagtccaggatggaacctggttcacccttcataccagctccaagccccagaccatgggagctgtctgggatgttgatccttgagaacttggccctgtgctttagacccaaggacccgattcttgggctaggaaagagagaacaagcaagccggggctacctgcccccaggtggccaccaagttgtggaagcacatttctaaataaaaactgctcttagaatgaa

SEQ ID NO: 125894 - DNA, 385 bp, Homo sapiens
  Payload ID: 4660
  Gene Symbol: DEF6
  Gene Name: DEF6 guanine nucleotide exchange factor
  ENST ID: ENST00000444278
  CDS Start-End: 1-385
ccgagatgatgatgacggccctgtgtccagccagggatacatgccctacctcaacaagtacatcctggacaaggatgccttccgcctctggtgcctcttcaacttcctgtctgaggacaagtaccctctgatcatggttcctgatgaggtggaatacctgctgaaaaaggtactcagcagcatgagcttggaggtgagcttgggtgagctggaggagcttctggcccaggaggcccaggtggcccagaccaccggggggctcagcgtctggcagttcctggagctcttcaattcgggccgctgcctgcggggcgtgggccgggacaccctcagcatggccatccacgaggtctaccaggagctcatccaagatgtcctgaagcag

SEQ ID NO: 125895 - DNA, 731 bp, Homo sapiens
  Payload ID: 4661
  Gene Symbol: DAD1
  Gene Name: defender against cell death 1
  Uniprot ID: P61803
  ENST ID: ENST00000250498
  CDS Start-End: 113-454
ggggagggcggagttaggtcacgagggtgcgcatgcgcaaacagcacatccggtgtggtcgacgggtcctccaagagtttggggcgcggaccggagtaccttgcgtgcagttatgtcggcgtcggtagtgtctgtcatttcgcggttcttagaagagtacttgagctccactccgcagcgtctgaagttgctggacgcgtacctgctgtatatactgctgaccggggcgctgcagttcggttactgtctcctcgtggggaccttccccttcaactcttttctctcgggcttcatctcttgtgtggggagtttcatcctagcggtttgcctgagaatacagatcaacccacagaacaaagcggatttccaaggcatctccccagagcgagcctttgctgattttctctttgccagcaccatcctgcaccttgttgtcatgaactttgttggctgaatcattctcatttacttaattgaggagtaggagactaaaagaatgttcactctttgaatttcctggataagagttctggagatggcagcttattggacacatggattttcttcagatttgcacttactgctagctctgctttttatgcaggagaaaagcccagagttcactgtgtgtcagaacaactttctaacaaacatttattaatccagcctctgcctttcattaaatgtaaccttttgccttccaaattaaagaactccatgccactcctcca

SEQ ID NO: 125896 - DNA, 441 bp, Homo sapiens
  Payload ID: 4661
  Gene Symbol: DAD1
  Gene Name: defender against cell death 1
  ENST ID: ENST00000538631
  CDS Start-End: 1-237
atgtcggcgtcggtagtgtctgtcatttcgcggttcttagaagagtacttgagctccactccgcagcgtctgaagttgctggacgcgtacctgctgtatatactgctgaccggggcgctgcagttcggttactgtctcctcgtggggaccttccccttcaactcttttctctcgggcttcatctcttgtgtggggagtttcatcctagcgggttcactctttgaatttcctggataagagttctggagatggcagcttattggacacatggattttcttcagatttgcacttactgctagctctgctttttatgcaggagaaaagcccagagttcactgtgtgtcagaacaactttctaacaaacatttattaatccagcctctgcctttcattaaatgtaaccttttgccttccaaattaaagaactccatgccactcct

SEQ ID NO: 125897 - DNA, 501 bp, Homo sapiens
  Payload ID: 4661
  Gene Symbol: DAD1
  Gene Name: defender against cell death 1
  ENST ID: ENST00000543337
  CDS Start-End: 66-323
atccggtgtggtcgacgggtcctccaagagtttggggcgcggaccggagtaccttgcgtgcagttatgtcggcgtcggtagtgtctgtcatttcgcggttcttagaagagtacttgagctccactccgcagcgtctgaagttgctggacgcgtacctgctgtatatactgctgaccggggcgctgcagttcgtttgcctgagaatacagatcaacccacagaacaaagcggatttccaaggcatctccccagagcgagcctttgctgattttctctttgccagcaccatcctgcaccttgttgtcatgaactttgttggctgaatcattctcatttacttaattgaggagtaggagactaaaagaatgttcactctttgaatttcctggataagagttctggagatggcagcttattggacacatggattttcttcagatttgcacttactgctagctctgctttttatgcaggagaaaagcccagagttcactgtgtgtc

SEQ ID NO: 125898 - DNA, 591 bp, Homo sapiens
  Payload ID: 4661
  Gene Symbol: DAD1
  Gene Name: defender against cell death 1
  ENST ID: ENST00000535847
  CDS Start-End: 64-261
ccggtgtggtcgacgggtcctccaagagtttggggcgcggaccggagtaccttgcgtgcagttatgtcggcgtcggtagtgtctgtcatttcgcggttcttagaagagtacttgagctccactccgcagcgtctgaagttgctggacgcgtacctgctgtatatactgctgaccggggcgctgcatttgcctgagaatacagatcaacccacagaacaaagcggatttccaaggcatctccccagagcgagcctttgctgattttctctttgccagcaccatcctgcaccttgttgtcatgaactttgttggctgaatcattctcatttacttaattgaggagtaggagactaaaagaatgttcactctttgaatttcctggataagagttctggagatggcagcttattggacacatggattttcttcagatttgcacttactgctagctctgctttttatgcaggagaaaagcccagagttcactgtgtgtcagaacaactttctaacaaacatttattaatccagcctctgcctttcattaaatgtaaccttttgccttccaaattaaagaactccatgccactcctc

SEQ ID NO: 125899 - DNA, 406 bp, Homo sapiens
  Payload ID: 4662
  Gene Symbol: DEFA1
  Gene Name: defensin, alpha 1
  Uniprot ID: P59665
  ENST ID: ENST00000382679
  CDS Start-End: 1-285
atgaggaccctcgccatccttgctgccattctcctggtggccctgcaggcccaggctgagccactccaggcaagagctgatgaggttgctgcagccccggagcagattgcagcggacatcccagaagtggttgtttcccttgcatgggacgaaagcttggctccaaagcatccaggctcaaggaaaaacatggcctgctattgcagaataccagcgtgcattgcaggagaacgtcgctatggaacctgcatctaccagggaagactctgggcattctgctgctgagcttgcagaaaaagaaaaatgagctcaaaatttgctttgagagctacagggaattgctattactcctgtaccttctgctcaatttcctttcctcatcccaaataaatgccttgttacaaga

SEQ ID NO: 125900 - DNA, 485 bp, Homo sapiens
  Payload ID: 4662
  Gene Symbol: DEFA1
  Gene Name: defensin, alpha 1
  Uniprot ID: P59665
  ENST ID: ENST00000382692
  CDS Start-End: 81-365
ctatagaagacctgggacagaggactgctgtctgccctctctggtcaccctgcctagctagaggatctgtgaccccagccatgaggaccctcgccatccttgctgccattctcctggtggccctgcaggcccaggctgagccactccaggcaagagctgatgaggttgctgcagccccggagcagattgcagcggacatcccagaagtggttgtttcccttgcatgggacgaaagcttggctccaaagcatccaggctcaaggaaaaacatggcctgctattgcagaataccagcgtgcattgcaggagaacgtcgctatggaacctgcatctaccagggaagactctgggcattctgctgctgagcttgcagaaaaagaaaaatgagctcaaaatttgctttgagagctacagggaattgctattactcctgtaccttctgctcaatttcctttcctcatcccaaataaatgccttgttacaag

SEQ ID NO: 125901 - DNA, 491 bp, Homo sapiens
  Payload ID: 4663
  Gene Symbol: DEFA1B
  Gene Name: defensin, alpha 1B
  Uniprot ID: P59665
  ENST ID: ENST00000382689
  CDS Start-End: 86-370
ccttgctatagaagacctgggacagaggactgctgtctgccctctctggtcaccctgcctagctagaggatctgtgaccccagccatgaggaccctcgccatccttgctgccattctcctggtggccctgcaggcccaggctgagccactccaggcaagagctgatgaggttgctgcagccccggagcagattgcagcggacatcccagaagtggttgtttcccttgcatgggacgaaagcttggctccaaagcatccaggctcaaggaaaaacatggcctgctattgcagaataccagcgtgcattgcaggagaacgtcgctatggaacctgcatctaccagggaagactctgggcattctgctgctgagcttgcagaaaaagaaaaatgagctcaaaatttgctttgagagctacagggaattgctattactcctgtaccttctgctcaatttcctttcctcatcccaaataaatgccttgttacaaga

SEQ ID NO: 125902 - DNA, 485 bp, Homo sapiens; identical to SEQ ID NO: 125900
  Payload ID: 4663
  Gene Symbol: DEFA1B
  Gene Name: defensin, alpha 1B
  Uniprot ID: P59665
  ENST ID: ENST00000535841
  CDS Start-End: 81-365

SEQ ID NO: 125903 - DNA, 498 bp, Homo sapiens
  Payload ID: 4664
  Gene Symbol: DEFA3
  Gene Name: defensin, alpha 3, neutrophil-specific
  Uniprot ID: P59666
  ENST ID: ENST00000327857
  CDS Start-End: 93-377
ggctgctccttgctatagaagacctgggacagaggactgctgtctgccctctctggtcaccctgcctagctagaggatctgtgaccccagccatgaggaccctcgccatccttgctgccattctcctggtggccctgcaggcccaggctgagccactccaggcaagagctgatgaggttgctgcagccccggagcagattgcagcggacatcccagaagtggttgtttcccttgcatgggacgaaagcttggctccaaagcatccaggctcaaggaaaaacatggactgctattgcagaataccagcgtgcattgcaggagaacgtcgctatggaacctgcatctaccagggaagactctgggcattctgctgctgagcttgcagaaaaagaaaaatgagctcaaaatttgctttgagagctacagggaattgctattactcctgtaccttctgctcaatttcctttcctcatctcaaataaatgccttgttacaaga

SEQ ID NO: 125904 - DNA, 385 bp, Homo sapiens
  Payload ID: 4664
  Gene Symbol: DEFA3
  Gene Name: defensin, alpha 3, neutrophil-specific
  ENST ID: ENST00000616150
  CDS Start-End: 51-335
tctgccctctctggtcaccctgcctagctagaggatctgtgaccccagccatgaggaccctcgccatccttgctgccattctcctggtggccctgcaggcccaggctgagccactccaggcaagagctgatgaggttgctgcagccccggagcagattgcagcggacatcccagaagtggttgtttcccttgcatgggacgaaagcttggctccaaagcatccaggctcaaggaaaaacatggcctgctattgcagaataccagcgtgcattgcaggagaacgtcgctatggaacctgcatctaccagggaagactctgggcattctgctgctgagcttgcagaaaaagaaaaatgagctcaaaatttgctttgagagctacagg

SEQ ID NO: 125905 - DNA, 617 bp, Homo sapiens
  Payload ID: 4665
  Gene Symbol: DEFA4
  Gene Name: defensin, alpha 4, corticostatin
  Uniprot ID: P12838
  ENST ID: ENST00000297435
  CDS Start-End: 126-419
ccttaaataaggaagtcctctcctctgtgtgcatggctgctcttgctacataagacctggaacacaggactgctgtctgccctctctgctcgccctgcctagcttgaggatctgtcaccccagccatgaggattatcgccctcctcgctgctattctcttggtagccctccaggtccgggcaggcccactccaggcaagaggtgatgaggctccaggccaggagcagcgtgggccagaagaccaggacatatctatttcctttgcatgggataaaagctctgctcttcaggtttcaggctcaacaaggggcatggtctgctcttgcagattagtattctgccggcgaacagaacttcgtgttgggaactgcctcattggtggtgtgagtttcacatactgctgcacgcgtgtcgattaacgttctgctgtccaagagaatgtcatgctgggaacgccatcatcggtggtgttagcttcacatgcttctgcagctgagcttgcagaatagagaaaaatgagctcataatttgctttgagagctacaggaaatggttgtttctcctatactttgtccttaacatctttcttgatcctaaatatatatctcgtaacaaga

SEQ ID NO: 125906 - DNA, 449 bp, Homo sapiens
  Payload ID: 4666
  Gene Symbol: DEFA5
  Gene Name: defensin, alpha 5, Paneth cell-specific
  Uniprot ID: Q01523
  ENST ID: ENST00000330590
  CDS Start-End: 38-322
tccactcctgctctccctcctgcaggtgaccccagccatgaggaccatcgccatccttgctgccattctcctggtggccctgcaggcccaggctgagtcactccaggaaagagctgatgaggctacaacccagaagcagtctggggaagacaaccaggaccttgctatctcctttgcaggaaatggactctctgctcttagaacctcaggttctcaggcaagagccacctgctattgccgaaccggccgttgtgctacccgtgagtccctctccggggtgtgtgaaatcagtggccgcctctacagactctgctgtcgctgagcttcctagatagaaaccaaagcagtgcaagattcagttcaaggtcctgaaaaaagaaaaacattttactctgtgtaccttgtgtctttctaaatttctctctccaaaataaagttcaagcattaaa

SEQ ID NO: 125907 - DNA, 469 bp, Homo sapiens
  Payload ID: 4667
  Gene Symbol: DEFA6
  Gene Name: defensin, alpha 6, Paneth cell-specific
  Uniprot ID: Q01524
  ENST ID: ENST00000297436
  CDS Start-End: 42-344
acacatctgctcctgctctctctcctccagcgaccctagccatgagaaccctcaccatcctcactgctgttctcctcgtggccctccaggccaaggctgagccactccaagctgaggatgatccactgcaggcaaaagcttatgaggctgatgcccaggagcagcgtggggcaaatgaccaggactttgccgtctcctttgcagaggatgcaagctcaagtcttagagctttgggctcaacaagggctttcacttgccattgcagaaggtcctgttattcaacagaatattcctatgggacctgcactgtcatgggtattaaccacagattctgctgcctctgagggatgagaacagagagaaatatattcataatttactttatgacctagaaggaaactgtcgtgtgtcctatacattgccatcaactttgtttcctcatctcaaataaagtcctttcagcaagttc

SEQ ID NO: 125908 - DNA, 478 bp, Homo sapiens
  Payload ID: 4668
  Gene Symbol: DEFB1
  Gene Name: defensin, beta 1
  Uniprot ID: P60022
  ENST ID: ENST00000297439
  CDS Start-End: 166-372
cttgactgtggcacctcccttcagttccgtcgacgaggttgtgcaatccaccagtcttataaatacagtgacgctccagcctctggaagcctctgtcagctcagcctccaaaggagccagcgtctccccagttcctgaaatcctgggtgttgcctgccagtcgccatgagaacttcctaccttctgctgtttactctctgcttacttttgtctgagatggcctcaggtggtaactttctcacaggccttggccacagatctgatcattacaattgcgtcagcagtggagggcaatgtctctattctgcctgcccgatctttaccaaaattcaaggcacctgttacagagggaaggccaagtgctgcaagtgagctgggagtgaccagaagaaatgacgcagaagtgaaatgaactttttataagcattcttttaataaaggaaaattgcttttgaagtatacctcctttgggccaaaa

SEQ ID NO: 125909 - DNA, 518 bp, Homo sapiens
  Payload ID: 4669
  Gene Symbol: DEFB103A
  Gene Name: defensin, beta 103A
  Uniprot ID: P81534
  ENST ID: ENST00000314357
  CDS Start-End: 219-422
caaatccatagggagctctgccttaccattgggttcctaattaactgagtgagtgggtgtgttctgcatggtgagaggcattggaatgatgcatcagaaaacatgtcataatgtcatcactgtaatatgacaagaattgcagctgtggctggaacctttataaagtgaccaagcacaccttttcatccagtctcagcgtggggtgaagcctagcagctatgaggatccattatcttctgtttgctttgctcttcctgtttttggtgcctgttccaggtcatggaggaatcataaacacattacagaaatattattgcagagtcagaggcggccggtgtgctgtgctcagctgccttccaaaggaggaacagatcggcaagtgctcgacgcgtggccgaaaatgctgccgaagaaagaaataaaaaccctgaaacatgacgagagtgttgtaaagtgtggaaatgccttcttaaagtttataaaagtaaaatcaaattacatttttttttcaaaaaaaa

SEQ ID NO: 125910 - DNA, 518 bp, Homo sapiens; identical to SEQ ID NO: 125909
  Payload ID: 4670
  Gene Symbol: DEFB103B
  Gene Name: defensin, beta 103B
  Uniprot ID: P81534
  ENST ID: ENST00000318124
  CDS Start-End: 219-422

SEQ ID NO: 125911 - DNA, 518 bp, Homo sapiens; identical to SEQ ID NO: 125909
  Payload ID: 4670
  Gene Symbol: DEFB103B
  Gene Name: defensin, beta 103B
  Uniprot ID: P81534
  ENST ID: ENST00000613448
  CDS Start-End: 219-422

SEQ ID NO: 125912 - DNA, 281 bp, Homo sapiens
  Payload ID: 4671
  Gene Symbol: DEFB104A
  Gene Name: defensin, beta 104A
  Uniprot ID: Q8WTQ1
  ENST ID: ENST00000314265
  CDS Start-End: 15-233
gcagccccagcattatgcagagacttgtgctgctattagccatttctcttctactctatcaagatcttccagtgagaagcgaatttgaattggacagaatatgtggttatgggactgcccgttgccggaagaaatgtcgcagccaagaatacagaattggaagatgtcccaacacctatgcatgctgtttgagaaaatgggatgagagcttactgaatcgtacaaaaccctgaaacgcagtagtgctggtccctagagtcgctggaagtaggacctcagta

SEQ ID NO: 125913 - DNA, 281 bp, Homo sapiens; identical to SEQ ID NO: 125912
  Payload ID: 4672
  Gene Symbol: DEFB104B
  Gene Name: defensin, beta 104B
  Uniprot ID: Q8WTQ1
  ENST ID: ENST00000316169
  CDS Start-End: 15-233

SEQ ID NO: 125914 - DNA, 281 bp, Homo sapiens; identical to SEQ ID NO: 125912
  Payload ID: 4672
  Gene Symbol: DEFB104B
  Gene Name: defensin, beta 104B
  Uniprot ID: Q8WTQ1
  ENST ID: ENST00000616398
  CDS Start-End: 15-233

SEQ ID NO: 125915 - DNA, 330 bp, Homo sapiens
  Payload ID: 4673
  Gene Symbol: DEFB105A
  Gene Name: defensin, beta 105A
  Uniprot ID: Q8NG35
  ENST ID: ENST00000334773
  CDS Start-End: 52-288
ggtcttctcaaggaaatcccaatctctattccgaagagtcttccctaaaagatggccctgatcaggaagacattttattttctatttgctatgttcttcattttggttcaactgccatcagggtgccaggcaggacttgatttttcccaaccatttccatcaggtgagtttgctgtctgtgagtcgtgcaagcttggtcggggaaaatgcaggaaggagtgcttggagaatgagaagcccgatggaaattgcaggctgaactttctctgctgcagacagaggatctgacaaaccagaccagcacacttctggccttagaagcagacctgg

SEQ ID NO: 125916 - DNA, 331 bp, Homo sapiens
  Payload ID: 4674
  Gene Symbol: DEFB105B
  Gene Name: defensin, beta 105B
  Uniprot ID: Q8NG35
  ENST ID: ENST00000335510
  CDS Start-End: 53-289
gggtcttctcaaggaaatcccaatctctattccgaagagtcttccctaaaagatggccctgatcaggaagacattttattttctatttgctatgttcttcattttggttcaactgccatcagggtgccaggcaggacttgatttttcccaaccatttccatcaggtgagtttgctgtctgtgagtcgtgcaagcttggtcggggaaaatgcaggaaggagtgcttggagaatgagaagcccgatggaaattgcaggctgaactttctctgctgcagacagaggatctgacaaaccagaccagcacacttctggccttagaagcagacctgg

SEQ ID NO: 125917 - DNA, 331 bp, Homo sapiens; identical to SEQ ID NO: 125916
  Payload ID: 4674
  Gene Symbol: DEFB105B
  Gene Name: defensin, beta 105B
  Uniprot ID: Q8NG35
  ENST ID: ENST00000611610
  CDS Start-End: 53-289

SEQ ID NO: 125918 - DNA, 303 bp, Homo sapiens
  Payload ID: 4675
  Gene Symbol: DEFB106A
  Gene Name: defensin, beta 106A
  Uniprot ID: Q8N104
  ENST ID: ENST00000335186
  CDS Start-End: 6-203
cagtcatgaggactttcctctttctctttgccgtgctcttctttctgaccccagccaagaatgcattttttgatgagaaatgcaacaaacttaaagggacatgcaagaacaattgcgggaaaaatgaagaacttattgctctctgccagaagtctctgaaatgctgtcggaccatccagccatgtgggagcattatagattaatgcagaagatttaggtttccagagaagcatacataacctagcttctttttactcttgcctctgctgtaggcagacactttaataaaaataaatgactgtc

SEQ ID NO: 125919 - DNA, 316 bp, Homo sapiens
  Payload ID: 4676
  Gene Symbol: DEFB106B
  Gene Name: defensin, beta 106B
  Uniprot ID: Q8N104
  ENST ID: ENST00000335479
  CDS Start-End: 19-216
ctcaagacccacccagtcatgaggactttcctctttctctttgccgtgctcttctttctgaccccagccaagaatgcattttttgatgagaaatgcaacaaacttaaagggacatgcaagaacaattgcgggaaaaatgaagaacttattgctctctgccagaagtctctgaaatgctgtcggaccatccagccatgtgggagcattatagattaatgcagaagatttaggtttccagagaagcatacataacctagcttctttttactcttgcctctgctgtaggcagacactttaataaaaataaatgactgtc

SEQ ID NO: 125920 - DNA, 316 bp, Homo sapiens; identical to SEQ ID NO: 125919
  Payload ID: 4676
  Gene Symbol: DEFB106B
  Gene Name: defensin, beta 106B
  Uniprot ID: Q8N104
  ENST ID: ENST00000621252
  CDS Start-End: 19-216

SEQ ID NO: 125921 - DNA, 389 bp, Homo sapiens
  Payload ID: 4677
  Gene Symbol: DEFB107A
  Gene Name: defensin, beta 107A
  Uniprot ID: Q8IZN7
  ENST ID: ENST00000335021
  CDS Start-End: 89-301
tcagggcagtagaacatattttaatcaatgccccttgataaaagagcttgattccagctactgcacttccttcatcagctctccactgatgcctggagccatgaaaatatttgtctttattttggctgctctcattcttcttgctcaaattttccaagccaggacagcaattcatagagcactaattagtaagagaatggaaggtcactgtgaagccgaatgtcttacctttgaagtaaagattgggggctgtagagctgaattagcaccattttgctgcaaaaacagaaagaaacattaaaaactaagcaccagctgcaagaaacaaagaggtgaagattctctggctgcgatatcagtgggataaatctctctggaccatctctctt

SEQ ID NO: 125922 - DNA, 389 bp, Homo sapiens; identical to SEQ ID NO: 125921
  Payload ID: 4678
  Gene Symbol: DEFB107B
  Gene Name: defensin, beta 107B
  Uniprot ID: Q8IZN7
  ENST ID: ENST00000355602
  CDS Start-End: 89-301

SEQ ID NO: 125923 - DNA, 389 bp, Homo sapiens; identical to SEQ ID NO: 125921
  Payload ID: 4678
  Gene Symbol: DEFB107B
  Gene Name: defensin, beta 107B
  Uniprot ID: Q8IZN7
  ENST ID: ENST00000615431
  CDS Start-End: 89-301

SEQ ID NO: 125924 - DNA, 222 bp, Homo sapiens
  Payload ID: 4679
  Gene Symbol: DEFB108B
  Gene Name: defensin, beta 108B
  Uniprot ID: Q8NET1
  ENST ID: ENST00000328698
  CDS Start-End: 1-222
atgaggattgctgtcctcctcttcgccattttcttctttatgagccaagttctaccagccaggggcaaattcaaggagatctgtgaacgtccaaatggctcctgtcgggacttttgccttgaaacagaaatccatgttgggagatgtttaaatagccaaccctgctgcctgcctctggggcatcaaccaagaattgagagcactacacccaaaaaggactga

SEQ ID NO: 125925 - DNA, 384 bp, Homo sapiens
  Payload ID: 4680
  Gene Symbol: DEFB110
  Gene Name: defensin, beta 110
  Uniprot ID: Q30KQ9
  ENST ID: ENST00000371148
  CDS Start-End: 47-250
tgaaaaaggaggtctgttgccccctttttttaagaaactctctaccatgaagattcaactttttttctttattctgcacttttgggtcacaattttaccagccaaaaagaaatatcctgagtatggtagcttggacttgaggagagagtgcagaataggtaatggtcaatgtaaaaatcagtgtcatgaaaatgaaattaggattgcttactgcataagacctggaactcattgctgcttgcagcagtaacgatgacagaagaaaagagtcacaagctccaagaagagagaccagcgttattaagttttcccagcacatccttcaaggcgtgtgtgtctctataatacacaagaactaaataaaaattaatgttgaaccattca

SEQ ID NO: 125926 - DNA, 189 bp, Homo sapiens
  Payload ID: 4680
  Gene Symbol: DEFB110
  Gene Name: defensin, beta 110
  Uniprot ID: Q30KQ9
  ENST ID: ENST00000393660
  CDS Start-End: 1-189
atgaagattcaactttttttctttattctgcacttttgggtcacaattttaccagccagaagcaattttgaaccaaagtatagatttgaaagatgcgaaaaagtgagaggaatatgtaaaacgttttgtgatgatgttgagtatgattatggatactgcattaaatggagaagtcagtgctgcgtataa

SEQ ID NO: 125927 - DNA, 342 bp, Homo sapiens
  Payload ID: 4681
  Gene Symbol: DEFB112
  Gene Name: defensin, beta 112
  Uniprot ID: Q30KQ8
  ENST ID: ENST00000322246
  CDS Start-End: 1-342
atgaaattattgacaaccatatgtagactgaaacttgaaaaaatgtactcaaagacaaatacatcttccacaatatttgaaaaggcccgacatgggacagagaaaatcagcacagccagaagtgaagggcaccatatcacctttagtaggtggaagtcatgtacagcgattggaggtcgatgtaaaaatcaatgtgatgatagtgaatttaggatttcatactgtgcaagacctacaactcattgctgcgtgacagaatgtgaccctacggacccaaataattggatcccaaaggactcagtagggactcaagaatggtaccctaaagactcacgtcattga

SEQ ID NO: 125928 - DNA, 249 bp, Homo sapiens
  Payload ID: 4682
  Gene Symbol: DEFB113
  Gene Name: defensin, beta 113
  Uniprot ID: Q30KQ7
  ENST ID: ENST00000398718
  CDS Start-End: 1-249
atgaagatactttgtatttttctgacctttgtcttcactgtgtcttgtggtccatcagttccacagaaaaaaacaagagaagttgcagagagaaaaagagaatgtcagcttgttcgtggtgcttgcaagccggaatgcaacagctgggaatatgtatattattactgcaatgttaacccctgctgtgcggtatgggaataccaaaagccaatcattaacaaaatcactagtaaactccatcaaaaataa

SEQ ID NO: 125929 - DNA, 253 bp, Homo sapiens
  Payload ID: 4683
  Gene Symbol: DEFB114
  Gene Name: defensin, beta 114
  Uniprot ID: Q30KQ6
  ENST ID: ENST00000322066
  CDS Start-End: 1-210
atgaggatcttttactatctccattttctgtgttatgtgaccttcattctaccagccacatgtaccttggtgaatgctgatcgttgcaccaaacgttacggtcgttgtaaaagagactgtcttgagagtgaaaagcaaatagacatatgttccttaccaagaaaaatttgctgcactgagaaattgtatgaagaagatgatatgttttgaaaagaaaggcatacctctgaacaaagaagttacatgtgcacca

SEQ ID NO: 125930 - DNA, 267 bp, Homo sapiens
  Payload ID: 4684
  Gene Symbol: DEFB115
  Gene Name: defensin, beta 115
  Uniprot ID: Q30KQ5
  ENST ID: ENST00000400552
  CDS Start-End: 1-267
atgctgccagatcatttctcacccctctcaggagacattaaactctctgtcctggccttagttgtccttgtggtcctggctcagactgccccagatggatggatcagaaggtgctattatggaactggcagatgcaggaaatcatgcaaagaaattgagaggaagaaagaaaaatgtggggaaaaacatatttgctgtgtccctaaagaaaaggataaactatcacacattcacgaccaaaaagagacaagtgagctatatatctag

SEQ ID NO: 125931 - DNA, 309 bp, Homo sapiens
  Payload ID: 4685
  Gene Symbol: DEFB116
  Gene Name: defensin, beta 116
  Uniprot ID: Q30KQ4
  ENST ID: ENST00000400549
  CDS Start-End: 1-309
atgtcagtcatgaagccctgtttaatgaccattgccatccttatgatcctggctcaaaagactccaggtggcctgttcagatcccacaatggcaagagccgagagccttggaatccatgtgagctttaccaaggcatgtgcagaaacgcctgcagagaatatgaaatccaatacttaacctgcccaaatgatcaaaagtgctgcctgaaactttctgtgaaaataaccagttctaaaaatgtgaaggaggattacgactctaactccaacttgtcagttacaaacagttcaagctactctcacatttga

SEQ ID NO: 125932 - DNA, 1158 bp, Homo sapiens
  Payload ID: 4686
  Gene Symbol: DEFB118
  Gene Name: defensin, beta 118
  Uniprot ID: Q96PH6
  ENST ID: ENST00000253381
  CDS Start-End: 34-405
cctggatctaccacctcctgcttcccaaggaccatgaaactcctgctgctggctcttcctatgcttgtgctcctaccccaagtgatcccagcctatagtggtgaaaaaaaatgctggaacagatcagggcactgcaggaaacaatgcaaagatggagaagcagtgaaagatacatgcaaaaatcttcgagcttgctgcattccatccaatgaagaccacaggcgagttcctgcgacatctcccacacccttgagtgactcaacaccaggaattattgatgatattttaacagtaaggttcacgacagactactttgaagtaagcagcaagaaagatatggttgaagagtctgaggcgggaaggggaactgagacctctcttccaaatgttcaccatagctcatgacttcctctcggctatcactcacccctgtcctcagagtgataaactaagtcacatacagataaagcactgaaaacaccacagtgaccctcccaccccccaccaatatgtaattctattaatagaaacagctgtgtaaagaagtctaaaattttcactatttccaatgataaactcttcagtgctcttcttgaaatgtcacattatttccacaacaagttataacctatttttagtatttcttgtttgctagtgacctatgcacaacttcaatagcttagttagctattccaacaacaatttcttcatgtatcgttctgtcttctcaacagctgtcttcatggcagcataagtggtcatgatcaaaattctaaatctttgcatctgtgagagtagctactatgacactaaaagctttttttctagaacaggagacacttcaggtgaaagcattcattctcctactaactatggccttggagccaggttttatctctcactgtaggaaattggccgccccaggtgtgagctatgaagactcctttttgccccagtggctttggggttgaaatgctgtcgaaaagcttttatggctctgtagacccatctttttgaccaagccttgatcacacatggacatccaagggtaatcatggacccccaattgtgggtgaaaggatggatcatttatctacctgattactgagagctttatttgtctccctctgatagcaaaaaaaaaaaaaaaaaaaaaaa

SEQ ID NO: 125933 - DNA, 484 bp, Homo sapiens
  Payload ID: 4687
  Gene Symbol: DEFB119
  Gene Name: defensin, beta 119
  Uniprot ID: Q8N690
  ENST ID: ENST00000339144
  CDS Start-End: 108-239
gcccacagccctgctgataaaagcaaagctcatctctgccgtgctgcagggaaccctatttccttcccctgcagctcagccacctcctcctctcaggtctgccagccatgaaacttctttacctgtttcttgccatccttctggccatagaagaaccagtgatatcagctctggtgaggacagtgggatgctgcctggatactgccaggcaaacgccacatccttcgatgcatgggtaacagtggaatttgtagggcctcttgcaaaaagaacgaacagccctacctctattgcagaaattgtcagtcctgctgcctccagtcctacatgaggataagcatttctggcaaagaggaaaataccgactggtcttatgagaagcagtggccaagactaccttgagtgctggtgattaccattctcaagctctctgggcacagagacctgctgtcaacccccctcattaaaattcatgtgcctgcta

SEQ ID NO: 125934 - DNA, 324 bp, Homo sapiens
  Payload ID: 4687
  Gene Symbol: DEFB119
  Gene Name: defensin, beta 119
  Uniprot ID: Q8N690
  ENST ID: ENST00000376315
  CDS Start-End: 1-267
atgaaacttctttacctgtttcttgccatccttctggccatagaagaaccagtgatatcagtagagtgttggatggatggacactgccggttgttgtgcaaagatggtgaagacagcatcatacgctgccgaaatcgtaaacggtgctgtgttcctagtcgttatttaacaatccaaccagtaacaattcatggaatccttggctggaccactcctcagatgtccacaacagctccaaaaatgaagacaaatataactaatagatagaaatgactttgtttcaggttgcttagggtccacatttcattaaaactcacaaatttg

SEQ ID NO: 125935 - DNA, 457 bp, Homo sapiens
  Payload ID: 4687
  Gene Symbol: DEFB119
  Gene Name: defensin, beta 119
  Uniprot ID: Q8N690
  ENST ID: ENST00000376321
  CDS Start-End: 121-375
gttctaattcactgcccacagccctgctgataaaagcaaagctcatctctgccgtgctgcagggaaccctatttccttcccctgcagctcagccacctcctcctctcaggtctgccagccatgaaacttctttacctgtttcttgccatccttctggccatagaagaaccagtgatatcaggcaaacgccacatccttcgatgcatgggtaacagtggaatttgtagggcctcttgcaaaaagaacgaacagccctacctctattgcagaaattgtcagtcctgctgcctccagtcctacatgaggataagcatttctggcaaagaggaaaataccgactggtcttatgagaagcagtggccaagactaccttgagtgctggtgattaccattctcaagctctctgggcacagagacctgctgtcaacccccctcattaaaattcatgtgcctgcta

SEQ ID NO: 125936 - DNA, 389 bp, Homo sapiens
  Payload ID: 4688
  Gene Symbol: DEFB121
  Gene Name: defensin, beta 121
  Uniprot ID: Q5J5C9
  ENST ID: ENST00000376314
  CDS Start-End: 115-345
gctctgccatgctcctcaaggcaataaataccagtctggactgcccagaatggagtcctctgtctgttttaccagttgagaagcctcctatccctccctgatcattcatcattcatgaagctccttcttctgcttttgactgttactctgctcctggcccaggtcaccccagtcatgaaatgttggggcaagtcaggcaggtgcagaacaacatgtaaagaaagtgaagtatactatatattatgcaaaactgaggctaagtgctgtgtggatcccaagtatgtacctgtaaaaccaaaattaacagacacaaatacaagcctggaatcaacttctgcagtctgacacctctcttccaaccttgagtctcaacatcatgggatcctgca

SEQ ID NO: 125937 - DNA, 467 bp, Homo sapiens
  Payload ID: 4689
  Gene Symbol: DEFB123
  Gene Name: defensin, beta 123
  Uniprot ID: Q8N688
  ENST ID: ENST00000376309
  CDS Start-End: 181-384
ccttgttggctgtcctctccctgctgacctaaatgacaaagggaggggtgtccagtcagagtgtgagggctgtacccgtgggcagctgagggagtgcgagccacaggccaggcactctccttctcccattagctcagccgtggcatcggacttgcagcttcattttgggctgccttagccatgaagctccttttgctgactttgactgtgctgctgctcttatcccagctgactccaggtggcacccaaagatgctggaatctttatggcaaatgccgttacagatgctccaagaaggaaagagtctatgtttactgcataaataataaaatgtgctgcgtgaagcccaagtaccagccaaaagaaaggtggtggccattttaactgctttgaagcctgaagccatgaaaatgcagatgaagctcccagtggattcccacactctatcaataaacacctctggctga

SEQ ID NO: 125938 - DNA, 216 bp, Homo sapiens
  Payload ID: 4690
  Gene Symbol: DEFB124
  Gene Name: defensin, beta 124
  Uniprot ID: Q8NES8
  ENST ID: ENST00000317676
  CDS Start-End: 1-216
atgacacagctgcttctgttccttgtggctctcctggttctgggtcatgtgccatcagggagaagtgaattcaaacggtgctggaagggtcaaggggcctgccaaacttactgcacaaggcaagaaacttacatgcacctgtgcccggatgcgtccctgtgctgtctctcctatgcattgaaacctccaccggtccccaagcatgaatatgagtag

SEQ ID NO: 125939 - DNA, 587 bp, Homo sapiens
  Payload ID: 4691
  Gene Symbol: DEFB125
  Gene Name: defensin, beta 125
  Uniprot ID: Q8N687
  ENST ID: ENST00000382410
  CDS Start-End: 1-471
atgaatatcctgatgctgaccttcattatctgtgggttgctaactcgggtgaccaaaggtagctttgaaccccaaaaatgttggaagaataatgtaggacattgcagaagacgatgtttagatactgaaaggtacatacttctttgtaggaacaagctatcatgctgcatttctataatatcacatgaatatactcgacgaccagcatttcctgtgattcacctagaggatataacattggattatagtgatgtggactcttttactggttccccagtatctatgttgaatgatctgataacatttgacacaactaaatttggagaaaccatgacacctgagaccaatactcctgagactactatgccaccatctgaggccactactcccgagactactatgccaccatctgagactgctacttccgagactatgccaccaccttctcagacagctcttactcataattaattaacatttacttctggtatggaacaactagaaatactgctggaaataatatccaaagagctgattctaccaatccaatttcaccaggaaaattccatcagggattggatgaccat

SEQ ID NO: 125940 - DNA, 655 bp, Homo sapiens
  Payload ID: 4692
  Gene Symbol: DEFB126
  Gene Name: defensin, beta 126
  Uniprot ID: Q9BYW3
  ENST ID: ENST00000382398
  CDS Start-End: 261-596
gccatacacttcagcagagtttgcaacttctcttctaagtctttatccttcccccaaggcatgcctagcacaggactcttgaacagtgatgcctcaattagagttgctagccaatagattgaagctatgttggcacaatatcctacatcctcccgatctactggctgagcccaaccccacctaagaaggacaataaagatctgtgttcagagtcatactgaatagagacttctggactctatagaacccactgcctcctgatgaagtccctactgttcacccttgcagtttttatgctcctggcccaattggtctcaggtaattggtatgtgaaaaagtgtctaaacgacgttggaatttgcaagaagaagtgcaaacctgaagagatgcatgtaaagaatggttgggcaatgtgcggcaaacaaagggactgctgtgttccagctgacagacgtgctaattatcctgttttctgtgtccagacaaagactacaagaatttcaacagtaacagcaacaacagcaacaacaactttgatgatgactactgcttcgatgtcttcgatggctcctacccccgtttctcccactggttgaacattccagcctctgtctcctgctctaggatccccgactcattaaagcaaagaggctta

SEQ ID NO: 125941 - DNA, 514 bp, Homo sapiens
  Payload ID: 4693
  Gene Symbol: DEFB127
  Gene Name: defensin, beta 127
  Uniprot ID: Q9H1M4
  ENST ID: ENST00000382388
  CDS Start-End: 76-375
ctctgaggaaggtagcatagtgtgcagttcactggaccaaaagctttggctgcacctcttctggaaagcctggccatggggctcttcatgatcattgcaattctgctgttccagaaacccacagtaaccgaacaacttaagaagtgctggaataactatgtacaaggacattgcaggaaaatctgcagagtaaatgaagtgcctgaggcactatgtgaaaatgggagatactgttgcctcaatatcaaggaactggaagcatgtaaaaaaattacaaagccacctcgtccaaagccagcaacacttgcactgactcttcaagactatgttacaataatagaaaatttcccaagcctgaagacacagtctacataaatcaaatacaatttcgttttcacttgcttctcaacctagtctaataaactaaggtgatgagatatacatcttcttccttttggtttcttgatccttaaaatgaccttcgagcatattctaataaagtgcattgccagtt

SEQ ID NO: 125942 - DNA, 373 bp, Homo sapiens
  Payload ID: 4694
  Gene Symbol: DEFB128
  Gene Name: defensin, beta 128
  Uniprot ID: Q7Z7B8
  ENST ID: ENST00000334391
  CDS Start-End: 59-340
ggcacacagaccactggacaaagttctgctgcctctttctcttgggaagtctgtaaatatgaagctgtttctggttctcattattctgctgtttgaggtactcacagacggggcaagactcaaaaaatgcttcaataaagtaacaggctattgcaggaagaaatgcaaggtaggagaaagatatgaaataggatgtctaagtgggaaattatgttgtgctaatgatgaagaagagaaaaaacatgtgtcatttaagaagccacatcaacattctggtgagaagctgagtgtgctgcaggattacatcatcttacccaccatcaccattttcacagtctaatcctaaatctagcccttgtctcgctggtctcca

SEQ ID NO: 125943 - DNA, 698 bp, Homo sapiens
  Payload ID: 4695
  Gene Symbol: DEFB129
  Gene Name: defensin, beta 129
  Uniprot ID: Q9H1M3
  ENST ID: ENST00000246105
  CDS Start-End: 32-583
agattcaaggcttcctctctggcacccaaccatgaagctcctttttcctatctttgccagcctcatgctacagtaccaggtgaacacagaatttattggcttgagacgctgtttaatgggtttggggagatgcagggatcactgcaatgtggatgaaaaagagatacagaaatgcaagatgaaaaaatgttgtgttggaccaaaagtggttaaattgattaaaaactacctgcaatatggaacaccaaatgtacttaatgaagacgtccaagaaatgctaaaacctgccaagaattctagtgctgtgatacaaagaaaacatattttatctgttctcccccaaatcaaaagcactagcttttttgctaataccaactttgtcatcattccaaatgccacccctatgaactctgccaccatcagcactatgaccccaggacagatcacatacactgctacttctaccaagagtaacaccaaagaaagcagagattctgccactgcctcgccaccaccagcaccacctccaccaaacatactgccaacaccatcactggagctagaggaagcagaagagcagtaatgtggatctttcccttaaaactccaagttcctctctatttttgctatctataaaatgacatagaactgtttcctctgtcatcagtcattcaataaacactgtttgagcacctaca

SEQ ID NO: 125944 - DNA, 240 bp, Homo sapiens
  Payload ID: 4696
  Gene Symbol: DEFB130
  Gene Name: defensin, beta 130
  Uniprot ID: Q30KQ2
  ENST ID: ENST00000400079
  CDS Start-End: 1-240
atgaaactccattcccttatttctgttctcctcctctttgtgactttaataccaaaaggaaagactggcgttattccaggacaaaaacagtgtattgctttgaaaggggtgtgcagagacaaactatgcagcacactagatgataccattggtatatgtaatgaaggaaaaaaatgttgtagaaggtggtggatacttgagccctatccaactccggttcccaaaggaaaatctccttag

SEQ ID NO: 125945 - DNA, 213 bp, Homo sapiens
  Payload ID: 4697
  Gene Symbol: DEFB131
  Gene Name: defensin, beta 131
  Uniprot ID: P59861
  ENST ID: ENST00000334879
  CDS Start-End: 1-213
atgagggtcttgttttttgtctttggagtcctttccttgatgttcacagttcctccagccagaagcttcatttctaatgatgaatgtccttcagaatattatcattgcagactgaagtgcaatgctgatgaacatgcaattagatactgtgctgacttcagcatctgctgcaaactgaagatcattgaaattgacggacaaaagaagtggtga

SEQ ID NO: 125946 - DNA, 2121 bp, Homo sapiens
  Payload ID: 4698
  Gene Symbol: DEFB132
  Gene Name: defensin, beta 132
  Uniprot ID: Q7Z7B7
  ENST ID: ENST00000382376
  CDS Start-End: 44-331
ctccattaaaccaccaccagctccccaagccaccccttcagccatgaagttcctgctcctggtcttggcagccctcggattcctgacccaggtgatcccagccagtgcaggtgggtcaaaatgtgtgagtaacaccccaggatactgcaggacatgttgccactggggggagacagcattgttcatgtgcaacgcttccagaaaatgctgcatcagctactccttcctgccgaagcctgacctaccacagctcatcggtaaccactggcaatcaaggagaagaaacacacaaaggaaagacaagaagcaacaaacgaccgtaacatcataataaccactgctatcgcctccaccaactcagagaaatatcatttccacagttccaattcctcctacattgctgagtactagccaaggctcctctttatggggcagatatctatagccaaccccaaaacttctgtcttctatcattctgtcattcatctagtaactaatttggagtttgtatctatcttacgagaacaatcatcatgcagattcgtccacaggggatctgtcagtttgggtcctccaaatgaaaaatgtcaagacagaattggacatgcaaaagattgactgggagaacacacctctgatggacaaaggtgagacagagcagccacaggcagggagagccttcagactgcaacgctggcctgatacgtgtcaaaggagagagggatagaggaggattgaatagaaggagactaagactgcagctctaagaaagtctcagccaaacagatggggaggcccaaagcaaggcttgcccctcagaggagctcacgcagggcaggaatagccaggttctcatatcccaggggttcagactttggctgagaacagcccctggagaacatggggtgactgctaccataggtctggaagtatgaggctgtccaccaactatccccttgaagcaagttctcttgaaaggaaatctaaacagtgcacccccatggctgccacggagtataaggagggagagaaaggagctgaaagtctaggtttggccagctaggtagactgacttgtgaggtatttatttattcatttgagtaacaaagcagacagaatacatagccaccattggtagtacaccccaaaagcaaggatggcatgatgctggtgactcaaacgtgcctactcatggtgtcaaattggcataatcctcttgggaagctgtgtggaaataagcacagagaagcagaactctaattgcttaatccactaaacattacttctgggaattggctcatcataaattatccaagagaagcacaaagttatgggcacaaaggttttccatataatattatttaaaatgctgagaaaatgaaaaaatctaaatggtgaaatatatactaatgccatctataaatacaaacaaatagaatgtttatagaataatggaacataataacattattcaaaattgcatttatgctatagttgtcaaaattgtctccttatatgatacaaaactcatgaaaattatgacttttttgtttggttggaaagcagaattatgcataaatttcctcttacagttcgatgcccattagttttatataacatttatttgacacgtactgacttctatctgagaagaacaaaccaaaacactcaggcctaaataattaaaaacggtcctaaaaactagcaaaccagataagaaaagatgttaatgcccattccctaacttatgtcttagaccaaaattaattctagatggttttaaaatgacagtgtaaaagtaaagtattaaaagattgtgtggtcaaatattcaatttaagagcaaggaaattcttataaatataacaatagaggcagaactcatgtaagaataaattgattaggtggtattaaatattaagttcttatgtatgtcaaaagatatcattttgaaattcatccatcttattgggtattgcaggagttcattcctttttgtttataaatactcttccgtcatatgaatagtattcatttgtatactggtttgttgatggacatttgggttgttcccagtttatggctattacaaataaagcttctatgaacatttatgtacaaa

SEQ ID NO: 125947 - DNA, 186 bp, Homo sapiens
  Payload ID: 4699
  Gene Symbol: DEFB133
  Gene Name: defensin, beta 133
  Uniprot ID: Q30KQ1
  ENST ID: ENST00000398721
  CDS Start-End: 1-186
atgaagattcacgtctttctctttgttttatttttctttctggtccccattgccaccagggtgaaatgtgccgtgaaagacacctatagttgctttatcatgagaggcaaatgtcgacatgagtgtcatgattttgaaaaaccaattggtttctgcacaaaactaaatgccaactgttatatgtag

SEQ ID NO: 125948 - DNA, 314 bp, Homo sapiens
  Payload ID: 4700
  Gene Symbol: DEFB134
  Gene Name: defensin, beta 134
  Uniprot ID: Q4QY38
  ENST ID: ENST00000382205
  CDS Start-End: 62-262
ctgttccctgacagccgatgtcagaccctgccactagcctccttaacagaagttcccagccatgaagcctctccttgttgtgtttgtctttcttttcctttgggatccagtgctggcaggtataaattcattatcatcagaaatgcacaagaaatgctataaaaatggcatctgcagacttgaatgctatgagagtgaaatgttagttgcctactgtatgtttcagctggagtgctgtgtcaaaggaaatcctgcaccctgacataagaaaccaatgaatggccactatcctgtaggcccttgattctgccatc

SEQ ID NO: 125949 - DNA, 1068 bp, Homo sapiens
  Payload ID: 4700
  Gene Symbol: DEFB134
  Gene Name: defensin, beta 134
  Uniprot ID: Q4QY38
  ENST ID: ENST00000526438
  CDS Start-End: 62-262
ctgttccctgacagccgatgtcagaccctgccactagcctccttaacagaagttcccagccatgaagcctctccttgttgtgtttgtctttcttttcctttgggatccagtgctggcaggtataaattcattatcatcagaaatgcacaagaaatgctataaaaatggcatctgcagacttgaatgctatgagagtgaaatgttagttgcctactgtatgtttcagctggagtgctgtgtcaaaggaaatcctgcaccctgacataagaaaccaatgaatggccactatcctgtaggcccttgattctgccatctttcacaaaaccagggaatttagatcaaactgtgacaccatgatgtgtccatgactactggtttttagcatttttataggccagcagactcttgtggtcttaaatttaaagagctgagctgtagccttctttaaaagagctcggtttttcacaaaaacaatgtagaagatattttctcacctcaacgtgatgtccagtgtgctcatcagcacctgtttctccctctaatcatagaggatattcttattatttagaaaggcttcaagggaaacaacttttgacacctaagtcgtgtcctaccttcgcttcagcttcgcatttcccatttctgtgaaattcccaactttagagaagcagatttgccatggccttctgacaaccttgtacatctctcacataaaccgcataggcagggcttaactacaggctggcccgagtctgcactgagtctgaccctgaagttcctttggaacaggagaggccatcttgtgatgggctggaacaaggtaatttctcatccacctccctagtttcagttgagcaatggaacttcccacctgagcccctagggttcagctacaggctataagactgccgtcctgtggtttagtgttggttccttagcagcagagtgatgccacctctgctgcccgtcatctgactcctctggatgggtgttatcctgtggcttaagagctaacaccatgctgatcttgctttgctatatgtgtaactaataaactgcctaaatgca

SEQ ID NO: 125950 - DNA, 234 bp, Homo sapiens
  Payload ID: 4701
  Gene Symbol: DEFB135
  Gene Name: defensin, beta 135
  Uniprot ID: Q30KP9
  ENST ID: ENST00000382208
  CDS Start-End: 1-234
atggccacaaggagcgtcctcttggccctcgtggtccttaacttactcttctatgttccaccaggtagaagtggacccaatgtctacatacaaaaaatctttgcttcatgttggcgactgcaaggtacttgccggccaaaatgtctaaaaaacgaacaatatcgtattttgtgtgatactatacatttgtgctgtgtaaacccaaaatatttacctatactgactgggaaatag

SEQ ID NO: 125951 - DNA, 237 bp, Homo sapiens
  Payload ID: 4702
  Gene Symbol: DEFB136
  Gene Name: defensin, beta 136
  Uniprot ID: Q30KP8
  ENST ID: ENST00000382209
  CDS Start-End: 1-237
atgaacctctgtctttctgcattactctttttcctggtgatcttactgccttcaggaaaaggtatgtttgggaatgatggagtcaaagttcgcacctgcactagccagaaagccgtatgtttcttcgggtgtccgccaggatacaggtggattgcgttctgccacaatattctgtcttgctgtaaaaatatgacacgttttcaacccccgcaagccaaagatccatgggttcattaa

SEQ ID NO: 125952 - DNA, 380 bp, Homo sapiens
  Payload ID: 4703
  Gene Symbol: DEFB4A
  Gene Name: defensin, beta 4A
  Uniprot ID: O15263
  ENST ID: ENST00000302247
  CDS Start-End: 85-279
gaccagggaccaggacctttataaggtggaaggcttgatgtcctccccagactcagctcctggtgaagctcccagccatcagccatgagggtcttgtatctcctcttctcgttcctcttcatattcctgatgcctcttccaggtgtttttggtggtataggcgatcctgttacctgccttaagagtggagccatatgtcatccagtcttttgccctagaaggtataaacaaattggcacctgtggtctccctggaacaaaatgctgcaaaaagccatgaggaggccaagaagctgctgtggctgatgcggattcagaaagggctccctcatcagagacgtgcgacatgtaaaccaaattaaactatggtgtccaaagata

SEQ ID NO: 125953 - DNA, 332 bp, Homo sapiens
  Payload ID: 4704
  Gene Symbol: DEFB4B
  Gene Name: defensin, beta 4B
  Uniprot ID: O15263
  ENST ID: ENST00000318157
  CDS Start-End: 37-231
agactcagctcctggtgaagctcccagccatcagccatgagggtcttgtatctcctcttctcgttcctcttcatatttctgatgcctcttccaggtgtttttggtggtataggcgatcctgttacctgccttaagagtggagccatatgtcatccagtcttttgccctagaaggtataaacaaattggcacctgtggtctccctggaacaaaatgctgcaaaaagccatgaggaggccaagaagctgctgtggctgatgcggattcagaaagggctccctcatcagagacgtgcgacatgtaaaccaaattaaactatggtgtccaaagata

SEQ ID NO: 125954 - DNA, 332 bp, Homo sapiens
  Payload ID: 4704
  Gene Symbol: DEFB4B
  Gene Name: defensin, beta 4B
  Uniprot ID: O15263
  ENST ID: ENST00000617136
  CDS Start-End: 37-231
agactcagctcctggtgaagctcccagccatcagccatgagggtcttgtatctcctcttctcgttcctcttcatattcctgatgcctcttccaggtgtttttggtggtataggcgatcccgttacctgccttaagagtggagccatatgtcatccagtcttttgccctagaaggtataaacaaattggcacctgtggtctccctggaacaaaatgctgcaaaaagccatgaggaggccaagaagctgctgtggctgatgcggattcagaaagggttccctcatcagagacgtgcgacatgtaaaccaaattaaactatggtgtccaaagata

SEQ ID NO: 125955 - DNA, 1403 bp, Homo sapiens
  Payload ID: 4705
  Gene Symbol: DHDDS
  Gene Name: dehydrodolichyl diphosphate synthase subunit
  Uniprot ID: Q86SQ9
  ENST ID: ENST00000236342
  CDS Start-End: 94-1095
actgaagccgtggggacgcgcccagcggagctaatcagattacctggctggtgtttgcttgttctggagtgatcttctgactggaaaagaactatgtcatggatcaaggaaggagagctgtcactttgggagcggttctgtgccaacatcataaaggcaggcccaatgccgaaacacattgcattcataatggacgggaaccgtcgctatgccaagaagtgccaggtggagcggcaggaaggccactcacagggcttcaacaagctagctgagactctgcggtggtgtttgaacctgggcatcctagaggtgacagtctacgcattcagcattgagaacttcaaacgctccaagagtgaggtagacgggcttatggatctggcccggcagaagttcagccgcttgatggaagaaaaggagaaactgcagaagcatggggtgtgtatccgggtcctgggcgatctgcacttgttgcccttggatctccaggagctgattgcacaagctgtacaggccacgaagaactacaacaagtgtttcctgaatgtctgttttgcatacacatcccgtcatgagatcagcaatgctgtgagagagatggcctggggggtggagcaaggcctgttggatcccagtgatatctctgagtctctgcttgataagtgcctctataccaaccgctctcctcatcctgacatcttgatacggacttctggagaagtgcggctgagtgacttcttgctatggcagacctctcactcctgcctggtgttccaacccgttctgtggccagagtatacattttggaacctcttcgaggccatcctgcagttccagatgaaccatagcgtgcttcagaaggcccgagacatgtatgcagaggagcggaagaggcagcagctggagagggaccaggctacagtgacagagcagctgctgcgagaggggctccaagccagtggggacgcccagctccgaaggacacgcttgcacaaactctcggccagacgggaagagcgagtccaaggcttcctgcaggccttggaactcaagcgagctgactggctggcccgtctgggcactgcatcagcctgaatgaggctggccacctgccactttgccctgccctctgcctccagggctccactccccttccttttcttggtgaaaggcacctcctttcctgataatgaatggtgttccctttgcttggctggggagccccccaggccaggtttgctggccatagatacctttgggctgcctgggacaggctcctgaggaggattgagggtgaaagtctcccacgagtacactaaacctaggtctggtcaccaatagggtttggagagcaaagggccacaactcatcagctgcctgtctcttagatgcactttcttttt

SEQ ID NO: 125956 - DNA, 3245 bp, Homo sapiens
  Payload ID: 4705
  Gene Symbol: DHDDS
  Gene Name: dehydrodolichyl diphosphate synthase subunit
  Uniprot ID: Q86SQ9
  ENST ID: ENST00000360009
  CDS Start-End: 78-1082
cgcgcccagcggagctaatcagattacctggctggtgtttgcttgttctggagtgatcttctgactggaaaagaactatgtcatggatcaaggaaggagagctgtcactttgggagcggttctgtgccaacatcataaaggcaggcccaatgccgaaacacattgcattcataatggacgggaaccgtcgctatgccaagaagtgccaggtggagcggcaggaaggccactcacagggcttcaacaagctagctgagactctgcggtggtgtttgaacctgggcatcctagaggtgacagtctacgcattcagcattgagaacttcaaacgctccaagagtgaggtagacgggcttatggatctggcccggcagaagttcagccgcttgatggaagaaaaggagaaactgcagaagcatggggtgtgtatccgggtcctgggcgatctgcacttgttgcccttggatctccaggagctgattgcacaagctgtacaggccacgaagaactacaacaagtgtttcctgaatgtctgttttgcatacacatcccgtcatgagatcagcaatgctgtgagagagatggcctggggggtggagcaaggcctgttggatcccagtgatatctctgagtctctgcttgataagtgcctctataccaaccgctctcctcatcctgacatcttgatacggacttctggagaagtgcggctgagtgacttcttgctatggcagacctctcactcctgcctggtgttccaacccgttctgtggccagagtatacattttggaacctcttcgaggccatcctgcagttccagatgaaccatagcgtgcttcagcagaaggcccgagacatgtatgcagaggagcggaagaggcagcagctggagagggaccaggctacagtgacagagcagctgctgcgagaggggctccaagccagtggggacgcccagctccgaaggacacgcttgcacaaactctcggccagacgggaagagcgagtccaaggcttcctgcaggccttggaactcaagcgagctgactggctggcccgtctgggcactgcatcagcctgaatgaggctggccacctgccactttgccctgccctctgcctccagggctccactccccttccttttcttggtgaaaggcacctcctttcctgataatgaatggtgttccctttgcttggctggggagccccccaggccaggtttgctggccatagatacctttgggctgcctgggacaggctcctgaggaggattgagggtgaaagtctcccacgagtacactaaacctaggtctggtcaccaatagggtttggagagcaaagggccacaactcatcagctgcctgtctcttagatgcactttctttttccaccagcacatccttcaacacacagaatttcagggaagagttctccccaaaaccctagctctttacccttccattttagccttccacccagcttccacaaaagatttggctctaccttggatctgctagtaaataactaataggcaggcagttatttgggtaaggaaaaaaggggtgggagagacagaaaatttgcccatctgctgctcctcccccttggctctccacctgggatttgctattgaatctctaccctctcccaccacacagtactgattgctcactgaaagactcagcacccccaatggtgcgcggaagccaggcgggcgattacaatccaattacctattgtcgactcagcccacacaagcttttctcctcctcttgcagggcatggggccaggctccactcccaaatgagactggccccctccatggttcagggtaacagaagggcctgtaggccctggtgaactgaatccagcacaggcctcccctgtaacacaacaggactgagcagaaccaaacacttcttccaactgactctgctccctgccctcaccatctcaaactctgattcccactccactcttcgaggtttctctcagctttttgacctggctccctaagtaggccctagatgatttattcttggcatggcaaagcttgttctaggtcctctgcttgtgagggtcaaagctgtgtcctttcccttacctccctctgccaggacttgctgcagagctgctgagaggattagtgcctttgaagagctgtctgcctgagcaactctatttcaggtgccccacaccggcaagtaccagccagcaacaccaaccaaatgctactctctttaaagtccattttccttcttctttttttttttttttttggagacagcatctcaccctgtcctggctggtctcgaactcctgacctcaggtgatccgccggcctcaccctcccaaagtgctgggattacaggcatgagccaccatgccagacttcccattttactttctgcaagctgtttccctagcagctccctctaggggagaggtgaaatcttgcaagttgtagcaagagcacacaggaaacccctaactttcctataccccacccgcctcttcccctttctgtcccgggatacctggcggcaagagacttcttggctattgtccatgctcccagaatcaagcataaatgccagacacggcgattgagaagccaatcagtgaaccctttggcaaagcccccatccacacctggcactcccctctaccaatccctggcacagggttcctggagagcaggtgctgtacattttacagctttacaatggggctgttgacagccataattagggaggcatgaattatgcggctataatgcagagccctacaattaaggcgggaatgaggggctggaggcagcaaacggaatctgccctatgagcgtggctgttgagtcctgtctcctgggtctgactttccgtaatatgattggggtacagtagaggtgattaatggggctggcatctctctttggcctgaggttctgtattctgggaaaggtacacagggtggagtagggagaagctgccccaggaggcgatgtagtggtggaaagaagaggcagagaggtcgtcgtcgtcgcccagcagcaagggctgcaaaatagtagaactcgtggttgctttggacaggtgtgatttgtgcaagccaggttcaacccttgcctcaagaaatcagatgggaccaatttagtgtccttccacctgtgagccaagcccccatttgaggacatctatcgtattcttgtgtgctgggtctcaaatagaatttttaaagattc

SEQ ID NO: 125957 - DNA, 1148 bp, Homo sapiens
  Payload ID: 4705
  Gene Symbol: DHDDS
  Gene Name: dehydrodolichyl diphosphate synthase subunit
  ENST ID: ENST00000374185
  CDS Start-End: 91-720
gaagccgtggggacgcgcccagcggagctaatcagattacctggctggtgtttgcttgttctggagtgatcttctgactggaaaagaactatgtcatggatcaaggaaggagagctgtcactttgggagcggttctgtgccaacatcataaaggcaggcccaatgccgaaacacattgcattcataatggacgggaaccgtcgctatgccaagaagtgccaggtggagcggcaggaaggccactcacagggcttcaacaagctagctgagactctgcggtggtgtttgaacctgggcatcctagaggtgacagtctacgcattcagcattgagaacttcaaacgctccaagagtgaggtagacgggcttatggatctggcccggcagaagttcagccgcttgatggaagaaaaggagaaactgcagaagcatggggtgtgtatccgggtcctgggcgatctgcacttgttgcccttggatctccaggagctgattgcacaagctgtacaggccacgaagaactacaacaagtgtttcctgaatgtctgttttgcatacacatcccgtcatgagatcagcaatgctgtgagagagatggcctggggggtggagcaaggcctgttggatcccaggtatcccgagttgttttgcatggtaattgttaaggaaaacaggcctgggccagcatggcagctcacgcctgtaatcctagcacattaggaggccgaggtgggcagtccacttgaggcaggccaggagttcaagaccagcctggccaacatggcaaaactccctcttttcaacaacaacaacaaaaaagcaggcctgtaccaaaccataaagcccctctgtgccatgtacttggccagaggtctaattaggggagcatgtggaaagatttaaggggatctcccaaatttagagattaggattggcttattacaacctgcttcagaactagagttcaccacacaccaagaaaccccagagaaagagcaaagcagatgacaaagccatgttattattcctttacaaattataccctcctggccctttggtagtgtttttccaagaatgacttttcatgaatgcagtttgttggggctagagttctttaggtctctcatgttctagttccacacaagatt

SEQ ID NO: 125958 - DNA, 629 bp, Homo sapiens
  Payload ID: 4705
  Gene Symbol: DHDDS
  Gene Name: dehydrodolichyl diphosphate synthase subunit
  ENST ID: ENST00000416052
  CDS Start-End: 1-487
gcacttgttgcccttggatctccaggagctgattgcacaagctgtacaggccacgaagaactacaacaagtgtttcctgaatgtctgttttgcatacacatcccgtcatgagatcagcaatgctgtgagagagatggcctggggggtggagcaaggcctgttggatcccagtgatatctctgagtctctgcttgataagtgcctctataccaaccgctctcctcatcctgacatcttgatacggacttctggagaagtgcggctgagtgacttcttgctatggcagacctctcactcctgcctggtgttccaacccgttctgtggccagagtatacattttggaacctcttcgaggccatcctgcagttccagatgaaccatagcgtgcttcagcacccagggagcctcctgaccaaggcctggaagaagcccttccagcaagacggagagctctacggcaactgttcaagcccgaagtcctcatagctccacatgtaattcattgtaatagcagaagagaagtattcttgaatgcctgggattattcaggagccgggggggacagtccagaattctcatttgtcatccttattcatgcagtaaacctttattgctgagagacagcaaa

SEQ ID NO: 125959 - DNA, 703 bp, Homo sapiens
  Payload ID: 4705
  Gene Symbol: DHDDS
  Gene Name: dehydrodolichyl diphosphate synthase subunit
  ENST ID: ENST00000430232
  CDS Start-End: 56-703
attacctggctggtgtttgcttgttctggagtgatcttctgactggaaaagaactatgtcatggatcaaggaaggagagctgtcactttgggagcggttctgtgccaacatcataaaggcaggcccaatgccgaaacacattgcattcataatggacgggaaccgtcgctatgccaagaagtgccaggtggagcggcaggaaggccactcacagggcttcaacaagctagctgagactctgcggtggtgtttgaacctgggcatcctagaggtgacagtctacgcattcagcattgagaacttcaaacgctccaagagtgaggtagacgggcttatggatctggcccggcagaagttcagccgcttgatggaagaaaagtgtttcctgaatgtctgttttgcatacacatcccgtcatgagatcagcaatgctgtgagagagatggcctggggggtggagcaaggcctgttggatcccagtgatatctctgagtctctgcttgataagtgcctctataccaaccgctctcctcatcctgacatcttgatacggacttctggagaagtgcggctgagtgacttcttgctatggcagacctctcactcctgcctggtgttccaacccgttctgtggccagagtatacattttggaacctcttcgaggccatcctgcagttccagatgaaccatagcgtgcttcag

SEQ ID NO: 125960 - DNA, 868 bp, Homo sapiens
  Payload ID: 4705
  Gene Symbol: DHDDS
  Gene Name: dehydrodolichyl diphosphate synthase subunit
  ENST ID: ENST00000427245
  CDS Start-End: 117-713
acgtcatgaggaagtgccggcccactgaagccgtggggacgcgcccagcggagctaatcagattacctggctggtgtttgcttgttctggagtgatcttctgactggaaaagaactatgtcatggatcaaggaaggagagctgtcactttgggagcggttctgtgccaacatcataaaggcaggcccaatgccgaaacacattgcattcataatggacgggaaccgtcgctatgccaagaagtgccaggtggagcggcaggaaggccactcacagggcttcaacaagctagctgagactctgcggtggtgtttgaacctgggcatcctagaggtgacagtctacgcattcagcattgagaacttcaaacgctccaagagtgaggtagacgggcttatggatctggcccggcagaagttcagccgcttgatggaagaaaaggagaaactgcagaagcatggggtgtgtatccgggtcctgggcgatctgcacttgttgcccttggatctccaggagctgattgcacaagctgtacaggccacgaagaactacaacaagtgtttcctgaatgtctgttttgcatacacatcccgtcatgagatcagcaatgctgtgagagagatggcctggggggtggagcaaggcctgttggatcccagtcgagacaggtttcaccatattggccaggctagtctcgaactcctgacgtcgtgatctgcctgcctcagcctcccaaagtgctgggattacaggcgtgagtcaccatgcccagccgattcagggatttttcaaaaagaaaattattaattattgtcaacatagtggaatcctaattattaaaggtggagagacttttgaagccatttaaa

SEQ ID NO: 125961 - DNA, 2673 bp, Homo sapiens
  Payload ID: 4705
  Gene Symbol: DHDDS
  Gene Name: dehydrodolichyl diphosphate synthase subunit
  ENST ID: ENST00000431933
  CDS Start-End: 1-510
ctggcccggcagaagttcagccgcttgatggaagaaaaggagaaactgcagaagcatggggtgtgtatccgggtcctgggcgatctgcacttgttgcccttggatctccaggagctgattgcacaagctgtacaggccacgaagaactacaacaatgatatctctgagtctctgcttgataagtgcctctataccaaccgctctcctcatcctgacatcttgatacggacttctggagaagtgcggctgagtgacttcttgctatggcagcagaaggcccgagacatgtatgcagaggagcggaagaggcagcagctggagagggaccaggctacagtgacagagcagctgctgcgagaggggctccaagccagtggggacgcccagctccgaaggacacgcttgcacaaactctcggccagacgggaagagcgagtccaaggcttcctgcaggccttggaactcaagcgagctgactggctggcccgtctgggcactgcatcagcctgaatgaggctggccacctgccactttgccctgccctctgcctccagggctccactccccttccttttcttggtgaaaggcacctcctttcctgataatgaatggtgttccctttgcttggctggggagccccccaggccaggtttgctggccatagatacctttgggctgcctgggacaggctcctgaggaggattgagggtgaaagtctcccacgagtacactaaacctaggtctggtcaccaatagggtttggagagcaaagggccacaactcatcagctgcctgtctcttagatgcactttctttttccaccagcacatccttcaacacacagaatttcagggaagagttctccccaaaaccctagctctttacccttccattttagccttccacccagcttccacaaaagatttggctctaccttggatctgctagtaaataactaataggcaggcagttatttgggtaaggaaaaaaggggtgggagagacagaaaatttgcccatctgctgctcctcccccttggctctccacctgggatttgctattgaatctctaccctctcccaccacacagtactgattgctcactgaaagactcagcacccccaatggtgcgcggaagccaggcgggcgattacaatccaattacctattgtcgactcagcccacacaagcttttctcctcctcttgcagggcatggggccaggctccactcccaaatgagactggccccctccatggttcagggtaacagaagggcctgtaggccctggtgaactgaatccagcacaggcctcccctgtaacacaacaggactgagcagaaccaaacacttcttccaactgactctgctccctgccctcaccatctcaaactctgattcccactccactcttcgaggtttctctcagctttttgacctggctccctaagtaggccctagatgatttattcttggcatggcaaagcttgttctaggtcctctgcttgtgagggtcaaagctgtgtcctttcccttacctccctctgccaggacttgctgcagagctgctgagaggattagtgcctttgaagagctgtctgcctgagcaactctatttcaggtgccccacaccggcaagtaccagccagcaacaccaaccaaatgctactctctttaaagtccattttccttcttctttttttttttttttttggagacagcatctcaccctgtcctggctggtctcgaactcctgacctcaggtgatccgccggcctcaccctcccaaagtgctgggattacaggcatgagccaccatgccagacttcccattttactttctgcaagctgtttccctagcagctccctctaggggagaggtgaaatcttgcaagttgtagcaagagcacacaggaaacccctaactttcctataccccacccgcctcttcccctttctgtcccgggatacctggcggcaagagacttcttggctattgtccatgctcccagaatcaagcataaatgccagacacggcgattgagaagccaatcagtgaaccctttggcaaagcccccatccacacctggcactcccctctaccaatccctggcacagggttcctggagagcaggtgctgtacattttacagctttacaatggggctgttgacagccataattagggaggcatgaattatgcggctataatgcagagccctacaattaaggcgggaatgaggggctggaggcagcaaacggaatctgccctatgagcgtggctgttgagtcctgtctcctgggtctgactttccgtaatatgattggggtacagtagaggtgattaatggggctggcatctctctttggcctgaggttctgtattctgggaaaggtacacagggtggagtagggagaagctgccccaggaggcgatgtagtggtggaaagaagaggcagagaggtcgtcgtcgtcgcccagcagcaagggctgcaaaatagtagaactcgtggttgctttggacaggtgtgatttgtgcaagccaggttcaacccttgcctcaagaaatcagatgggaccaatttagtgtccttccacctgtgagccaagcccccatttgaggacatctatcgtattcttgtgtgctgggtctcaaatagaatttttaaagattc

SEQ ID NO: 125962 - DNA, 3338 bp, Homo sapiens
  Payload ID: 4705
  Gene Symbol: DHDDS
  Gene Name: dehydrodolichyl diphosphate synthase subunit
  ENST ID: ENST00000434391
  CDS Start-End: 151-372
gcagcgcccaaagatgacgtgttctgccagcgccacgtcatgaggaagtgccggcccactgaagccgtggggacgcgcccagcggagctaatcagattacctggctggtgtttgcttgttctggagtgatcttctgactggaaaagaactatgtcatggatcaaggaaggagagctgtcactttgggagcggttctgtgccaacatcataaaggcaggcccaatgccgaaacacattgcattcataatggacgggaaccgtcgctatgccaagaagtgccaggtggagcggcaggaaggccactcacagggcttcaacaagctagctgagctccttgccttctcccctctcagactctgcggtggtgtttgaacctgggcatcctagaggtgacagtctacgcattcagcattgagaacttcaaacgctccaagagtgaggtagacgggcttatggatctggcccggcagaagttcagccgcttgatggaagaaaaggagaaactgcagaagcatggggtgtgtatccgggtcctgggcgatctgcacttgttgcccttggatctccaggagctgattgcacaagctgtacaggccacgaagaactacaacaagtgtttcctgaatgtctgttttgcatacacatcccgtcatgagatcagcaatgctgtgagagagatggcctggggggtggagcaaggcctgttggatcccagtgatatctctgagtctctgcttgataagtgcctctataccaaccgctctcctcatcctgacatcttgatacggacttctggagaagtgcggctgagtgacttcttgctatggcagacctctcactcctgcctggtgttccaacccgttctgtggccagagtatacattttggaacctcttcgaggccatcctgcagttccagatgaaccatagcgtgcttcagaaggcccgagacatgtatgcagaggagcggaagaggcagcagctggagagggaccaggctacagtgacagagcagctgctgcgagaggggctccaagccagtggggacgcccagctccgaaggacacgcttgcacaaactctcggccagacgggaagagcgagtccaaggcttcctgcaggccttggaactcaagcgagctgactggctggcccgtctgggcactgcatcagcctgaatgaggctggccacctgccactttgccctgccctctgcctccagggctccactccccttccttttcttggtgaaaggcacctcctttcctgataatgaatggtgttccctttgcttggctggggagccccccaggccaggtttgctggccatagatacctttgggctgcctgggacaggctcctgaggaggattgagggtgaaagtctcccacgagtacactaaacctaggtctggtcaccaatagggtttggagagcaaagggccacaactcatcagctgcctgtctcttagatgcactttctttttccaccagcacatccttcaacacacagaatttcagggaagagttctccccaaaaccctagctctttacccttccattttagccttccacccagcttccacaaaagatttggctctaccttggatctgctagtaaataactaataggcaggcagttatttgggtaaggaaaaaaggggtgggagagacagaaaatttgcccatctgctgctcctcccccttggctctccacctgggatttgctattgaatctctaccctctcccaccacacagtactgattgctcactgaaagactcagcacccccaatggtgcgcggaagccaggcgggcgattacaatccaattacctattgtcgactcagcccacacaagcttttctcctcctcttgcagggcatggggccaggctccactcccaaatgagactggccccctccatggttcagggtaacagaagggcctgtaggccctggtgaactgaatccagcacaggcctcccctgtaacacaacaggactgagcagaaccaaacacttcttccaactgactctgctccctgccctcaccatctcaaactctgattcccactccactcttcgaggtttctctcagctttttgacctggctccctaagtaggccctagatgatttattcttggcatggcaaagcttgttctaggtcctctgcttgtgagggtcaaagctgtgtcctttcccttacctccctctgccaggacttgctgcagagctgctgagaggattagtgcctttgaagagctgtctgcctgagcaactctatttcaggtgccccacaccggcaagtaccagccagcaacaccaaccaaatgctactctctttaaagtccattttccttcttctttttttttttttttttggagacagcatctcaccctgtcctggctggtctcgaactcctgacctcaggtgatccgccggcctcaccctcccaaagtgctgggattacaggcatgagccaccatgccagacttcccattttactttctgcaagctgtttccctagcagctccctctaggggagaggtgaaatcttgcaagttgtagcaagagcacacaggaaacccctaactttcctataccccacccgcctcttcccctttctgtcccgggatacctggcggcaagagacttcttggctattgtccatgctcccagaatcaagcataaatgccagacacggcgattgagaagccaatcagtgaaccctttggcaaagcccccatccacacctggcactcccctctaccaatccctggcacagggttcctggagagcaggtgctgtacattttacagctttacaatggggctgttgacagccataattagggaggcatgaattatgcggctataatgcagagccctacaattaaggcgggaatgaggggctggaggcagcaaacggaatctgccctatgagcgtggctgttgagtcctgtctcctgggtctgactttccgtaatatgattggggtacagtagaggtgattaatggggctggcatctctctttggcctgaggttctgtattctgggaaaggtacacagggtggagtagggagaagctgccccaggaggcgatgtagtggtggaaagaagaggcagagaggtcgtcgtcgtcgcccagcagcaagggctgcaaaatagtagaactcgtggttgctttggacaggtgtgatttgtgcaagccaggttcaacccttgcctcaagaaatcagatgggaccaatttagtgtccttccacctgtgagccaagcccccatttgaggacatctatcgtattcttgtgtgctgggtctcaaatagaatttttaaagattc

SEQ ID NO: 125963 - DNA, 705 bp, Homo sapiens
  Payload ID: 4705
  Gene Symbol: DHDDS
  Gene Name: dehydrodolichyl diphosphate synthase subunit
  ENST ID: ENST00000436153
  CDS Start-End: 185-705
gaaggggtgaactagaggagaagagggtgactgggcggggagcagctgcgggagaagcaaagggacgactgagggaataatcaggagaccactgaggcgtgaagtactaggcgtgcgataactgaaggaattacctggctggtgtttgcttgttctggagtgatcttctgactggaaaagaactatgtcatggatcaaggaaggagagctgtcactttgggagcggttctgtgccaacatcataaaggcaggcccaatgccgaaacacattgcattcataatggacgggaaccgtcgctatgccaagaagtgccaggtggagcggcaggaaggccactcacagggcttcaacaagctagctgagactctgcggtggtgtttgaacctgggcatcctagaggtgacagtctacgcattcagcattgagaacttcaaacgctccaagagtgaggtagacgggcttatggatctggcccggcagaagttcagccgcttgatggaagaaaaggagaaactgcagaagcatggggtgtgtatccgggtcctgggcgatctgcacttgttgcccttggatctccaggagctgattgcacaagctgtacaggccacgaagaactacaacaagtgtttcctgaatgtctgttttgcatacacatcccgtcatgagatcagcaatgctgtgagagagatggcctggggggtgga

SEQ ID NO: 125964 - DNA, 492 bp, Homo sapiens
  Payload ID: 4705
  Gene Symbol: DHDDS
  Gene Name: dehydrodolichyl diphosphate synthase subunit
  ENST ID: ENST00000525326
  CDS Start-End: 280-492
aatcaggtgccactgaactgaaggggtgaactagaggagaagagggtgactgggcggggagcagctgcgggagaagcaaagggacgactgagggaataatcaggagaccactgaggcgtgaagtactaggcgtgcgataactgaaggagttagtaactgggagcacagagttggaaacagcttaggggaagatggagaaggaagaaacggggaatgatcaagatattacctggctggtgtttgcttgttctggagtgatcttctgactggaaaagaactatgtcatggatcaaggaaggagagctgtcactttgggagcggttctgtgccaacatcataaaggcaggcccaatgccgaaacacattgcattcataatggacgggaaccgtcgctatgccaagaagtgccaggtggagcggcaggaaggccactcacagggcttcaacaagctagctgagactctgcggtggtgtttgaacctgggcatccta

SEQ ID NO: 125965 - DNA, 556 bp, Homo sapiens
  Payload ID: 4705
  Gene Symbol: DHDDS
  Gene Name: dehydrodolichyl diphosphate synthase subunit
  ENST ID: ENST00000530781
  CDS Start-End: 377-556
agaggagaagagggtgactgggcggggagcagctgcgggagaagcaaagggacgactgagggaataatcaggagaccactgaggcgtgaagtactaggcgtgcgataactgaaggagttagtaactgggagcacagagttggaaacagcttaggggaagatggagaaggaagaaacggggaatgatcaagatgtgggcaccatgatgtggcaggaaaccgacttagatgttcagaagaagtcagtgcagatacggaggaaatgggaatgggaagaagtctgcaaagccaggagaaccgaggaaaggcttttgcctccagagattacctggctggtgtttgcttgttctggagtgatcttctgactggaaaagaactatgtcatggatcaaggaaggagagctgtcactttgggagcggttctgtgccaacatcataaaggcaggcccaatgccgaaacacattgcattcataatggacgggaaccgtcgctatgccaagaagtgccaggtggagcggcaggaaggccactcacagggcttcaacaagctagctgag

SEQ ID NO: 125966 - DNA, 581 bp, Homo sapiens
  Payload ID: 4705
  Gene Symbol: DHDDS
  Gene Name: dehydrodolichyl diphosphate synthase subunit
  ENST ID: ENST00000525546
  CDS Start-End: 327-581
aatcaggtgccactgaactgaaggggtgaactagaggagaagagggtgactgggcggggagcagctgcgggagaagcaaagggacgactgagggaataatcaggagaccactgaggcgtgaagtactaggcgtgcgataactgaaggagttagtaactgggagcacagagttggaaacagcttaggggaagatggagaaggaagaaacggggaatgatcaagatgtgggcaccatgatgtggcaggaaaccgacttagatgttcagaagaaattacctggctggtgtttgcttgttctggagtgatcttctgactggaaaagaactatgtcatggatcaaggaaggagagctgtcactttgggagcggttctgtgccaacatcataaaggcaggcccaatgccgaaacacattgcattcataatggacgggaaccgtcgctatgccaagaagtgccaggtggagcggcaggaaggccactcacagggcttcaacaagctagctgagactctgcggtggtgtttgaacctgggcatcctagaggtgacagtctacgcattcagcattgagaacttcaaacgc

SEQ ID NO: 125967 - DNA, 573 bp, Homo sapiens
  Payload ID: 4705
  Gene Symbol: DHDDS
  Gene Name: dehydrodolichyl diphosphate synthase subunit
  ENST ID: ENST00000525165
  CDS Start-End: 207-573
gctaatcaggtgccactgaactgaaggggtgaactagaggagaagagggtgactgggcggggagcagctgcgggagaagcaaagggacgactgagggaataatcaggagaccactgaggcgtgaagtactaggcgtgcgataactgaaggaattacctggctggtgtttgcttgttctggagtgatcttctgactggaaaagaactatgtcatggatcaaggaaggagagctgtcactttgggagcggttctgtgccaacatcataaaggcaggcccaatgccgaaacacattgcattcataatggacgggaaccgtcgctatgccaagaagtgccaggtggagcggcaggaaggccactcacagggcttcaacaagctagctgagactctgcggtggtgtttgaacctgggcatcctagaggtgacagtctacgcattcagcattgagaacttcaaacgctccaagagtgaggtagacgggcttatggatctggcccggcagaagttcagccgcttgatggaagaaaaggagaaactgcagaagcatggggtgtgtatccgggtcctgggcg

SEQ ID NO: 125968 - DNA, 1072 bp, Homo sapiens
  Payload ID: 4705
  Gene Symbol: DHDDS
  Gene Name: dehydrodolichyl diphosphate synthase subunit
  Uniprot ID: Q86SQ9
  ENST ID: ENST00000526219
  CDS Start-End: 93-977
ctgaagccgtggggacgcgcccagcggagctaatcagattacctggctggtgtttgcttgttctggagtgatcttctgactggaaaagaactatgtcatggatcaaggaaggagagctgtcactttgggagcggttctgtgccaacatcataaaggcaggcccaatgccgaaacacattgcattcataatggacgggaaccgtcgctatgccaagaagtgccaggtggagcggcaggaaggccactcacagggcttcaacaagctagctgagactctgcggtggtgtttgaacctgggcatcctagaggtgacagtctacgcattcagcattgagaacttcaaacgctccaagagtgaggtagacgggcttatggatctggcccggcagaagttcagccgcttgatggaagaaaagtgtttcctgaatgtctgttttgcatacacatcccgtcatgagatcagcaatgctgtgagagagatggcctggggggtggagcaaggcctgttggatcccagtgatatctctgagtctctgcttgataagtgcctctataccaaccgctctcctcatcctgacatcttgatacggacttctggagaagtgcggctgagtgacttcttgctatggcagacctctcactcctgcctggtgttccaacccgttctgtggccagagtatacattttggaacctcttcgaggccatcctgcagttccagatgaaccatagcgtgcttcagaaggcccgagacatgtatgcagaggagcggaagaggcagcagctggagagggaccaggctacagtgacagagcagctgctgcgagaggggctccaagccagtggggacgcccagctccgaaggacacgcttgcacaaactctcggccagacgggaagagcgagtccaaggcttcctgcaggccttggaactcaagcgagctgactggctggcccgtctgggcactgcatcagcctgaatgaggctggccacctgccactttgccctgccctctgcctccagggctccactccccttccttttcttggtgaaaggcacctcctttcctgataa

SEQ ID NO: 125969 - DNA, 1235 bp, Homo sapiens
  Payload ID: 4705
  Gene Symbol: DHDDS
  Gene Name: dehydrodolichyl diphosphate synthase subunit
  Uniprot ID: Q86SQ9
  ENST ID: ENST00000525682
  CDS Start-End: 94-993
actgaagccgtggggacgcgcccagcggagctaatcagattacctggctggtgtttgcttgttctggagtgatcttctgactggaaaagaactatgtcatggatcaaggaaggagagctgtcactttgggagcggttctgtgccaacatcataaaggcaggcccaatgccgaaacacattgcattcataatggacgggaaccgtcgctatgccaagaagtgccaggtggagcggcaggaaggccactcacagggcttcaacaagctagctgagactctgcggtggtgtttgaacctgggcatcctagaggtgacagtctacgcattcagcattgagaacttcaaacgctccaagagtgaggtagacgggcttatggatctggcccggcagaagttcagccgcttgatggaagaaaaggagaaactgcagaagcatggggtgtgtatccgggtcctgggcgatctgcacttgttgcccttggatctccaggagctgattgcacaagctgtacaggccacgaagaactacaacaatgatatctctgagtctctgcttgataagtgcctctataccaaccgctctcctcatcctgacatcttgatacggacttctggagaagtgcggctgagtgacttcttgctatggcagacctctcactcctgcctggtgttccaacccgttctgtggccagagtatacattttggaacctcttcgaggccatcctgcagttccagatgaaccatagcgtgcttcagaaggcccgagacatgtatgcagaggagcggaagaggcagcagctggagagggaccaggctacagtgacagagcagctgctgcgagaggggctccaagccagtggggacgcccagctccgaaggacacgcttgcacaaactctcggccagacgggaagagcgagtccaaggcttcctgcaggccttggaactcaagcgagctgactggctggcccgtctgggcactgcatcagcctgaatgaggctggccacctgccactttgccctgccctctgcctccagggctccactccccttccttttcttggtgaaaggcacctcctttcctgataatgaatggtgttccctttgcttggctggggagccccccaggccaggtttgctggccatagatacctttgggctgcctgggacaggctcctgaggaggattgagggtgaaagtctcccacgagtacactaaacctaggtctggtcacca

SEQ ID NO: 125970 - DNA, 582 bp, Homo sapiens
  Payload ID: 4705
  Gene Symbol: DHDDS
  Gene Name: dehydrodolichyl diphosphate synthase subunit
  ENST ID: ENST00000533087
  CDS Start-End: 86-582
gagctaatcaggtgccactgaactgaagggattacctggctggtgtttgcttgttctggagtgatcttctgactggaaaagaactatgtcatggatcaaggaaggagagctgtcactttgggagcggttctgtgccaacatcataaaggcaggcccaatgccgaaacacattgcattcataatggacgggaaccgtcgctatgccaagaagtgccaggtggagcggcaggaaggccactcacagggcttcaacaagctagctgagactctgcggtggtgtttgaacctgggcatcctagaggtgacagtctacgcattcagcattgagaacttcaaacgctccaagagtgaggtagacgggcttatggatctggcccggcagaagttcagccgcttgatggaagaaaaggagaaactgcagaagcatggggtgtgtatccgggtcctgggcgatctgcacttgttgcccttggatctccaggagctgattgcacaagctgtacaggccacgaagaactacaacaagtgtttcctgaatgtctgttttgcatacacatcccgtcatgagatcagcaatgctgt

SEQ ID NO: 125971 - DNA, 496 bp, Homo sapiens
  Payload ID: 4705
  Gene Symbol: DHDDS
  Gene Name: dehydrodolichyl diphosphate synthase subunit
  ENST ID: ENST00000531312
  CDS Start-End: 105-496
agctaatcaggtgccactgaactgaaggggtgaactagaggagaagaggattacctggctggtgtttgcttgttctggagtgatcttctgactggaaaagaactatgtcatggatcaaggaaggagagctgtcactttgggagcggttctgtgccaacatcataaaggcaggcccaatgccgaaacacattgcattcataatggacgggaaccgtcgctatgccaagaagtgccaggtggagcggcaggaaggccactcacagggcttcaacaagctagctgagactctgcggtggtgtttgaacctgggcatcctagaggtgacagtctacgcattcagcattgagaacttcaaacgctccaagagtgaggtagacgggcttatggatctggcccggcagaagttcagccgcttgatggaagaaaaggagaaactgcagaagcatggggtgtgtatccgggtcctgggcgatctgcacttgttgcccttggatct

SEQ ID NO: 125972 - DNA, 5159 bp, Homo sapiens
  Payload ID: 4706
  Gene Symbol: DHTKD1
  Gene Name: dehydrogenase E1 and transketolase domain containing 1
  Uniprot ID: Q96HY7
  ENST ID: ENST00000263035
  CDS Start-End: 63-2822
cagggccggtgggatcccctcgggctcccgccttagcatgctggccgggacatctggtgaacatggcctctgctactgcggcagcagcacgacggggcctcggccgggctctccctctcttctggcgtggctaccagaccgagcggggcgtttacggctaccggccgaggaagcccgagagccgcgagccccagggcgccctggagcgccccccagttgatcatggccttgccaggttggtgacagtatattgtgagcatggtcataaagctgccaaaatcaaccccctcttcaccggacaagccctgctggagaatgtgcctgaaatccaagccctggtgcagacactgcagggacccttccacacggcaggattattgaacatggggaaggaagaggcctcacttgaggaagtgttagtctatctcaatcaaatctactgtgggcagatttctattgaaacctcccaacttcagagccaggatgagaaagactggtttgccaagcggtttgaggaactgcaaaaggagacgtttaccacagaagagcgaaaacatctgtcgaaactaatgctggaatctcaggagtttgaccactttctggccaccaagttctcgacagtgaagcgatatggaggcgaaggggctgaaagcatgatgggctttttccacgagctgctgaaaatgtcggcctacagcgggatcactgatgtcattattgggatgccccatagagggaggctgaatttattgacaggccttctgcagttccctccagagctgatgttccgtaaaatgcgaggcttaagtgaatttccagagaatttctcagccactggagacgtcctgtctcacctgacctcctctgtggacctgtactttggggcgcaccatcccctccatgtgacaatgttgcccaatccctcgcacctggaggccgtcaaccccgtggccgtgggcaaaactcgcggcaggcagcagtctcgccaagacggcgattactctccagacaactcagcccagccgggggacagggtcatttgcttacaggtccatggtgatgcttctttctgtggtcaagggattgttcctgaaacattcacgctgtccaatctcccacatttcagaattggtgggagtgtgcatttgattgttaataaccagctgggttacaccactccagctgaaagaggaaggtcttctttatactgcagtgatattgggaagcttgtgggctgtgccatcatccatgtcaatggagacagcccagaggaagtggtccgtgccacacgactggcttttgaataccaacgccagttccgcaaggatgtgattattgatctgttgtgctacaggcagtggggccacaatgagctggatgagccattctacaccaaccccatcatgtacaaaatcatcagagctcgaaagagcattccagacacatatgcagagcacctcattgctggcggactcatgacgcaggaggaggtgtctgaaataaaatcctcctactatgccaagttgaatgatcacttaaataacatggcccactacaggccccctgccctgaacctgcaggcccactggcagggcctggctcagccagaagcgcaaatcaccacctggagtacaggtgtgcccctcgacctcctgcggtttgttggcatgaagtctgtagaggtgccaagagagctgcagatgcacagtcacctgctgaagacacatgttcagtccagaatggagaagatgatggacggaatcaagctagactgggccaccgcggaagctcttgccttgggttctttacttgctcaaggttttaatgttcgtctaagtggccaagatgttggtcgtggaactttcagtcagaggcatgcaatcgtggtttgccaggagacggatgacacctacatccccctgaaccatatggacccaaatcagaaggggtttctagaggtcagcaacagcccactgtcagaagaggccgtcctgggatttgaatatgggatgagcattgagagcccaaagttactgcccctgtgggaggcacagtttggcgatttcttcaatggtgcccagatcatctttgacacattcatctctggaggagaggccaagtggctcctacaaagcggcatcgtcatcctccttccacatggctacgatggggctgggccagaccactcatcctgtcgaatagagcgtttcctgcagatgtgtgacagtgcggaagagggggtggacggagacactgtgaacatgtttgtggttcacccaacaactcctgcacagtatttccacttgcttaggagacagatggtccggaacttcagaaaaccactcattgttgcttcccctaagatgttactcaggctcccggcagccgtgtcaactcttcaagaaatggcaccaggaacaacatttaacccggtcattggtgattcatctgtggatccaaaaaaggttaagaccctcgtgttctgctccggcaaacatttctactccctggtgaaacaaagagaatctctgggggccaagaagcatgactttgccatcatccgagtagaggaactctgccccttcccgttggattctttacagcaagagatgagcaaatacaaacatgttaaagatcatatttggagtcaggaggaacctcagaacatgggtccgtggtcgtttgtttctccaaggtttgaaaagcagctggcctgcaagctccgtctggtgggccggccccctttgccagtacccgctgtaggaattggcacagttcacttgcaccagcatgaagatatcctcgccaagaccttcgcttgatgatgacttttgaagaaacactatttctctttaagaaaatggccattaaggccgggtggggtggcacatgcctgtaatcccagcactttgggaggccaaggctggtggatcacctgaggtcaggagttcgagaccagcctggccaacacggtgaaaccccgcctctactaaaaatacaaaaaatagccgggtgtggtggtgggcacctgtgatcccagcttcctgggaggctgaggcaagagaatcgcttgaatctgggaggcggaggttgcagtgagccaggatcacaccattgctgtccagcctgggtgacagagcaagactgcgtttcaaaaaaaaaaaaaaaaaaacccattaaaagaggcctccttcctccactctctcaacccctctgttgggtaacatgaaaagactgtattcctctaagatgttgggattgatatacgtgatttaatctgcaataggtggaataaccaggggaactggttatgaatatgtgaatgcaaccagcaaatttatccttgaaggtgtgatggtagaaataggaaaacaacaaaagaaaaacaataacaaaaaaagaaagtgtgatggctgggtgcagtggctcacgcctgtaatcccagcactttgggaggcttaggcggctggatcacctgaggtcaggagttcaagaccagcctggtcaacgtggtgaaacgccgtttctactaaaaatatgaaaattagttgggtgtggtggcatgcgcttgtagtctcagctactccggaggctgaggcaggagaattgcttgaacctggaaggcagaggttgcagtgagccgaaatggcgccactgtactccaacctgggcgacagagcaagactccatctcataaattaaaaggaaagtatgatagtgttatggattttagctctgagtgagctggaaaactaggtcattatctagatgatttcagacttgaccctaattgaccatatatgaccaggaaacacttctgagtttacagctccgtggagatgacctcaacactgcctcttgatttgtttgatgcatgtcactttcattaattttccccctcctttttgaaagtcctgtggcagtactaatattttcattttatgtaatctctggtgctgctttccagtcactgtatgaagtgtctccccaacactagcaaatctaggtcctactaaatacaaatctctgggtggatgatcttctagtactgtatttttaaattaaggagttttagttataatgaaattgatttgtagtctgttttgccgtaaacttgtttttctttaaattgttcttacagtgatatcttactatttttaactgtctggggtttctgatatggggatttcagcccctggttaatcagtcttgtccctacaagtccctgatgcagtatgtttatttgtgatgtttaaagaacatttcttggctgggcgctgcggcttgcgcctgtaatctcagcactttgggaggctgagatgggtggatcacctgaggttgggagttcgagaccagcctgacaaaacatagtgaaaccccgtctctactaaaaatacaaaaattagctgggcgtggtggtgggtgtctgtaatcccagctattcgggaggctgaggcaggagaatcgcttgaacccaggaggtggaggttgcagtgagctgagatcctgccactgcactccagtctgggtgacagagcaagactccatctcaaaaaataaataaatagaaagagagagagaggaaaaaaaaagaaaagaacacttctttatttgagggactttcccaacaccaggtgcttggggatttcttagagatcaccaaccgactccctcactgtgaaattaaaccaagtactggaaacgtaactaaacagcgaaccatgtagcttcacctgactcagtgctgggggcctctaccatctactgtgcttgtgtcatgatgctttttctctgaagtggtgtgggaagtaccaggggactggcagaagcccaggccctctctacttttaccagcaactgatcatgtctttcagaatccatgtacatataggctgttctagccacagtggtagatttatgattcacatccgaaagtgtgccttagttatcaatttaacatttctctagtattcatatcccttttcttaccatatacctcagtgtatccttcctgtgtcaagccttataaatcatgtaatttagtgccactcatgtaaatcagtaaaatcacaaaggtctatttaatgaaaacgatttaccaatgttgtttttttttaacaagaaaaaaaataaaagcacattgtcattttttttcctca

SEQ ID NO: 125973 - DNA, 933 bp, Homo sapiens
  Payload ID: 4706
  Gene Symbol: DHTKD1
  Gene Name: dehydrogenase E1 and transketolase domain containing 1
  ENST ID: ENST00000437298
  CDS Start-End: 11-933
tctggtgaacatggcctctgctactgcggcagcagcacgacggggcctcggccgggctctccctctcttctggcgtggctaccagaccgagcggggcgtttacggctaccggccgaggaagcccgagagccgcgagccccagggcgccctggagcgccccccagttgatcatggccttgccaggttggtgacagtatattgtgagcatggtcataaagctgccaaaatcaaccccctcttcaccggacaagccctgctggagaatgtgcctgaaatccaagccctggtgcagacactgcagggacccttccacacggcaggattattgaacatggggaaggaagaggcctcacttgaggaagtgttagtctatctcaatcaaatctactgtgggcagatttctattgaaacctcccaacttcagagccaggatgagaaagactggtttgccaagcggtttgaggaactgcaaaaggagacgtttaccacagaagagcgaaaacatctgtcgaaactaatgctggaatctcagctgatgttccgtaaaatgcgaggcttaagtgaatttccagagaatttctcagccactggagacgtcctgtctcacctgacctcctctgtggacctgtactttggggcgcaccatcccctccatgtgacaatgttgcccaatccctcgcacctggaggccgtcaaccccgtggccgtgggcaaaactcgcggcaggcagcagtctcgccaagacggcgattactctccagacaactcagcccagccgggggacagggtcatttgcttacaggtccatggtgatgcttctttctgtggtcaagggattgttcctgaaacattcacgctgtccaatctcccacatttcagaattggtgggagtgtgcatttgattgttaataaccagctgggttacaccactcc

SEQ ID NO: 125974 - DNA, 787 bp, Homo sapiens
  Payload ID: 4706
  Gene Symbol: DHTKD1
  Gene Name: dehydrogenase E1 and transketolase domain containing 1
  ENST ID: ENST00000448829
  CDS Start-End: 1-643
caaaatcatcagagctcgaaagagcattccagacacatatgcagagcacctcattgctggcggactcatgacgcaggaggaggtgtctgaaataaaatcctcctactatgccaagttgaatgatcacttaaataacatggcccactacaggccccctgccctgaacctgcaggcccactggcagggcctggctcagccagaagcgcaaatcaccacctggagtacaggtgtgcccctcgacctcctgcggtttgttggcatgaagtctgtagaggtgccaagagagctgcagatgcacagtcacctgctgaagacacatgttcagtccagaatggagaagatgatggacggaatcaagctagactgggccaccgcggaagctcttgccttgggttctttacttgctcaaggttttaatgttcgtctaagtggccaagatgttggtcgtggaactttcagtcagaggcatgcaatcgtggtttgccaggagacggatgacacctacatccccctgaaccatatggacccaaatcagaaggggtttctagaggagaggccaagtggctcctacaaagcggcatcgtcatcctccttccacatggctacgatggggctgggccagaccactcatcctgtcgaatagagcgtttcctgcagatgtgtgacagtgcggaagagggggtggacggagacactgtgaacatgtttgtggttcacccaacaactcctgcacagtatttccacttgcttaggagacagatggtccggaacttcagaaaaccactca

SEQ ID NO: 125975 - DNA, 482 bp, Homo sapiens
  Payload ID: 4706
  Gene Symbol: DHTKD1
  Gene Name: dehydrogenase E1 and transketolase domain containing 1
  ENST ID: ENST00000415935
  CDS Start-End: 1-482
ggcaggcagcagtctcgccaagacggcgattactctccagacaactcagcccagccgggggacagggtcatttgcttacaggtccatggtgatgcttctttctgtggtcaagggattgttcctgaaacattcacgctgtccaatctcccacatttcagaattggtgggagtgtgcatttgattgttaataaccagctgggttacaccactccagctgaaagaggaaggtcttctttatactgcagtgatattgggaagcttgtgggctgtgccatcatccatgtcaatggagacagcccagaggaagtggtccgtgccacacgactggcttttgaataccaacgccagttccgcaaggatgtgattattgatctgttgtgctacaggcagtggggccacaatgagctggatgagccattctacaccaaccccatcatgtacaaaatcatcaggtacaattataaacccttgtgtgatatgcc

SEQ ID NO: 125976 - DNA, 1480 bp, Homo sapiens
  Payload ID: 4707
  Gene Symbol: DHRS1
  Gene Name: dehydrogenase/reductase (SDR family) member 1
  Uniprot ID: Q96LJ7
  ENST ID: ENST00000288111
  CDS Start-End: 278-1219
tactacgtcatagttccgcgccgccccagccgggcggggtgggtgtgtcacccagatcgctccgcccccatccgcaggttctaactttggcctgggactctgcccctctacctcagcacagaatcgccccgggtcctactacagaatcaatccttgaacactgcctccacgtcgccggctcaatctgggcgagaacccagacttccaccgcagccccgcaatctgcagacctcagcggcagcgcaggtggcagacctgcctcctttgcctgtgagtcatggcagctcccatgaatggccaagtgtgtgtggtgactggtgcctccaggggtattggccgtggcattgccttgcagctctgcaaagcaggcgccacagtttacatcactggccgccatctggacacccttcgcgttgttgctcaggaggcacaatccctcgggggccaatgtgtgcctgtggtgtgcgattcaagccaggagagtgaagtgcgaagcctgtttgagcaagtggatcgggaacagcaagggcgtctagatgtgctggtcaacaatgcttatgcaggggtccagacgatcctgaacaccaggaataaggcattctgggaaacccctgcctccatgtgggatgatatcaacaacgtcggactcagaggccactacttttgctcagtgtatggggcacggctgatggtaccagctggccaggggctcatcgtggtcatctcctccccaggaagcctgcagtatatgttcaatgtcccctatggtgtgggcaaagctgcgtgtgacaagctggctgctgactgtgcccacgagctgcggcgccatggggtcagctgtgtgtctctgtggccggggattgtgcagacagaactgctgaaggagcatatggcaaaggaggaggtcctgcaggatcctgtgttgaagcagttcaaatcagccttctcatctgcggaaaccacagaattgagtggcaaatgtgtggtggctttggcaacagatcccaatatcctgagcctgagtggtaaggtgctgccatcctgtgaccttgctcgacgctatggccttcgggatgtggacggccgccccgtccaagactatttgtctttgagctctgttctctcacacgtgtccggcctgggctggctggcctcctacctgccctccttcctccgtgtgcccaagtggattattgccctctacactagcaagttctaaccctcctggtctgacactacgtctctgcttgtcttctcatttggacttggtggttcgtcctgtctcagtgaaacagcagcctttcttgtttacccatacccttgatatgaagagaagccctctgctgtgtgtccgtggtgagttctggggtgcgcctaggtcccttctttgtgccttggttttccttgtccttctttttactttttgccttagtattgaaaaatgctcttggagctaataaaagtctcatttctctttcaa

SEQ ID NO: 125977 - DNA, 1470 bp, Homo sapiens
  Payload ID: 4707
  Gene Symbol: DHRS1
  Gene Name: dehydrogenase/reductase (SDR family) member 1
  Uniprot ID: Q96LJ7
  ENST ID: ENST00000396813
  CDS Start-End: 270-1211
agatagcccaggactctgcgtggacgcgccccgaggggctgccgcgccagattcccatatccaggcagccacactcagagggttgtagtagttgtccacctctggacagtcccactcagccccttcttcactctctgggcctcccaaaagacagtcagccttgtcctcaggcccgcacccagttgtcagcctctgactcctctcccctcaaaggattcttaccttggctcctcctcttagccctaacctgcctcctttgcctgtgagtcatggcagctcccatgaatggccaagtgtgtgtggtgactggtgcctccaggggtattggccgtggcattgccttgcagctctgcaaagcaggcgccacagtttacatcactggccgccatctggacacccttcgcgttgttgctcaggaggcacaatccctcgggggccaatgtgtgcctgtggtgtgcgattcaagccaggagagtgaagtgcgaagcctgtttgagcaagtggatcgggaacagcaagggcgtctagatgtgctggtcaacaatgcttatgcaggggtccagacgatcctgaacaccaggaataaggcattctgggaaacccctgcctccatgtgggatgatatcaacaacgtcggactcagaggccactacttttgctcagtgtatggggcacggctgatggtaccagctggccaggggctcatcgtggtcatctcctccccaggaagcctgcagtatatgttcaatgtcccctatggtgtgggcaaagctgcgtgtgacaagctggctgctgactgtgcccacgagctgcggcgccatggggtcagctgtgtgtctctgtggccggggattgtgcagacagaactgctgaaggagcatatggcaaaggaggaggtcctgcaggatcctgtgttgaagcagttcaaatcagccttctcatctgcggaaaccacagaattgagtggcaaatgtgtggtggctttggcaacagatcccaatatcctgagcctgagtggtaaggtgctgccatcctgtgaccttgctcgacgctatggccttcgggatgtggacggccgccccgtccaagactatttgtctttgagctctgttctctcacacgtgtccggcctgggctggctggcctcctacctgccctccttcctccgtgtgcccaagtggattattgccctctacactagcaagttctaaccctcctggtctgacactacgtctctgcttgtcttctcatttggacttggtggttcgtcctgtctcagtgaaacagcagcctttcttgtttacccatacccttgatatgaagagaagccctctgctgtgtgtccgtggtgagttctggggtgcgcctaggtcccttctttgtgccttggttttccttgtccttctttttactttttgccttagtattgaaaaatgctcttggagctaataaaagtctcatttctctttc

SEQ ID NO: 125978 - DNA, 1623 bp, Homo sapiens
  Payload ID: 4707
  Gene Symbol: DHRS1
  Gene Name: dehydrogenase/reductase (SDR family) member 1
  ENST ID: ENST00000558340
  CDS Start-End: 188-631
cctgggactctgcccctctacctcagcacagaatcgccccgggtcctactacagaatcaatccttgaacactgcctccacgtcgccggctcaatctgggcgagaacccagacttccaccgcagccccgcaatctgcagacctcagcggcagcgcaggtggcagacctgcctcctttgcctgtgagtcatggcagctcccatgaatggccaagtgtgtgtggtgactggtgcctccaggggtattggccgtggcattgccttgcagctctgcaaagcaggcgccacagtttacatcactggccgccatctggacacccttcgcgttgttgctcaggaggcacaatccctcgggggccaatgtgtgcctgtggtgtgcgattcaagccaggagagtgaagtgcgaagcctgtttgagcaagtggatcgggaacagcaagggcgtctagatgtgctggtcaacaatgcttatgcaggggtccagacgatcctgaacaccaggaataaggcattctgggaaacccctgcctccatgtgggatgatatcaacaacgtcggactcaggaagcctgcagtatatgttcaatgtcccctatggtgtgggcaaagctgcggtgaggacccagtggcataggagctgaggaggtaaaagacagtgatgttacctatagctcaggaggtacaatccccagtggtcagaatggtaaggctggctcctctcagctcctcctctgcctcatccatggacagttcctttgcttgtgctcctcttggttggctagagtaggcatcacactggggagcgtgggcagctgagaccttggggctcctgggaaggacagggtgggtggagcattcacagtagaagcagagagggcagggcaggaaagtgacatggctaggtggctcttaccctgccttccgcctctccacagtgtgacaagctggctgctgactgtgcccacgagctgcggcgccatggggtcagctgtgtgtctctgtggccggggattgtgcagacagaactgctgaaggagcatatggcaaaggaggaggtcctgcaggatcctgtgttgaagcagttcaaatcagccttctcatctgcggaaaccacagaattgagtggcaaatgtgtggtggctttggcaacagatcccaatatcctgagcctgagtggtaaggtgctgccatcctgtgaccttgctcgacgctatggccttcgggatgtggacggccgccccgtccaagactatttgtctttgagctctgttctctcacacgtgtccggcctgggctggctggcctcctacctgccctccttcctccgtgtgcccaagtggattattgccctctacactagcaagttctaaccctcctggtctgacactacgtctctgcttgtcttctcatttggacttggtggttcgtcctgtctcagtgaaacagcagcctttcttgtttacccatacccttgatatgaagagaagccctctgctgtgtgtccgtggtgagttctggggtgcgcctaggtcccttctttgtgccttggttttccttgtccttctttttactttttgccttagtattgaaaaatgctcttggagctaataaaagtctcatttctct

SEQ ID NO: 125979 - DNA, 1341 bp, Homo sapiens
  Payload ID: 4708
  Gene Symbol: DHRS11
  Gene Name: dehydrogenase/reductase (SDR family) member 11
  Uniprot ID: Q6UWP2
  ENST ID: ENST00000611337
  CDS Start-End: 195-740
actctggtgggtctaggcgcggatcggacccaagcaggtcggcggcggcggcaggagagcggccgggcgtcagctcctcgacccccgtgtcgggctagtccagcgagctggctgctgaatgtaagagtgcaggctaccccgggactttgatcccctacagatgtgacctatcaaatgaagaggacatcctctccatgttctcagctatccgttctcagcacagcggtgtagacatctgcatcaacaatgctggcttggcccggcctgacaccctgctctcaggcagcaccagtggttggaaggacatgttcaatgtgaacgtgctggccctcagcatctgcacacgggaagcctaccagtccatgaaggagcggaatgtggacgatgggcacatcattaacatcaatagcatgtctggccaccgagtgttacccctgtctgtgacccacttctatagtgccaccaagtatgccgtcactgcgctgacagagggactgaggcaagagcttcgggaggcccagacccacatccgagccacgtgcatctctccaggtgtggtggagacacaattcgccttcaaactccacgacaaggaccctgagaaggcagctgccacctatgagcaaatgaagtgtctcaaacccgaggatgtggccgaggctgttatctacgtcctcagcacccccgcacacatccagattggagacatccagatgaggcccacggagcaggtgacctagtgactgtgggagctcctccttccctccccacccttcatggcttgcctcctgcctctggattttaggtgttgatttctggatcacgggataccacttcctgtccacaccccgaccaggggctagaaaatttgtttgagatttttatatcatcttgtcaaattgcttcagttgtaaatgtgaaaaatgggctggggaaaggaggtggtgtccctaattgttttacttgttaacttgttcttgtgcccctgggcacttggcctttgtctgctctcagtgtcttccctttgacatgggaaaggagttgtggccaaaatccccatcttcttgcacctcaacgtctgtggctcagggctggggtggcagagggaggccttcaccttatatctgtgttgttatccagggctccagacttcctcctctgcctgccccactgcaccctctcccccttatctatctccttctcggctccccagcccagtcttggcttcttgtcccctcctggggtcatccctccactctgactctgactatggcagcagaacaccagggcctggcccagtggatttcatggtgatcattaaaaaagaaaaatcgcaaccaa

SEQ ID NO: 125980 - DNA, 756 bp, Homo sapiens
  Payload ID: 4708
  Gene Symbol: DHRS11
  Gene Name: dehydrogenase/reductase (SDR family) member 11
  ENST ID: ENST00000612538
  CDS Start-End: 124-276
ggtgggtctaggcgcggatcggacccaagcaggtcggcggcggcggcaggagagcggccgggcgtcagctcctcgacccccgtgtcgggctagtccagcgaggcggacgggcggcgtgggcccatggccaggcccggcatggagcggtggcgcgaccggctggcgctggtgacgggggcctcggggggcatcggcgcggccgtggcccgggccctggtccagcagggactgaaggtggtgggctgcgcccgcactgtgggcaacatcgagatgtgacctatcaaatgaagaggacatcctctccatgttctcagctatccgttctcagcacagcggtgtagacatctgcatcaacaatgctggcttggcccggcctgacaccctgctctcaggcagcaccagtggttggaaggacatgttcaatgtgaacgtgctggccctcagcatctgcacacgggaagcctaccagtccatgaaggagcggaatgtggacgatgggcacatcattaacatcaatagcatgtctggccaccgagtgttacccctgtctgtgacccacttctatagtgccaccaagtatgccgtcactgcgctgacagagggactgaggcaagagcttcgggaggcccagacccacatccgagccacgtgcatctctccaggtgtggtggagacacaattcgccttcaaactccacgacaaggaccctgagaaggcagctgccacctatgagcaaatgaaggtggggcctccctc

SEQ ID NO: 125981 - DNA, 1598 bp, Homo sapiens
  Payload ID: 4708
  Gene Symbol: DHRS11
  Gene Name: dehydrogenase/reductase (SDR family) member 11
  Uniprot ID: Q6UWP2
  ENST ID: ENST00000618403
  CDS Start-End: 213-995
gcggccgggccgcggcggcctccgactggatacggcggatcgccgggggcctgagggtggagtcccggccggaggcaggccgggactctggtgggtctaggcgcggatcggacccaagcaggtcggcggcggcggcaggagagcggccgggcgtcagctcctcgacccccgtgtcgggctagtccagcgaggcggacgggcggcgtgggcccatggccaggcccggcatggagcggtggcgcgaccggctggcgctggtgacgggggcctcggggggcatcggcgcggccgtggcccgggccctggtccagcagggactgaaggtggtgggctgcgcccgcactgtgggcaacatcgaggagctggctgctgaatgtaagagtgcaggctaccccgggactttgatcccctacagatgtgacctatcaaatgaagaggacatcctctccatgttctcagctatccgttctcagcacagcggtgtagacatctgcatcaacaatgctggcttggcccggcctgacaccctgctctcaggcagcaccagtggttggaaggacatgttcaatgtgaacgtgctggccctcagcatctgcacacgggaagcctaccagtccatgaaggagcggaatgtggacgatgggcacatcattaacatcaatagcatgtctggccaccgagtgttacccctgtctgtgacccacttctatagtgccaccaagtatgccgtcactgcgctgacagagggactgaggcaagagcttcgggaggcccagacccacatccgagccacgtgcatctctccaggtgtggtggagacacaattcgccttcaaactccacgacaaggaccctgagaaggcagctgccacctatgagcaaatgaagtgtctcaaacccgaggatgtggccgaggctgttatctacgtcctcagcacccccgcacacatccagattggagacatccagatgaggcccacggagcaggtgacctagtgactgtgggagctcctccttccctccccacccttcatggcttgcctcctgcctctggattttaggtgttgatttctggatcacgggataccacttcctgtccacaccccgaccaggggctagaaaatttgtttgagatttttatatcatcttgtcaaattgcttcagttgtaaatgtgaaaaatgggctggggaaaggaggtggtgtccctaattgttttacttgttaacttgttcttgtgcccctgggcacttggcctttgtctgctctcagtgtcttccctttgacatgggaaaggagttgtggccaaaatccccatcttcttgcacctcaacgtctgtggctcagggctggggtggcagagggaggccttcaccttatatctgtgttgttatccagggctccagacttcctcctctgcctgccccactgcaccctctcccccttatctatctccttctcggctccccagcccagtcttggcttcttgtcccctcctggggtcatccctccactctgactctgactatggcagcagaacaccagggcctggcccagtggatttcatggtgatcattaaaaaagaaaaatcgcaaccaatc

SEQ ID NO: 125982 - DNA, 926 bp, Homo sapiens
  Payload ID: 4708
  Gene Symbol: DHRS11
  Gene Name: dehydrogenase/reductase (SDR family) member 11
  ENST ID: ENST00000615432
  CDS Start-End: 475-926
tattttcagtagagatagggttccaccaagttagccaaggctggtctcaaactcctgacctcaactggtccacccgccttggccttccaaagtgttgggattacaggcatgagccaccacgcccagccaggacttgagtttatagtgaggtttctccattgataacagccttttcccttcatcactcggggagcactgtcatcccttagactttgaccaaagaggacagacttaggggatgggcagtccaacatcttcgtggctgaaagtcagctgccaaaggagcatgttttatgagtgtgacgggggtcggggtctgaggctggctagggagccgtgggagtgagctgctcaccccagtcagacccctgttgggtttcataggagctggctgctgaatgtaagagtgcaggctaccccgggactttgatcccctacagatgtgacctatcaaatgaagaggacatcctctccatgttctcagctatccgttctcagcacagcggtgtagacatctgcatcaacaatgctggcttggcccggcctgacaccctgctctcaggcagcaccagtggttggaaggacatgttcaatgtgaacgtgctggccctcagcatctgcacacgggaagcctaccagtccatgaaggagcggaatgtggacgatgggcacatcattaacatcaatagcatgtctggccaccgagtgttacccctgtctgtgacccacttctatagtgccaccaagtatgccgtcactgcgctgacagagggactgaggcaagagcttcgggaggcccagacccacatccgagccacgtgcatctctccaggtgtggtggagacacaattcgccttcaaactccacgacaaggaccctgagaaggcagctgccacctatgagcaaatgaagtgtctcaaacccga

SEQ ID NO: 125983 - DNA, 883 bp, Homo sapiens
  Payload ID: 4708
  Gene Symbol: DHRS11
  Gene Name: dehydrogenase/reductase (SDR family) member 11
  ENST ID: ENST00000621871
  CDS Start-End: 1-330
aacgtgctggccctcagcatctgcacacgggaagcctaccagtccatgaaggagcggaatgtggacgatgggcacatcattaacatcaatagcatgtctggccaccgagtgttacccctgtctgtgacccacttctatagtgccaccaagtatgccgtcactgcgctgacagagggactgaggcaagagcttcgggaggcccagacccacatccgagccacgtgtctcaaacccgaggatgtggccgaggctgttatctacgtcctcagcacccccgcacacatccagattggagacatccagatgaggcccacggagcaggtgacctagtgactgtgggagctcctccttccctccccacccttcatggcttgcctcctgcctctggattttaggtgttgatttctggatcacgggataccacttcctgtccacaccccgaccaggggctagaaaatttgtttgagatttttatatcatcttgtcaaattgcttcagttgtaaatgtgaaaaatgggctggggaaaggaggtggtgtccctaattgttttacttgttaacttgttcttgtgcccctgggcacttggcctttgtctgctctcagtgtcttccctttgacatgggaaaggagttgtggccaaaatccccatcttcttgcacctcaacgtctgtggctcagggctggggtggcagagggaggccttcaccttatatctgtgttgttatccagggctccagacttcctcctctgcctgccccactgcaccctctcccccttatctatctccttctcggctccccagcccagtcttggcttcttgtcccctcctggggtcatccctccactctgactctgactatggcagcagaacaccagggcctg

SEQ ID NO: 125984 - DNA, 1598 bp, Homo sapiens; identical to SEQ ID NO: 125981
  Payload ID: 4708
  Gene Symbol: DHRS11
  Gene Name: dehydrogenase/reductase (SDR family) member 11
  Uniprot ID: Q6UWP2
  ENST ID: ENST00000621143
  CDS Start-End: 213-995

SEQ ID NO: 125985 - DNA, 883 bp, Homo sapiens; identical to SEQ ID NO: 125983
  Payload ID: 4708
  Gene Symbol: DHRS11
  Gene Name: dehydrogenase/reductase (SDR family) member 11
  ENST ID: ENST00000631945
  CDS Start-End: 1-330

SEQ ID NO: 125986 - DNA, 756 bp, Homo sapiens; identical to SEQ ID NO: 125980
  Payload ID: 4708
  Gene Symbol: DHRS11
  Gene Name: dehydrogenase/reductase (SDR family) member 11
  ENST ID: ENST00000633383
  CDS Start-End: 124-276

SEQ ID NO: 125987 - DNA, 926 bp, Homo sapiens; identical to SEQ ID NO: 125982
  Payload ID: 4708
  Gene Symbol: DHRS11
  Gene Name: dehydrogenase/reductase (SDR family) member 11
  ENST ID: ENST00000632185
  CDS Start-End: 475-926

SEQ ID NO: 125988 - DNA, 1341 bp, Homo sapiens; identical to SEQ ID NO: 125979
  Payload ID: 4708
  Gene Symbol: DHRS11
  Gene Name: dehydrogenase/reductase (SDR family) member 11
  Uniprot ID: Q6UWP2
  ENST ID: ENST00000631686
  CDS Start-End: 195-740

SEQ ID NO: 125989 - DNA, 1970 bp, Homo sapiens
  Payload ID: 4709
  Gene Symbol: DHRS12
  Gene Name: dehydrogenase/reductase (SDR family) member 12
  Uniprot ID: A0PJE2
  ENST ID: ENST00000218981
  CDS Start-End: 113-841
gaggccgcgccgggagcgcggtggggctaggcgtggggcgctcccggcatgtccctgtaccgcagcgtcgtgtggttcgccaaggggctgcgcgagtacaccaagagtggctatgaatctgcatgtaaagactttgtccctcatgacttggaggtccagattcctggaagagtctttttggtcactggaggaaacagcggcattggcaaagcaactgcccttgaaatcgccaagcgagaacatttttctgcacattgtggacttgtctgatcccaagcaaatctggaaatttgttgaaaatttcaagcaggaacataaactccatgttctgatcaataatgcaggttgcatggtcaataaaagagagctcacagaagatggacttgaaaaaaactttgctgccaatactctgggtgtgtacattctcacgaccggcctgatccctgtgctggagaaagaacacgacccccgagtgataaccgtctcctcaggaggaatgttggttcagaaactgaacaccaatgatctccagtccgaaagaacaccatttgatggaactatggtctatgcacaaaacaagaggcagcaagtggttctgacggagcggtgggcccaagggcacccggccatccatttttcttccatgcatcctggctgggccgacaccccaggtgtgaggcaggcgatgccggggttccacgccaggttcggggaccgcctgcgctccgaggcccagggcgcggacaccatgctgtggctggccctctcctctgccgcagccgcacagcccagcggccgcttctttcaaggtgacttcctccctggctgtgaaggcagctgacacagggctaggggcagcagctgggccttcgaggcgcaccttcccctccgtgaaacctggggtgggactgtcccctggggggtgcctgggcttctttggcgagatgattgctttgcctgctgaggttagttttgggaagcgcttcactccaggttggtagcttctttggagacttgtgataaccctgtcatcaaggtcctgtgagaacgggagaggcagttcctaccttgggaatggaagattttctctgcagtttgctgaggcccaggaggggcgctattcaaagctgcactgcaaagggagtaacggactctgcttctctgcagtgcaaagggtgtaagggactctgcttctctatttttggaagcagtgatctgttcacgtctctccccagtgggctcctaagggggcaggcgtgtgagtggacgccatccgaagacagcacttgacctcgggtggaagccaggctctttgcttggcttctctttcctctgttcttgatgagaaccacccttgcttgaggaattctgaagcgctggtgacccctggggtatccgggaggatggccgcaccccttcctgctgatcacccaaacgtggtctcccgtccagccctggctgcagcctcccagttcccaaactgcactttacatatcaatccatgctgcctgatccctgtgggacctttgacagcagggatgggggtctaacagctgtagggtgctgccactccagcaggcgtcggttcaaggcctgagcagcacagggacatggacccagccacgctgcagcagctcacacctctctgcggttccctctcacttttagatcggaagccagtttctacacacttgcctctcgctacagcgtcctcctcaccggccgaagaggagaaactcattgaaatcctggaacagctggctcagacatttaaataggccaacccagacacagtgcggtaccagaattgccttagaagataccagaaggtgcggtctagggaccagtgaataagaagaccccacttcaacttcccctcgaagacgttgtgcctcacagcgaggcctacaagggatgggaacttttatttcaaaataaatactaccgaggctgtgatcaggctcaccttg

SEQ ID NO: 125990 - DNA, 1324 bp, Homo sapiens
  Payload ID: 4709
  Gene Symbol: DHRS12
  Gene Name: dehydrogenase/reductase (SDR family) member 12
  Uniprot ID: A0PJE2
  ENST ID: ENST00000280056
  CDS Start-End: 54-869
ccgcagcgtcgtgtggttcgccaaggggctgcgcgagtacaccaagagtggctatgaatctgcatgtaaagactttgtccctcatgacttggaggtccagattcctggaagagtctttttggtcactggaggaaacagcggcattggcaaagcaactgcccttgaaatcgccaagcgagaacatttttctgcacattgtggacttgtctgatcccaagcaaatctggaaatttgttgaaaatttcaagcaggaacataaactccatgttctgatcaataatgcaggttgcatggtcaataaaagagagctcacagaagatggacttgaaaaaaactttgctgccaatactctgggtgtgtacattctcacgaccggcctgatccctgtgctggagaaagaacacgacccccgagtgataaccgtctcctcaggaggaatgttggttcagaaactgaacaccaatgatctccagtccgaaagaacaccatttgatggaactatggtctatgcacaaaacaagaggcagcaagtggttctgacggagcggtgggcccaagggcacccggccatccatttttcttccatgcatcctggctgggccgacaccccagacaggaatgagcaggagctgaggaaggtagtgggagaggcccagactgcctcaccactccccaggtttttggaaataatgatgcatgaaggtaaatgccagccacaaggacacagctcgaatgatctggaagcgtgttggagcagcggtggaggggagcagaattctcttccggattggcctcaccaactccatgacctcaggcagctcacctgggctctctgcagctctttcctcctctacaaacaagggaactgaaagcagcagcagccacagcacacaccccagggtgcacccgcggcgccaagaactggtctcagcgctgtctgcggattaacgcatttgtcctcaagcctctgtggagtggccactactgtctattatcacacccatttacagatgagggaactgaggcccagagaggctaagacctcccagccgggcctggccatggggttttgggaatcaggctctcacacactgctggcatggcctttctgaaaatcactatttatcagaagccttggaattcatcctaagaaataaagatagggaaaacaaggttgcttatcacagtgctggtggtaggagatgaagttaataaattatagaacacctgtgcaaaatctgttcagggctgaagactctgctgccaatcatgcctatggaaaaaccctgtgtgcactatatcattaaatgaagataccaagttc

SEQ ID NO: 125991 - DNA, 1162 bp, Homo sapiens
  Payload ID: 4709
  Gene Symbol: DHRS12
  Gene Name: dehydrogenase/reductase (SDR family) member 12
  Uniprot ID: A0PJE2
  ENST ID: ENST00000444610
  CDS Start-End: 15-968
ggggcgctcccggcatgtccctgtaccgcagcgtcgtgtggttcgccaaggggctgcgcgagtacaccaagagtggctatgaatctgcatgtaaagactttgtccctcatgacttggaggtccagattcctggaagagtctttttggtcactggaggaaacagcggcattggcaaagcaactgcccttgaaatcgccaagcgaggtggcacagttcacctggtttgtcgagatcaagccccagcagaagatgccaggggtgagatcatccgggagagcggtaaccagaacatttttctgcacattgtggacttgtctgatcccaagcaaatctggaaatttgttgaaaatttcaagcaggaacataaactccatgttctgatcaataatgcaggttgcatggtcaataaaagagagctcacagaagatggacttgaaaaaaactttgctgccaatactctgggtgtgtacattctcacgaccggcctgatccctgtgctggagaaagaacacgacccccgagtgataaccgtctcctcaggaggaatgttggttcagaaactgaacaccaatgatctccagtccgaaagaacaccatttgatggaactatggtctatgcacaaaacaagaggcagcaagtggttctgacggagcggtgggcccaagggcacccggccatccatttttcttccatgcatcctggctgggccgacaccccaggtgtgaggcaggcgatgccggggttccacgccaggttcggggaccgcctgcgctccgaggcccagggcgcggacaccatgctgtggctggccctctcctctgccgcagccgcacagcccagcggccgcttctttcaagatcggaagccagtttctacacacttgcctctcgctacagcgtcctcctcaccggccgaagaggagaaactcattgaaatcctggaacagctggctcagacatttaaataggccaacccagacacagtgcggtaccagaattgccttagaagataccagaaggtgcggtctagggaccagtgaataagaagaccccacttcaacttcccctcgaagacgttgtgcctcacagcgaggcctacaagggatgggaacttttatttcaaaataaatactaccgaggctgtgatcaggctcaccttgaa

SEQ ID NO: 125992 - DNA, 487 bp, Homo sapiens
  Payload ID: 4709
  Gene Symbol: DHRS12
  Gene Name: dehydrogenase/reductase (SDR family) member 12
  ENST ID: ENST00000461948
  CDS Start-End: 1-303
agagagctcacagaagatggacttgaaaaaaactttgctgccaatactctgggtgtgtacattctcacgaccggcctgatccctgtgctggagaaagaacacgacccccgagtgataaccgtctcctcaggaggaatgttggttcagaaactgaacaccaatgatctccagtccgaaagaacaccatttgatggaactatggtctatgcacaaaacaagggcgcccacattgtctgtaaggctgccagcaccctccgccttccttgtcgctgctgtgtgccttccgaaggtggccctgtctgagactctctgcacctccacttcttctgtttatatgccctgggtgtgccccagttttgctccttgaccccagaccaaatcctggtgaattacatctcatgactccaaatcctgacatttgaaagacctgcacttctttacagttttcccagaggacatgggaataaaccatccacttgtaaatgag

SEQ ID NO: 125993 - DNA, 1921 bp, Homo sapiens
  Payload ID: 4710
  Gene Symbol: DHRS13
  Gene Name: dehydrogenase/reductase (SDR family) member 13
  Uniprot ID: Q6UX07
  ENST ID: ENST00000378895
  CDS Start-End: 128-1261
cgcctccgccttcggaggctgacgcgcccgggcgccgttccaggcctgtgcagggcggatcggcagccgcctggcggcgatccagggcggtgcggggcctgggcgggagccgggaggcgcggccggcatggaggcgctgctgctgggcgcggggttgctgctgggcgcttacgtgcttgtctactacaacctggtgaaggccccgccgtgcggcggcatgggcaacctgcggggccgcacggccgtggtcacgggcgccaacagcggcatcggaaagatgacggcgctggagctggcgcgccggggagcgcgcgtggtgctggcctgccgcagccaggagcgcggggaggcggctgccttcgacctccgccaggagagtgggaacaatgaggtcatcttcatggccttggacttggccagtctggcctcggtgcgggcctttgccactgcctttctgagctctgagccacggttggacatcctcatccacaatgccggtatcagttcctgtggccggacccgtgaggcgtttaacctgctgcttcgggtgaaccatatcggtccctttctgctgacacatctgctgctgccttgcctgaaggcatgtgcccctagccgcgtggtggtggtagcctcagctgcccactgtcggggacgtcttgacttcaaacgcctggaccgcccagtggtgggctggcggcaggagctgcgggcatatgctgacactaagctggctaatgtactgtttgcccgggagctcgccaaccagcttgaggccactggcgtcacctgctatgcagcccacccagggcctgtgaactcggagctgttcctgcgccatgttcctggatggctgcgcccacttttgcgcccattggcttggctggtgctccgggcaccaagagggggtgcccagacacccctgtattgtgctctacaagagggcatcgagcccctcagtgggagatattttgccaactgccatgtggaagaggtgcctccagctgcccgagacgaccgggcagcccatcggctatgggaggccagcaagaggctggcagggcttgggcctggggaggatgctgaacccgatgaagacccccagtctgaggactcagaggccccatcttctctaagcaccccccaccctgaggagcccacagtttctcaaccttaccccagccctcagagctcaccagatttgtctaagatgacgcaccgaattcaggctaaagttgagcctgagatccagctctcctaaccctcaggccaggatgcttgccatggcacttcatggtccttgaaaacctcggatgtgtgcgaggccatgccctggacactgacgggtttgtgatcttgacctccgtggttactttctggggccccaagctgtgccctggacatctcttttcctggttgaaggaataatgggtgattatttcttcctgagagtgacagtaaccccagatggagagataggggtatgctagacactgtgcttctcggaaatttggatgtagtattttcaggccccacccttattgattctgatcagctctggagcagaggcagggagtttgcaatgtgatgcactgccaacattgagaattagtgaactgatccctttgcaaccgtctagctaggtagttaaattacccccatgttaatgaagcggaattaggctcccgagctaagggactcgcctagggtctcacagtgagtaggaggagggcctgggatctgaacccaagggtctgaggccagggccgactgccgtaagatgggtgctgagaagtgagtcagggcagggcagctggtatcgaggtgccccatgggagtaaggggacgccttccgggcggatgcagggctggggtcatctgtatctgaagcccctcggaataaagcgcgttgaccgccgaa

SEQ ID NO: 125994 - DNA, 2037 bp, Homo sapiens
  Payload ID: 4710
  Gene Symbol: DHRS13
  Gene Name: dehydrogenase/reductase (SDR family) member 13
  Uniprot ID: Q6UX07
  ENST ID: ENST00000394901
  CDS Start-End: 394-1377
cgcctccgccttcggaggctgacgcgcccgggcgccgttccaggcctgtgcagggcggatcggcagccgcctggcggcgatccagggcggtgcggggcctgggcgggagccgggaggcgcggccggcatggaggcgctgctgctgggcgcggggttgctgctgggcgcttacgtgcttgtctactacaacctggtgaaggccccgccgtgcggcggcatgggcaacctgcggggccgcacggccgtggtcacgggtgagtgcggaggcgggtgagtgcgagctggcggggcgcgcggagaggaggccgggccggcggtagcagcggcccgccgggctcagctcagctcggctcccgcccgcggtccgcaggcgccaacagcggcatcggaaagatgacggcgctggagctggcgcgccggggagcgcgcgtggtgctggcctgccgcagccaggagcgcggggaggcggctgccttcgacctccgccaggagagtgggaacaatgaggtcatcttcatggccttggacttggccagtctggcctcggtgcgggcctttgccactgcctttctgagctctgagccacggttggacatcctcatccacaatgccggtatcagttcctgtggccggacccgtgaggcgtttaacctgctgcttcgggtgaaccatatcggtccctttctgctgacacatctgctgctgccttgcctgaaggcatgtgcccctagccgcgtggtggtggtagcctcagctgcccactgtcggggacgtcttgacttcaaacgcctggaccgcccagtggtgggctggcggcaggagctgcgggcatatgctgacactaagctggctaatgtactgtttgcccgggagctcgccaaccagcttgaggccactggcgtcacctgctatgcagcccacccagggcctgtgaactcggagctgttcctgcgccatgttcctggatggctgcgcccacttttgcgcccattggcttggctggtgctccgggcaccaagagggggtgcccagacacccctgtattgtgctctacaagagggcatcgagcccctcagtgggagatattttgccaactgccatgtggaagaggtgcctccagctgcccgagacgaccgggcagcccatcggctatgggaggccagcaagaggctggcagggcttgggcctggggaggatgctgaacccgatgaagacccccagtctgaggactcagaggccccatcttctctaagcaccccccaccctgaggagcccacagtttctcaaccttaccccagccctcagagctcaccagatttgtctaagatgacgcaccgaattcaggctaaagttgagcctgagatccagctctcctaaccctcaggccaggatgcttgccatggcacttcatggtccttgaaaacctcggatgtgtgcgaggccatgccctggacactgacgggtttgtgatcttgacctccgtggttactttctggggccccaagctgtgccctggacatctcttttcctggttgaaggaataatgggtgattatttcttcctgagagtgacagtaaccccagatggagagataggggtatgctagacactgtgcttctcggaaatttggatgtagtattttcaggccccacccttattgattctgatcagctctggagcagaggcagggagtttgcaatgtgatgcactgccaacattgagaattagtgaactgatccctttgcaaccgtctagctaggtagttaaattacccccatgttaatgaagcggaattaggctcccgagctaagggactcgcctagggtctcacagtgagtaggaggagggcctgggatctgaacccaagggtctgaggccagggccgactgccgtaagatgggtgctgagaagtgagtcagggcagggcagctggtatcgaggtgccccatgggagtaaggggacgccttccgggcggatgcagggctggggtcatctgtatctgaagcccctcggaataaagcgcgttgaccgccgaa

SEQ ID NO: 125995 - DNA, 1569 bp, Homo sapiens
  Payload ID: 4710
  Gene Symbol: DHRS13
  Gene Name: dehydrogenase/reductase (SDR family) member 13
  Uniprot ID: Q6UX07
  ENST ID: ENST00000426464
  CDS Start-End: 22-912
gagccgggaggcgcggccggcatggaggcgctgctgctgggcgcggggttgctgctgggcgcttacgtgcttgtctactacaacctggtgaaggccccgccgtgcggcggcatgggcaacctgcggggccgcacggccgtggtcacgggtatcagttcctgtggccggacccgtgaggcgtttaacctgctgcttcgggtgaaccatatcggtccctttctgctgacacatctgctgctgccttgcctgaaggcatgtgcccctagccgcgtggtggtggtagcctcagctgcccactgtcggggacgtcttgacttcaaacgcctggaccgcccagtggtgggctggcggcaggagctgcgggcatatgctgacactaagctggctaatgtactgtttgcccgggagctcgccaaccagcttgaggccactggcgtcacctgctatgcagcccacccagggcctgtgaactcggagctgttcctgcgccatgttcctggatggctgcgcccacttttgcgcccattggcttggctggtgctccgggcaccaagagggggtgcccagacacccctgtattgtgctctacaagagggcatcgagcccctcagtgggagatattttgccaactgccatgtggaagaggtgcctccagctgcccgagacgaccgggcagcccatcggctatgggaggccagcaagaggctggcagggcttgggcctggggaggatgctgaacccgatgaagacccccagtctgaggactcagaggccccatcttctctaagcaccccccaccctgaggagcccacagtttctcaaccttaccccagccctcagagctcaccagatttgtctaagatgacgcaccgaattcaggctaaagttgagcctgagatccagctctcctaaccctcaggccaggatgcttgccatggcacttcatggtccttgaaaacctcggatgtgtgcgaggccatgccctggacactgacgggtttgtgatcttgacctccgtggttactttctggggccccaagctgtgccctggacatctcttttcctggttgaaggaataatgggtgattatttcttcctgagagtgacagtaaccccagatggagagataggggtatgctagacactgtgcttctcggaaatttggatgtagtattttcaggccccacccttattgattctgatcagctctggagcagaggcagggagtttgcaatgtgatgcactgccaacattgagaattagtgaactgatccctttgcaaccgtctagctaggtagttaaattacccccatgttaatgaagcggaattaggctcccgagctaagggactcgcctagggtctcacagtgagtaggaggagggcctgggatctgaacccaagggtctgaggccagggccgactgccgtaagatgggtgctgagaagtgagtcagggcagggcagctggtatcgaggtgccccatgggagtaaggggacgccttccgggcggatgcagggctggggtcatctgtatctgaagcccctcggaataaagcgcgttgaccgcc

SEQ ID NO: 125996 - DNA, 1705 bp, Homo sapiens
  Payload ID: 4711
  Gene Symbol: DHRS2
  Gene Name: dehydrogenase/reductase (SDR family) member 2
  Uniprot ID: Q13268
  ENST ID: ENST00000250383
  CDS Start-End: 477-1319
aataaaagcaggctgcctgagccggcagcagcaacctgctctggttcccttccacgctgtggaagctttgttcttttggtcttcatgataaatcttgctgctgctcactcgttgggtccgtgccacctttaagagctgtaacactcaccgcgaaggtctgcaacttcactcctggggccagcaagaccacgaatgcaccgagaggaatgaacaactctggacacaccatctttaagaaccgtaatactcaccgcaagggtctgcaacttcattcttgaagtcagtgaggccaagaacccatcaattccgtacacattttggtgactttgaagagactgtcacctatcaccaagtggtgagactattgccaagcagtgagactattgccaagtggtgagaccatcaccaagcggtgagactatcacctatcgccaagtggcctgattcagcaggaagcatctcagacaccaaccactatgctgtcagcagttgcccggggctaccagggctggtttcatccctgtgctaggctttctgtgaggatgagcagcaccgggatagacaggaagggcgtcctggctaaccgggtagccgtggtcacggggtccaccagtgggatcggctttgccatcgcccgacgtctggcccgggacggggcccacgtggtcatcagcagccggaagcagcagaacgtggaccgggccatggccaagctgcagggggaggggctgagtgtggcgggcattgtgtgccacgtggggaaggctgaggaccgggagcagctggtggccaaggccctggagcactgtgggggcgtcgacttcctggtgtgcagcgcaggggtcaaccctctggtagggagcactctggggaccagtgagcagatctgggacaagatcctaagtgtgaacgtgaagtccccagccctgctgctgagccagttgctgccctacatggagaacaggaggggtgctgtcatcctggtctcttccattgcagcttataatccagtagtggcgctgggtgtctacaatgtcagcaagacagcgctgctgggtctcactagaacactggcattggagctggcccccaaggacatccgggtaaactgcgtggttccaggaattatcaaaactgacttcagcaaagtgtttcatgggaatgagtctctctggaagaacttcaaggaacatcatcagctgcagaggattggggagtcagaggactgtgcaggaatcgtgtccttcctgtgctctccagatgccagctacgtcaacggggagaacattgcggtggcaggctactccactcggctctgagaggagtgggggcggctgcgtagctgtggtcccaggcccaggagcctgagggggtgtctaggtgatcatttggatctggaggcagagtctgccattctgccagactagcaatttgggggcttactcatgctaggcttgaggaagaagaaaaacgcttcggcattctccttaggacttatctgcttgtagatttggctgatccaattaacatgtggggttcttggtgtgggtctggggagctgaaggattttatggagctggtgctttggaggaatcttaagggaaaggagtagaagctcaggcctttgaaggatttcagctcctcctctctgtaatttgtgctttaagcattttttttcctaaaataaactcaaatttatcctcaa

SEQ ID NO: 125997 - DNA, 1678 bp, Homo sapiens
  Payload ID: 4711
  Gene Symbol: DHRS2
  Gene Name: dehydrogenase/reductase (SDR family) member 2
  Uniprot ID: Q13268
  ENST ID: ENST00000344777
  CDS Start-End: 439-1341
ctctggttcccttccacgctgtggaagctttgttcttttggtcttcatgataaatcttgctgctgctcactcgttgggtccgtgccacctttaagagctgtaacactcaccgcgaaggtctgcaacttcactcctggggccagcaagaccacgaatgcaccgagaggaatgaacaactctggacacaccatctttaagaaccgtaatactcaccgcaagggtctgcaacttcattcttgaagtcagtgaggccaagaacccatcaattccgtacacattttggtgactttgaagagactgtcacctatcaccaagtggtgagactattgccaagcagtgagactattgccaagtggtgagaccatcaccaagcggtgagactatcacctatcgccaagtggcctgattcagcaggaagcatctcagacaccaaccactatgctgtcagcagttgcccggggctaccagggctggtttcatccctgtgctaggctttctgtgaggatgagcagcaccgggatagacaggaagggcgtcctggctaaccgggtagccgtggtcacggggtccaccagtgggatcggctttgccatcgcccgacgtctggcccgggacggggcccacgtggtcatcagcagccggaagcagcagaacgtggaccgggccatggccaagctgcagggggaggggctgagtgtggcgggcattgtgtgccacgtggggaaggctgaggaccgggagcagctggtggccaaggccctggagcactgtgggggcgtcgacttcctggtgtgcagcgcaggggtcaaccctctggtagggagcactctggggaccagtgagcagatctgggacaagatcctaagtgtgaacgtgaagtccccagccctgctgctgagccagttgctgccctacatggagaacaggaggggtgctgtcatcctggtctcttccattgcagcttataatccagtagtggcgctgggtgtctacaatgtcagcaagacagcgctgctgggtctcactagaacactggcattggagctggcccccaaggacatccgggtaaactgcgtggttccaggaattatcaaaactgacttcagcaaagtggtgaggattggtttcatgggaatgagtctctctggaagaacttcaaggaacatcatcagctgcagaggattggggagtcagaggactgtgcaggaatcgtgtccttcctgtgctctccagatgccagctacgtcaacggggagaacattgcggtggcaggctactccactcggctctgagaggagtgggggcggctgcgtagctgtggtcccaggcccaggagcctgagggggtgtctaggtgatcatttggatctggaggcagagtctgccattctgccagactagcaatttgggggcttactcatgctaggcttgaggaagaagaaaaacgcttcggcattctccttaggacttatctgcttgtagatttggctgatccaattaacatgtggggttcttggtgtgggtctggggagctgaaggattttatggagctggtgctttggaggaatcttaagggaaaggagtagaagctcaggcctttgaaggatttcagctcctcctctctgtaatttgtgctttaagcattttttttcctaaaataaactcaaatttatcctcaa

SEQ ID NO: 125998 - DNA, 834 bp, Homo sapiens
  Payload ID: 4711
  Gene Symbol: DHRS2
  Gene Name: dehydrogenase/reductase (SDR family) member 2
  ENST ID: ENST00000432832
  CDS Start-End: 160-834
agatagaatctgcagtgcctgaaatccagcctgctgcttactcacatcctcatactcagctgcagactgcctgacagaagggctgccaaactgcactccagacagacaggtgcacagccaggcctgattcagcaggaagcatctcagacaccaaccactatgctgtcagcagttgcccggggctaccagggctggtttcatccctgtgctaggctttctgtgaggatgagcagcaccgggatagacaggaagggcgtcctggctaaccgggtagccgtggtcacggggtccaccagtgggatcggctttgccatcgcccgacgtctggcccgggacggggcccacgtggtcatcagcagccggaagcagcagaacgtggaccgggccatggccaagctgcagggggaggggctgagtgtggcgggcattgtgtgccacgtggggaaggctgaggaccgggagcagctggtggccaaggccctggagcactgtgggggcgtcgacttcctggtgtgcagcgcaggggtcaaccctctggtagggagcactctggggaccagtgagcagatctgggacaagatcctaagtgtgaacgtgaagtccccagccctgctgctgagccagttgctgccctacatggagaacaggaggggtgctgtcatcctggtctcttccattgcagcttataatccagtagtggcgctgggtgtctacaatgtcagcaagacagcgctgctgggtctcactagaacactggcattggagctggcccccaaggacatccgggtaaactgcgtggttccaggaattatcaaaactgacttcagcaaagtg

SEQ ID NO: 125999 - DNA, 844 bp, Homo sapiens
  Payload ID: 4711
  Gene Symbol: DHRS2
  Gene Name: dehydrogenase/reductase (SDR family) member 2
  ENST ID: ENST00000553600
  CDS Start-End: 1-486
gagcagctggtggccaaggccctggagcactgtgggggcgtcgacttcctggtgtgcagcgcaggggtcaaccctctggtagggagcactctggggaccagtgagcagatctgggacaagatcctaagtgtgaacgtgaagtccccagccctgctgctgagccagttgctgccctacatggagaacaggaggggtgctgtcatcctggtctcttccattgcagcttataatccagtagtggcgctgggtgtctacaatgtcagcaagacagcgctgctgggtctcactagaacactggcattggagctggcccccaaggacatccgggtaaactgcgtggttccaggaattatcaaaactgacttcagcaaagtgtttcatgggaatgagtctctctggaagaacttcaaggaacatcatcagctgcagaggcaagtggggtttggagatttggtggtccatgtgtggctaggcaggggcagttgagtctattgcaagagcagacccctccctgtcatctggccattgtttttgctgaaatctggagtccacatggccctggagggtgcaagtagccctgctgcatccaccttgttccccatggagcccactcccacctgtcatccgtgagccccagagcagcagaatcagagtacaagatgcttgacactgtgtccttcttccatccaggattggggagtcagaggactgtgcaggaatcgtgtccttcctgtgctctccagatgccagctacgtcaacggggagaacattgcggtggcaggctactccactcggctctgagaggagtgggggcggctgcgtagctgtggtcccaggcccagg

SEQ ID NO: 126000 - DNA, 927 bp, Homo sapiens
  Payload ID: 4711
  Gene Symbol: DHRS2
  Gene Name: dehydrogenase/reductase (SDR family) member 2
  ENST ID: ENST00000557535
  CDS Start-End: 1-541
gagtgtggcgggcattgtgtgccacgtggggaaggctgaggaccgggagcagctggtggccaaggccctggagcactgtgggggcgtcgacttcctggtgtgcagcgcaggggtcaaccctctggtagggagcactctggggaccagtgagcagatctgggacaagatcctaagtgtgaacgtgaagtccccagccctgctgctgagccagttgctgccctacatggagaacaggaggggtgctgtcatcctggtctcttccattgcagcttataatccagtagtggcgctgggtgtctacaatgtcagcaagacagcgctgctgggtctcactagaacactggcattggagctggcccccaaggacatccggtttcatgggaatgagtctctctggaagaacttcaaggaacatcatcagctgcagaggattggggagtcagaggactgtgcaggaatcgtgtccttcctgtgctctccagatgccagctacgtcaacggggagaacattgcggtggcaggctactccactcggctctgagaggagtgggggcggctgcgtagctgtggtcccaggcccaggagcctgagggggtgtctaggtgatcatttggatctggaggcagagtctgccattctgccagactagcaatttgggggcttactcatgctaggcttgaggaagaagaaaaacgcttcggcattctccttaggacttatctgcttgtagatttggctgatccaattaacatgtggggttcttggtgtgggtctggggagctgaaggattttatggagctggtgctttggaggaatcttaagggaaaggagtagaagctcaggcctttgaaggatttcagctcctcctctctgtaatttgtgctttaagcattttttttcctaaaataaactcaaatttatcctcaa

SEQ ID NO: 126001 - DNA, 1287 bp, Homo sapiens
  Payload ID: 4711
  Gene Symbol: DHRS2
  Gene Name: dehydrogenase/reductase (SDR family) member 2
  Uniprot ID: Q13268
  ENST ID: ENST00000611765
  CDS Start-End: 50-952
ctttcccccaggcctgattcagcaggaagcatctcagacaccaaccactatgctgtcagcagttgcccggggctaccagggctggtttcatccctgtgctaggctttctgtgaggatgagcagcaccgggatagacaggaagggcgtcctggctaaccgggtagccgtggtcacggggtccaccagtgggatcggctttgccatcgcccgacgtctggcccgggacggggcccacgtggtcatcagcagccggaagcagcagaacgtggaccgggccatggccaagctgcagggggaggggctgagtgtggcgggcattgtgtgccacgtggggaaggctgaggaccgggagcagctggtggccaaggccctggagcactgtgggggcgtcgacttcctggtgtgcagcgcaggggtcaaccctctggtagggagcactctggggaccagtgagcagatctgggacaagatcctaagtgtgaacgtgaagtccccagccctgctgctgagccagttgctgccctacatggagaacaggaggggtgctgtcatcctggtctcttccattgcagcttataatccagtagtggcgctgggtgtctacaatgtcagcaagacagcgctgctgggtctcactagaacactggcattggagctggcccccaaggacatccgggtaaactgcgtggttccaggaattatcaaaactgacttcagcaaagtggtgaggattggtttcatgggaatgagtctctctggaagaacttcaaggaacatcatcagctgcagaggattggggagtcagaggactgtgcaggaatcgtgtccttcctgtgctctccagatgccagctacgtcaacggggagaacattgcggtggcaggctactccactcggctctgagaggagtgggggcggctgcgtagctgtggtcccaggcccaggagcctgagggggtgtctaggtgatcatttggatctggaggcagagtctgccattctgccagactagcaatttgggggcttactcatgctaggcttgaggaagaagaaaaacgcttcggcattctccttaggacttatctgcttgtagatttggctgatccaattaacatgtggggttcttggtgtgggtctggggagctgaaggattttatggagctggtgctttggaggaatcttaagggaaaggagtagaagctcaggcctttgaaggatttcagctcctcctctctgtaatttgtgctttaagcattttttttcctaaaataaactcaaatttatcctc

SEQ ID NO: 126002 - DNA, 826 bp, Homo sapiens
  Payload ID: 4712
  Gene Symbol: DHRS3
  Gene Name: dehydrogenase/reductase (SDR family) member 3
  ENST ID: ENST00000430996
  CDS Start-End: 384-826
ggaagcggagacagagaccctagaggagaggctgcccccggaggggtgggagctgccagcccccaggggtgctcgaggggagcgaggccgctccagggaggtgggtgcccgccagaggggcggcgagggctgccgggacggttcacgcagcggccagcagactggctgcgtgttgcaatgtctggtggcgtttgcagcatcctgtccgtgtgtgcagctggggtaacctcgggccggcggaggagcgcgtgtggctcgtaggccctgcggccggaggctgctggcaccttgcatctcatttacagctccgggttcagccacagattgttctctggggccggactgagaaatgcctgaaggagacgacggaggagatccggcagatgggcactgagtgccattacttcatctgtgatgtgggcaaccgggaggaggtgtaccagacggccaaggccgtccgggagaaggtgggtgacatcaccatcctggtgaacaatgccgccgtggtccatgggaagagcctaatggacagtgatgatgatgccctcctcaagtcccaacacatcaacaccctgggccagttctggaccaccaaggccttcctgccgcgtatgctggagctgcagaatggccacatcgtgtgcctcaactccgtgctggcactgtctgccatccccggtgccatcgactactgcacatccaaagcgtcagccttcgccttcatggagagcctgaccctggggctgctggactgtccgggagtcagcgccaccacagtgctgcccttccacaccagcaccgagatgttccagggcatgagagtcag

SEQ ID NO: 126003 - DNA, 539 bp, Homo sapiens
  Payload ID: 4712
  Gene Symbol: DHRS3
  Gene Name: dehydrogenase/reductase (SDR family) member 3
  ENST ID: ENST00000464917
  CDS Start-End: 297-539
gagtgcagggtgtgcgcactcctgggtagagctgggagccgcctgctagctggcgcctcgtattttccttggcaacccgctacccagccccaacctgggcggctgcagctctgaagacacgagagagggtacttggtttgggtttgaaaagggaagagcggtcttgtatgcagtagtctggccggaccgacactgagaggcccaggtgtttggaaagcaggaaagaggaggccaggattgttctctggggccggactgagaaatgcctgaaggagacgacggaggagatccggcagatgggcactgagtgccattacttcatctgtgatgtgggcaaccgggaggaggtgtaccagacggccaaggccgtccgggagaaggtttcccaacctctttcccccactgaagccggagacggtggcccggaggacagtggaagctgtgcagctcaaccaggccctcctcctcctcccatggacaatgcatgccctcgttatcttgaaaagcatacttccacaggctgcactcgaggagatcca

SEQ ID NO: 126004 - DNA, 1722 bp, Homo sapiens
  Payload ID: 4712
  Gene Symbol: DHRS3
  Gene Name: dehydrogenase/reductase (SDR family) member 3
  Uniprot ID: O75911
  ENST ID: ENST00000616661
  CDS Start-End: 384-1292
tttttttttttttcttcccctccctaaactcctctgtcagtctgtaaacattacctgagaattccccagccgaaacggctgctggggcaagaaacttcttgttagaactttccacctccggcttccccctccacctcttttaccgtcccaaccttaggagacgctttttctcccccagaggagaatttatcttttttttttttttttttttctttttctcacccggtgctttgcatttgggaagaggtgatttcaagagtggccaggtgggacgcctctctcctccttattcggtttactatttattgttcggggtgttttttaattcctgtattgctcggcccggggagtttcgccccctgcccggctccgcggcgcggaggatggtgtggaaacggctgggcgcgctggtgatgttccctctacagatgatctatctggtggtgaaagcagccgtcggactggtgctgcccgccaagctgcgggacctgtcgcgggagaacgtcctcatcaccggcggcgggagaggcatcgggcgtcagctcgcccgcgagttcgcggagcgcggcgccagaaagattgttctctggggccggactgagaaatgcctgaaggagacgacggaggagatccggcagatgggcactgagtgccattacttcatctgtgatgtgggcaaccgggaggaggtgtaccagacggccaaggccgtccgggagaaggtgggtgacatcaccatcctggtgaacaatgccgccgtggtccatgggaagagcctaatggacagtgatgatgatgccctcctcaagtcccaacacatcaacaccctgggccagttctggaccaccaaggccttcctgccgcgtatgctggagctgcagaatggccacatcgtgtgcctcaactccgtgctggcactgtctgccatccccggtgccatcgactactgcacatccaaagcgtcagccttcgccttcatggagagcctgaccctggggctgctggactgtccgggagtcagcgccaccacagtgctgcccttccacaccagcaccgagatgttccagggcatgagagtcaggtttcccaacctctttcccccactgaagccggagacggtggcccggaggacagtggaagctgtgcagctcaaccaggccctcctcctcctcccatggacaatgcatgccctcgttatcttgaaaagcatacttccacaggctgcactcgaggagatccacaaattctcaggaacctacacctgcatgaacactttcaaagggcggacatagagacaggatgaagacatgcttgaggagccacggagtttgggggccacagcacctgggcacacacccgagcacctgtccattggcatgcttctgctgggtgagcaggacagctcctgtccccagcgaagaatccggctgcccctgggccagtcccaggacctttgcacaggactgatgggtataactgacccccacagggaggcaggaaaacagccagaagccaccttgacacttttgaacatttccagttctgtagagtttattgtcaattgcttctcaagtctaaccagcctcagcagtgtgcatagaccatttccaggagggtctgtccccagatgctctgcctcccgttccaaaacccactcatcctcagcttgcacaaactggttgaacggcaggaatgaaaaataaagagagatggcttttgtga

SEQ ID NO: 126005 - DNA, 1443 bp, Homo sapiens
  Payload ID: 4713
  Gene Symbol: DHRS4
  Gene Name: dehydrogenase/reductase (SDR family) member 4
  Uniprot ID: Q9BTZ2
  ENST ID: ENST00000313250
  CDS Start-End: 204-1040
aaaggcaagccccagtcaggcggaaggtagatggtggaggggcgccgcggcggatggaggtgcccagggccacagaccgctcacagcggtaccggggcggggagcagggcgggcagggaatcggcccgcccttcgtcctgcccctcgccctactctgtcaccgcccctgggaagagtggaacccatacttgctggtctgatccatgcacaaggcggggctgctaggcctctgtgcccgggcttggaattcggtgcggatggccagctccgggatgacccgccgggacccgctcgcaaataaggtggccctggtaacggcctccaccgacgggatcggcttcgccatcgcccggcgtttggcccaggacggggcccatgtggtcgtcagcagccggaagcagcagaatgtggaccaggcggtggccacgctgcagggggaggggctgagcgtgacgggcaccgtgtgccatgtggggaaggcggaggaccgggagcggctggtggccacggctgtgaagcttcatggaggtatcgatatcctagtctccaatgctgctgtcaaccctttctttggaagcataatggatgtcactgaggaggtgtgggacaagactctggacattaatgtgaaggccccagccctgatgacaaaggcagtggtgccagaaatggagaaacgaggaggcggctcagtggtgatcgtgtcttccatagcagccttcagtccatctcctggcttcagtccttacaatgtcagtaaaacagccttgctgggcctgaccaagaccctggccatagagctggccccaaggaacattagggtgaactgcctagcacctggacttatcaagactagcttcagcaggatgctctggatggacaaggaaaaagaggaaagcatgaaagaaaccctgcggataagaaggttaggcgagccagaggattgtgctggcatcgtgtctttcctgtgctctgaagatgccagctacatcactggggaaacagtggtggtgggtggaggaaccccgtcccgcctctgaggaccgggagacagcccacaggccagagttgggctctagctcctggtgctgttcccgcattcacccactggcctttcccacctctgctcaccttactgttcacctcatcaaatcagttctgccctgtgaaaagatccagccttccctgccgtcaaggtggcgtcttactcgggatttctgctgttgttgtggccttgggtaaaggcctcccctgagaacacaggacaggcctgctgacaaggctgagtctaccttggcaaagaccaagatattttttcccgggccactggggaatctgaggggtgatgggagagaaggaacctggagtggaaggagcagagttgcaaattaacaacttgcaaatgaggtgcaaataaaatgcagatgattgcgcggctttgaa

SEQ ID NO: 126006 - DNA, 785 bp, Homo sapiens
  Payload ID: 4713
  Gene Symbol: DHRS4
  Gene Name: dehydrogenase/reductase (SDR family) member 4
  Uniprot ID: Q9BTZ2
  ENST ID: ENST00000397074
  CDS Start-End: 4-480
tccatgcacaaggcggggctgctaggcctctgtgcccgggcttggaattcggtgcggatggccagctccgggatgacccgccgggacccgctcgcaaataaggtggccctggtaacggcctccaccgacgggatcggcttcgccatcgcccggcgtttggcccaggacggggcccatgtggtcgtcagcagccggaagcagcagaatgtggaccaggcggtggccacgctgcagggggaggggctgagcgtgacgggcaccgtgtgccatgtggggaaggcggaggaccgggagcggctggtggccacgctctggatggacaaggaaaaagaggaaagcatgaaagaaaccctgcggataagaaggttaggcgagccagaggattgtgctggcatcgtgtctttcctgtgctctgaagatgccagctacatcactggggaaacagtggtggtgggtggaggaaccccgtcccgcctctgaggaccgggagacagcccacaggccagagttgggctctagctcctggtgctgttcccgcattcacccactggcctttcccacctctgctcaccttactgttcacctcatcaaatcagttctgccctgtgaaaagatccagccttccctgccgtcaaggtggcgtcttactcgggatttctgctgttgttgtggccttgggtaaaggcctcccctgagaacacaggacaggcctgctgacaaggctgagtctaccttggcaaagaccaagatattttttcccgggccactggggaatctgaggggtg

SEQ ID NO: 126007 - DNA, 727 bp, Homo sapiens
  Payload ID: 4713
  Gene Symbol: DHRS4
  Gene Name: dehydrogenase/reductase (SDR family) member 4
  Uniprot ID: Q9BTZ2
  ENST ID: ENST00000397075
  CDS Start-End: 11-589
ggtctgatccatgcacaaggcggggctgctaggcctctgtgcccgggcttggaattcggtgcggatggccagctccgggatgacccgccgggacccgctcgcaaataaggtggccctggtaacggcctccaccgacgggatcggcttcgccatcgcccggcgtttggcccaggacggggcccatgtggtcgtcagcagccggaagcagcagaatgtggaccaggcggtggccacgctgcagggggaggggctgagcgtgacgggcaccgtgtgccatgtggggaaggcggaggaccgggagcggctggtggccacggctgtgaagcttcatggaggtatcgatatcctagtctccaatgctgctgtcaaccctttctttggaagcataatggatgtcactgaggaggtgtgggacaagctctggatggacaaggaaaaagaggaaagcatgaaagaaaccctgcggataagaaggttaggcgagccagaggattgtgctggcatcgtgtctttcctgtgctctgaagatgccagctacatcactggggaaacagtggtggtgggtggaggaaccccgtcccgcctctgaggaccgggagacagcccacaggccagagttgggctctagctcctggtgctgttcccgcattcacccactggcctttcccacctctgctcaccttactgttcacctcatcaaatcagttctgccctgtgaaaagatcca

SEQ ID NO: 126008 - DNA, 1340 bp, Homo sapiens
  Payload ID: 4713
  Gene Symbol: DHRS4
  Gene Name: dehydrogenase/reductase (SDR family) member 4
  ENST ID: ENST00000543741
  CDS Start-End: 20-487
atacttgctggtctgatccatgcacaaggcggggctgctaggcctctgtgcccgggcttggaattcggtgcggatggccagctccgggatgacccgccgggacccgctcgcaaataaggtggccctggtaacggcctccaccgacgggatcggcttcgccatcgcccggcgtttggcccaggacggggcccatgtggtcgtcagcagccggaagcagcagaatgtggaccaggcggtggccacgctgcagggggaggggctgagcgtgacgggcaccgtgtgccatgtggggaaggcggaggaccgggagcggctggtggccacggctgtgaagcttcatggaggtatcgatatcctagtctccaatgctgctgtcaaccctttctttggaagcataatggatgtcactgaggaggtgtgggacaagctctggatggacaaggaaaaagaggaaagcatgaaagaaaccctgcggataagaaggtaaactgtcatgagggcaagggcactaagagacatgaagatgggaaggtctggtccctagcagcccacagcccgctgtctcagtcccacagataacacaggcaggctctcttctgcctcacagaccacgaattcataaacactatcactacagtgacctgagcaagaagtcagcttccctttcaaaaggtaaacacagagacatcggggtttcagcagtgcagagctctgggagaagccctgagtcctctctccacctgggggattgcctccacctctgagcatccatggagaccagggaccataaccaaaaccatgctttgttagtccccttgaataatgacacatgtttacaaaactcaggttgatgatctacaatccaaatgaaaagaatgaagagttttactaagccccaaactccccttgcctaaggagttactttcttccccagtgagctgggtgaactgttcaagcacctttgtcgggctccctttcctctaagttccctgcctctctctaccttctggcttcaaggacaaatgccagtaatgcctaactctgtactcgtccagacatcccaaatcttcccaaagccattctgatgtgagacatgagctgcaggcctggttcataactcattaataagtgaggggattgtcaacctagagcaccaatgaatgatctagcccatgtagctcaatactggattcacattagaatcacctggggagctttttaaactgcaggtgctcaggccccacccactcccagagattctttttaattggtccaaggtaggacttgaccatctgggcttttgtttttctttgtcttttcttttcttttcttttttggtt

SEQ ID NO: 126009 - DNA, 1143 bp, Homo sapiens
  Payload ID: 4713
  Gene Symbol: DHRS4
  Gene Name: dehydrogenase/reductase (SDR family) member 4
  Uniprot ID: Q9BTZ2
  ENST ID: ENST00000558581
  CDS Start-End: 1-735
atgcacaaggcggggctgctaggcctctgtgcccgggcttggaattcggtgcggatggccagctccgggatgacccgccgggacccgctcgcaaataaggtggccctggtaacggcctccaccgacgggatcggcttcgccatcgcccggcgtttggcccaggacggggcccatgtggtcgtcagcagccggaagcagcagaatgtggaccaggcggtggccacgctgcagggggaggggctgagcgtgacgggcaccgtgtgccatgtggggaaggcggaggaccgggagcggctggtggccacgactctggacattaatgtgaaggccccagccctgatgacaaaggcagtggtgccagaaatggagaaacgaggaggcggctcagtggtgatcgtgtcttccatagcagccttcagtccatctcctggcttcagtccttacaatgtcagtaaaacagccttgctgggcctgaccaagaccctggccatagagctggccccaaggaacattagggtgaactgcctagcacctggacttatcaagactagcttcagcaggatgctctggatggacaaggaaaaagaggaaagcatgaaagaaaccctgcggataagaaggttaggcgagccagaggattgtgctggcatcgtgtctttcctgtgctctgaagatgccagctacatcactggggaaacagtggtggtgggtggaggaaccccgtcccgcctctgaggaccgggagacagcccacaggccagagttgggctctagctcctggtgctgttcccgcattcacccactggcctttcccacctctgctcaccttactgttcacctcatcaaatcagttctgccctgtgaaaagatccagccttccctgccgtcaaggtggcgtcttactcgggatttctgctgttgttgtggccttgggtaaaggcctcccctgagaacacaggacaggcctgctgacaaggctgagtctaccttggcaaagaccaagatattttttcccgggccactggggaatctgaggggtgatgggagagaaggaacctggagtggaaggagcagagttgcaaattaacaacttgcaaatgaggtgcaaataaaatgcagatgattgcgcggctttgaatccaa

SEQ ID NO: 126010 - DNA, 1089 bp, Homo sapiens
  Payload ID: 4713
  Gene Symbol: DHRS4
  Gene Name: dehydrogenase/reductase (SDR family) member 4
  Uniprot ID: Q9BTZ2
  ENST ID: ENST00000558263
  CDS Start-End: 56-622
cctactctgtcaccgcccctgggaagagtggaacccatacttgctggtctgatccatgcacaaggcggggctgctaggcctctgtgcccgggcttggaattcggtgcggatggccagctccgggatgacccgccgggacccgctcgcaaataaggtggccctggtaacggcctccaccgacgggatcggcttcgccatcgcccggcgtttggcccaggacggggcccatgtggtcgtcagcagccggaagcagcagaatgtggaccaggcggtggccacgctgcagggggaggggctgagcgtgacgggcaccgtgtgccatgtggggaaggcggaggaccgggagcggctggtggccacggctgtgaagcttcatggaggtatcgatatcctagtctccaatgctgctgtcaaccctttctttggaagcataatggatgtcactgaggaggtgtgggacaagaggcggctcagtggtgatcgtgtcttccatagcagccttcagtccatctcctctctggatggacaaggaaaaagaggaaagcatgaaagaaaccctgcggataagaaggttaggcgagccagaggattgtgctggcatcgtgtctttcctgtgctctgaagatgccagctacatcactggggaaacagtggtggtgggtggaggaaccccgtcccgcctctgaggaccgggagacagcccacaggccagagttgggctctagctcctggtgctgttcccgcattcacccactggcctttcccacctctgctcaccttactgttcacctcatcaaatcagttctgccctgtgaaaagatccagccttccctgccgtcaaggtggcgtcttactcgggatttctgctgttgttgtggccttgggtaaaggcctcccctgagaacacaggacaggcctgctgacaaggctgagtctaccttggcaaagaccaagatattttttcccgggccactggggaatctgaggggtgatgggagagaaggaacctggagtggaaggagcagagttgcaaattaacaacttgcaaatgaggtgcaaataaaatgcagatgattgcgcggctttgaa

SEQ ID NO: 126011 - DNA, 1003 bp, Homo sapiens
  Payload ID: 4713
  Gene Symbol: DHRS4
  Gene Name: dehydrogenase/reductase (SDR family) member 4
  Uniprot ID: Q9BTZ2
  ENST ID: ENST00000559632
  CDS Start-End: 1-600
atgcacaaggcggggctgctaggcctctgtgcccgggcttggaattcggtgcggatggccagctccgggatgacccgccgggacccgctcgcaaataaggtggccctggtaacggcctccaccgacgggatcggcttcgccatcgcccggcgtttggcccaggacggggcccatgtggtcgtcagcagccggaagcagcagaatgtggaccaggcggtggccacgctgcagggggaggggctgagcgtgacgggcaccgtgtgccatgtggggaaggcggaggaccgggagcggctggtggccacgactctggacattaatgtgaaggccccagccctgatgacaaaggcagtggtgccagaaatggagaaacgaggaggcggctcagtggtgatcgtgtcttccatagcagccttcagtccatctcctctctggatggacaaggaaaaagaggaaagcatgaaagaaaccctgcggataagaaggttaggcgagccagaggattgtgctggcatcgtgtctttcctgtgctctgaagatgccagctacatcactggggaaacagtggtggtgggtggaggaaccccgtcccgcctctgaggaccgggagacagcccacaggccagagttgggctctagctcctggtgctgttcccgcattcacccactggcctttcccacctctgctcaccttactgttcacctcatcaaatcagttctgccctgtgaaaagatccagccttccctgccgtcaaggtggcgtcttactcgggatttctgctgttgttgtggccttgggtaaaggcctcccctgagaacacaggacaggcctgctgacaaggctgagtctaccttggcaaagaccaagatattttttcccgggccactggggaatctgaggggtgatgggagagaaggaacctggagtggaaggagcagagttgcaaattaacaacttgcaaatgaggtgcaaataaaatgcagatgattgcgcggctttgaa

SEQ ID NO: 126012 - DNA, 699 bp, Homo sapiens
  Payload ID: 4713
  Gene Symbol: DHRS4
  Gene Name: dehydrogenase/reductase (SDR family) member 4
  ENST ID: ENST00000559975
  CDS Start-End: 1-186
aggaacattagggtgaactgcctagcacctggacttatcaagactagcttcagcaggatgctctggatggacaaggaaaaagaggaaagcatgaaagaaaccctgcggataagaagaccacgaattcataaacactatcactacagtgacctgagcaagaagtcagcttccctttcaaaaggttaggcgagccagaggattgtgctggcatcgtgtctttcctgtgctctgaagatgccagctacatcactggggaaacagtggtggtgggtggaggaaccccgtcccgcctctgaggaccgggagacagcccacaggccagagttgggctctagctcctggtgctgttcccgcattcacccactggcctttcccacctctgctcaccttactgttcacctcatcaaatcagttctgccctgtgaaaagatccagccttccctgccgtcaaggtggcgtcttactcgggatttctgctgttgttgtggccttgggtaaaggcctcccctgagaacacaggacaggcctgctgacaaggctgagtctaccttggcaaagaccaagatattttttcccgggccactggggaatctgaggggtgatgggagagaaggaacctggagtggaaggagcagagttgcaaattaacaacttgcaaatgaggtgcaaataaaatgcagatgattgcgcggctttgaa

SEQ ID NO: 126013 - DNA, 1370 bp, Homo sapiens
  Payload ID: 4714
  Gene Symbol: DHRS4L2
  Gene Name: dehydrogenase/reductase (SDR family) member 4 like 2
  Uniprot ID: Q6PKH6
  ENST ID: ENST00000335125
  CDS Start-End: 127-825
gactcccagctggccgagggcgggaagggggcaggcagggaagcggcccgcccttcgtcctgccccttcgccctactctgtcacctccgctggaaggagtggaacccagacttgctggtctgatccatgcagatggccaggctgctaggcctctgtgcctgggcacggaagtcggtgcggatggccagctccaggatgacccgccgggacccgctcacaaataaggtggccctggtaacggcctccaccgacgggatcggcttcgccatcgcccggcgtttggcccaggacagggcccacgtggtcgtcagcagccggaagcagcagaatgtggaccaggcggtggccacgctgcagggggaggggctgagcgtgacgggcactgtgtgccatgtggggaaggcggaggaccgggagcggctggtggccatggctgtgaagcttcatggaggtatcgatatcctagtctccaatgctgctgtcaaccctttctttggaagcctaatggatgtcaccgaggaggtgtgggacaagactctggacattaatgtgaaggccccagccctgatgacaaaggcagtggtgccagaaatggagaaacgaggaggcggctcagtggtgatcgtgtcttccatagcagccttcagtccatctcctggcttcagtccttacaatgtcagtaaaacagccttgctgggcctcaacaataccctggccatagagctggccccaaggaacattagggtgaactgcctgcacctggacttatcaagactagcttcagcaggatgctctggatggacaaggaaaaagaggaaagcatgaaagaaaccctgcggataagaaggttaggcgagccagaggattgtgctggcatcgtgtctttcctgtgctctgaagatgccagctacatcactggggaaacagtggtggtgggtggaggaaccccgtcccgcctctgaggaccgggagacagcccacaggccagagttgggctctagctcctggtgctgttcctgcattcacccactggcctttcccacctctgctcaccttactgttcacctcatcaaatcagttctgccctgtgaaaagatccagccttccctgccgtcaaggtggcgtcttactcgggattcctgctgttgttgtggccttgggtaaaggcctcccctgagaacacaggacaggcctgctgacaaggctgagtctaccttggcaaagaccaagatattttttcctgggccactggggaatctgaggggtgatgggagagaaggaacctggagtggaaggagcagagttgcaaattaacaacttgcaaatgaggtgcaaataaaatgcagatgattgcgcggctttgaatccaa

SEQ ID NO: 126014 - DNA, 1234 bp, Homo sapiens
  Payload ID: 4714
  Gene Symbol: DHRS4L2
  Gene Name: dehydrogenase/reductase (SDR family) member 4 like 2
  ENST ID: ENST00000382755
  CDS Start-End: 3-833
ccatgcagatggccaggctgctaggcctctgtgcctgggcacggaagtcggtgcggatggccagctccaggatgacccgccgggacccgctcacaaataaggtggccctggtaacggcctccaccgacgggatcggcttcgccatcgcccggcgtttggcccaggacagggcccacgtggtcgtcagcagccggaagcagcagaatgtggaccaggcggtggccacgctgcagggggaggggctgagcgtgacgggcactgtgtgccatgtggggaaggcggaggaccgggagcggctggtggccatggctgtgaagcttcatggaggtatcgatatcctagtctccaatgctgctgtcaaccctttctttggaagcctaatggatgtcaccgaggaggtgtgggacaagactctggacattaatgtgaaggccccagccctgatgacaaaggcagtggtgccagaaatggagaaacgaggaggcggctcagtggtgatcgtgtcttccatagcagccttcagtccatctcctggcttcagtccttacaatgtcagtaaaacagccttgctgggcctcaacaataccctggccatagagctggccccaaggaacattagggtgaactgcctgggacttatcaagactagcttcagcaggatgctctggatggacaaggaaaaagaggaaagcatgaaagaaaccctgcggataagaaggttaggcgagccagaggattgtgctggcatcgtgtctttcctgtgctctgaagatgccagctacatcactggggaaacagtggtggtgggtggaggaaccccgtcccgcctctgaggaccgggagacagcccacaggccagagttgggctctagctcctggtgctgttcctgcattcacccactggcctttcccacctctgctcaccttactgttcacctcatcaaatcagttctgccctgtgaaaagatccagccttccctgccgtcaaggtggcgtcttactcgggattcctgctgttgttgtggccttgggtaaaggcctcccctgagaacacaggacaggcctgctgacaaggctgagtctaccttggcaaagaccaagatattttttcctgggccactggggaatctgaggggtgatgggagagaaggaacctggagtggaaggagcagagttgcaaattaacaacttgcaaatgaggtgcaaataaaatgcagatgattgcgcggctttg

SEQ ID NO: 126015 - DNA, 1117 bp, Homo sapiens
  Payload ID: 4714
  Gene Symbol: DHRS4L2
  Gene Name: dehydrogenase/reductase (SDR family) member 4 like 2
  ENST ID: ENST00000397071
  CDS Start-End: 131-709
agacgactcccagctggccgagggcgggaagggggcaggcagggaagcggcccgcccttcgtcctgccccttcgccctactctgtcacctccgctggaaggagtggaacccagacttgctggtctgatccatgcagatggccaggctgctaggcctctgtgcctgggcacggaagtcggtgcggatggccagctccaggatgacccgccgggacccgctcacaaataaggtggccctggtaacggcctccaccgacgggatcggcttcgccatcgcccggcgtttggcccaggacagggcccacgtggtcgtcagcagccggaagcagcagaatgtggaccaggcggtggccacgctgcagggggaggggctgagcgtgacgggcactgtgtgccatgtggggaaggcggaggaccgggagcggctggtggccatggctgtgaagcttcatggaggtatcgatatcctagtctccaatgctgctgtcaaccctttctttggaagcctaatggatgtcaccgaggaggtgtgggacaagctctggatggacaaggaaaaagaggaaagcatgaaagaaaccctgcggataagaaggttaggcgagccagaggattgtgctggcatcgtgtctttcctgtgctctgaagatgccagctacatcactggggaaacagtggtggtgggtggaggaaccccgtcccgcctctgaggaccgggagacagcccacaggccagagttgggctctagctcctggtgctgttcctgcattcacccactggcctttcccacctctgctcaccttactgttcacctcatcaaatcagttctgccctgtgaaaagatccagccttccctgccgtcaaggtggcgtcttactcgggattcctgctgttgttgtggccttgggtaaaggcctcccctgagaacacaggacaggcctgctgacaaggctgagtctaccttggcaaagaccaagatattttttcctgggccactggggaatctgaggggtgatgggagagaaggaacctggagtggaaggagcagagttgcaaattaacaacttgcaaatgaggtgcaaataaaatgcagatgattgcgcggctttgaatccaa

SEQ ID NO: 126016 - DNA, 918 bp, Homo sapiens
  Payload ID: 4714
  Gene Symbol: DHRS4L2
  Gene Name: dehydrogenase/reductase (SDR family) member 4 like 2
  ENST ID: ENST00000537912
  CDS Start-End: 61-534
ttcgccctactctgtcacctccgctggaaggagtggaacccagacttgctggtctgatccatgcagatggccaggctgctaggcctctgtgcctgggcacggaagtcggtgcggatggccagctccaggatgacccgccgggacccgctcacaaataaggtggccctggtaacggcctccaccgacgggatcggcttcgccatcgcccggcgtttggcccaggacagggcccacgtggtcgtcagcagccggaagcagcagaatgtggaccaggcggtggccacgctgcagggggaggggctgagcgtgacgggcactgtgtgccatgtggggaaggcggaggaccgggagcggctggtggccatgggcttcagtccttacaatgtcagtaaaacagccttgctgggcctcaacaataccctggccatagagctggccccaaggaacattagggtgaactgcctgcacctggacttatcaagactagcttcagcaggatgctctggatggacaaggaaaaagaggaaagcatgaaagaaaccctgcggataagaaggtaaactgtcatgagggcaagggcactaagagacatgaagatgggaaggtctggtccctagcagcccacagcccgctgtctcagtcccacagataacacaggcaggctctcttctgcctcacagaccacgaattcataaacactatcactacagtgacctgagcaagaagtcagcttccctttccaaaggtaaacacagagacatcggggtttcagcagtgcagaggtctcggagaagccctgagtcctctctccacctgggggattgcctccacctctgagcatccatggagaccagggaccataaccaaaaccatgctttgttagtccccttgaataatgacacatgtttacaaaactca

SEQ ID NO: 126017 - DNA, 1450 bp, Homo sapiens
  Payload ID: 4714
  Gene Symbol: DHRS4L2
  Gene Name: dehydrogenase/reductase (SDR family) member 4 like 2
  ENST ID: ENST00000534993
  CDS Start-End: 635-907
atgctcagtcgggcagctctccgggccggcgtgggagcccgcgctccaaggcccggtggggggaggggcgctcacgcaaccgccactgtctggagcgggctcgcctctgcggcagccctcaccgcccgggctttactgaagcggagtctagcatgtgcggctgctccacagcggtgtgggtggcggcggctcctctgcagcagcctcggcagtaggggtcagggtggccaagcccaccgtggagctcatctgagagttgtaaggtacgggactgcctcggtctttgggacgccccgtctggtagcatcccagatccagcacgttccttccggccctgcaccccggcccggtgcctcacaccccgctaccccaagcatccagactctaaggcagcccctgcatctcagtcctgacatcgctgtccctggagcatcctccgctggagctggagcttgacaggatcggcttcgccatcgcccggcgtttggcccaggacagggcccacgtggtcgtcagcagccggaagcagcagaatgtggaccaggcggtggccacgctgcagggggaggggctgagcgtgacgggcactgtgtgccatgtggggaaggcggaggaccgggagcggctggtggccatggctgtgaagcttcatggaggtatcgatatcctagtctccaatgctgctgtcaaccctttctttggaagcctaatggatgtcaccgaggaggtgtgggacaagggcttcagtccttacaatgtcagtaaaacagccttgctgggcctcaacaataccctggccatagagctggccccaaggaacattagggtgaactgcctgcacctggacttatcaagactagcttcagcaggatgctctggatggacaaggaaaaagaggaaagcatgaaagaaaccctgcggataagaaggttaggcgagccagaggattgtgctggcatcgtgtctttcctgtgctctgaagatgccagctacatcactggggaaacagtggtggtgggtggaggaaccccgtcccgcctctgaggaccgggagacagcccacaggccagagttgggctctagctcctggtgctgttcctgcattcacccactggcctttcccacctctgctcaccttactgttcacctcatcaaatcagttctgccctgtgaaaagatccagccttccctgccgtcaaggtggcgtcttactcgggattcctgctgttgttgtggccttgggtaaaggcctcccctgagaacacaggacaggcctgctgacaaggctgagtctaccttggcaaagaccaagatattttttcctgggccactggggaatctgaggggtgatgggagagaaggaacctggagtggaaggagcagagttgcaaattaacaacttgcaaatgaggtgcaaataaaatgcagatgattgcgcggctttgaatcc

SEQ ID NO: 126018 - DNA, 1334 bp, Homo sapiens
  Payload ID: 4714
  Gene Symbol: DHRS4L2
  Gene Name: dehydrogenase/reductase (SDR family) member 4 like 2
  ENST ID: ENST00000543805
  CDS Start-End: 402-818
ccaccgtggagctcatctgagagttgtaaggtacgggactgcctcggtctttgggacgccccgtctggtagcatcccagatccagcacgttccttccggccctgcaccccggcccggtgcctcacaccccgctaccccaagcatccagactctaaggcagcccctgcatctcagtcctgacatcgctgtccctggagcatcctccgctggagctggagcttgacaggatcggcttcgccatcgcccggcgtttggcccaggacagggcccacgtggtcgtcagcagccggaagcagcagaatgtggaccaggcggtggccacgctgcagggggaggggctgagcgtgacgggcactgtgtgccatgtggggaaggcggaggaccgggagcggctggtggccatggctgtgaagcttcatggaggtatcgatatcctagtctccaatgctgctgtcaaccctttctttggaagcctaatggatgtcaccgaggaggtgtgggacaagactctggacattaatgtgaaggccccagccctgatgacaaaggcagtggtgccagaaatggagaaacgaggaggcggctcagtggtgatcgtgtcttccatagcagccttcagtccatctcctggcttcagtccttacaatgtcagtaaaacagccttgctgggcctcaacaataccctggccatagagctggccccaaggaacattagggtgaactgcctgggacttatcaagactagcttcagcaggatgctctggatggacaaggaaaaagaggaaagcatgaaagaaaccctgcggatagaaggttaggcgagccagaggattgtgctggcatcgtgtctttcctgtgctctgaagatgccagctacatcactggggaaacagtggtggtgggtggaggaaccccgtcccgcctctgaggaccgggagacagcccacaggccagagttgggctctagctcctggtgctgttcctgcattcacccactggcctttcccacctctgctcaccttactgttcacctcatcaaatcagttctgccctgtgaaaagatccagccttccctgccgtcaaggtggcgtcttactcgggattcctgctgttgttgtggccttgggtaaaggcctcccctgagaacacaggacaggcctgctgacaaggctgagtctaccttggcaaagaccaagatattttttcctgggccactggggaatctgaggggtgatgggagagaaggaacctggagtggaaggagcagagttgcaaattaacaacttgcaaatgaggtgcaaataaaatgcagatgattgcgcggctttgaatcc

SEQ ID NO: 126019 - DNA, 413 bp, Homo sapiens
  Payload ID: 4714
  Gene Symbol: DHRS4L2
  Gene Name: dehydrogenase/reductase (SDR family) member 4 like 2
  ENST ID: ENST00000560276
  CDS Start-End: 1-328
aagcctaatggatgtcaccgaggaggtgtgggacaagactctggacattaatgtgaaggccccagccctgatgacaaaggcagtggtgccagaaatggagaaacgaggaggcggctcagtggtgatcgtgtcttccatagcagccttcagtccatctcctggcttcagtccttacaatgtcagtaaaacagccttgctgggcctcaacaataccctggccatagagctggccccaaggaacattagggtgaactgcctgcacctggacttatcaagactagcttcagcaggatgctctggatggacaaggaaaaagaggaaagcatgaaagaaaccctgcggataagaaggttaggcgagccagaggattgtgctggcatcgtgtctttcctgtgctctgaagatgccagcta

SEQ ID NO: 126020 - DNA, 574 bp, Homo sapiens
  Payload ID: 4714
  Gene Symbol: DHRS4L2
  Gene Name: dehydrogenase/reductase (SDR family) member 4 like 2
  ENST ID: ENST00000559387
  CDS Start-End: 429-574
gatcggcttcgccatcgcccggcgtttggcccaggacagggcccacgtggtcgtcagcagccggaagcagcagaatgtggaccaggcggtggccacgctgcagggggaggggctgagcgtgacgggcactgtgtgccatgtggggaaggcggaggaccgggagcggctggtggccatgagccttacacaggttatctctagacctgacaacaacccaagcaaggcaaggactattctctcagtctgcagaccctggctcagatagctggagcaacttcccaaggtcccacagccagtaaggaaagacccagacctcccaagctcccttcctttattggctgcctgtggactaccaggctgtgaagcttcatggaggtatcgatatcctagtctccaatgctgctgtcaaccctttctttggaagcctaatggatgtcaccgaggaggtgtgggacaagactctggacattaatgtgaaggccccagccctgatgacaaaggcagtggtgccagaaatggagaaacgaggaggcggctcagtggtgatcgtgtcttccatagcagccttcagtcc

SEQ ID NO: 126021 - DNA, 556 bp, Homo sapiens
  Payload ID: 4714
  Gene Symbol: DHRS4L2
  Gene Name: dehydrogenase/reductase (SDR family) member 4 like 2
  ENST ID: ENST00000558753
  CDS Start-End: 61-534
ttcgccctactctgtcacctccgctggaaggagtggaacccagacttgctggtctgatccatgcagatggccaggctgctaggcctctgtgcctgggcacggaagtcggtgcggatggccagctccaggatgacccgccgggacccgctcacaaataaggtggccctggtaacggcctccaccgacgggatcggcttcgccatcgcccggcgtttggcccaggacagggcccacgtggtcgtcagcagccggaagcagcagaatgtggaccaggcggtggccacgctgcagggggaggggctgagcgtgacgggcactgtgtgccatgtggggaaggcggaggaccgggagcggctggtggccatgggcttcagtccttacaatgtcagtaaaacagccttgctgggcctcaacaataccctggccatagagctggccccaaggaacattagggtgaactgcctgcacctggacttatcaagactagcttcagcaggatgctctggatggacaaggaaaaagaggaaagcatgaaagaaaccctgcggataagaag

SEQ ID NO: 126022 - DNA, 854 bp, Homo sapiens
  Payload ID: 4714
  Gene Symbol: DHRS4L2
  Gene Name: dehydrogenase/reductase (SDR family) member 4 like 2
  ENST ID: ENST00000559411
  CDS Start-End: 127-854
gactcccagctggccgagggcgggaagggggcaggcagggaagcggcccgcccttcgtcctgccccttcgccctactctgtcacctccgctggaaggagtggaacccagacttgctggtctgatccatgcagatggccaggctgctaggcctctgtgcctgggcacggaagtcggtgcggatggccagctccaggatgacccgccgggacccgctcacaaataaggtggccctggtaacggcctccaccgacgggatcggcttcgccatcgcccggcgtttggcccaggacagggcccacgtggtcgtcagcagccggaagcagcagaatgtggaccaggcggtggccacgctgcagggggaggggctgagcgtgacgggcactgtgtgccatgtggggaaggcggaggaccgggagcggctggtggccatggctgtgaagcttcatggaggtatcgatatcctagtctccaatgctgctgtcaaccctttctttggaagcctaatggatgtcaccgaggaggtgtgggacaagactctggacattaatgtgaaggccccagccctgatgacaaaggcagtggtgccagaaatggagaaacgaggaggcggctcagtggtgatcgtgtcttccatagcagccttcagtccatctcctggcttcagtccttacaatgtcagtaaaacagccttgctgggcctcaacaataccctggccatagagctggccccaaggaacattagggtgaactgcctgcacctggacttatcaagactagcttcagcaggatggttaggcgagccagaggattgtgctggcatcgtgtctttcctgtgctctgaagatgccagcta

SEQ ID NO: 126023 - DNA, 1049 bp, Homo sapiens
  Payload ID: 4714
  Gene Symbol: DHRS4L2
  Gene Name: dehydrogenase/reductase (SDR family) member 4 like 2
  ENST ID: ENST00000621761
  CDS Start-End: 1-648
atgccattcccctgcctcagcctcccgagtagctgggactacaggatcggcttcgccatcgcccggcgtttggcccaggacagggcccacgtggtcgtcagcagccggaagcagcagaatgtggaccaggcggtggccacgctgcagggggaggggctgagcgtgacgggcactgtgtgccatgtggggaaggcggaggaccgggagcggctggtggccatgactctggacattaatgtgaaggccccagccctgatgacaaaggcagtggtgccagaaatggagaaacgaggaggcggctcagtggtgatcgtgtcttccatagcagccttcagtccatctcctggcttcagtccttacaatgtcagtaaaacagccttgctgggcctcaacaataccctggccatagagctggccccaaggaacattagggtgaactgcctgcctggacttatcaagactagcttcagcaggatgctctggatggacaaggaaaaagaggaaagcatgaaagaaaccctgcggataagaaggttaggcgagccagaggattgtgctggcatcgtgtctttcctgtgctctgaagatgccagctacatcactggggaaacagtggtggtgggtggaggaaccccgtcccgcctctgaggaccgggagacagcccacaggccagagttgggctctagctcctggtgctgttcctgcattcacccactggcctttcccacctctgctcaccttactgttcacctcatcaaatcagttctgccctgtgaaaagatccagccttccctgccgtcaaggtggcgtcttactcgggattcctgctgttgttgtggccttgggtaaaggcctcccctgagaacacaggacaggcctgctgacaaggctgagtctaccttggcaaagaccaagatattttttcctgggccactggggaatctgaggggtgatgggagagaaggaacctggagtggaaggagcagagttgcaaattaacaacttgcaaatgaggtgcaaataaaatgcagatgattgcgcggctttg

SEQ ID NO: 126024 - DNA, 2322 bp, Homo sapiens
  Payload ID: 4715
  Gene Symbol: DHRS7
  Gene Name: dehydrogenase/reductase (SDR family) member 7
  Uniprot ID: Q9Y394
  ENST ID: ENST00000216500
  CDS Start-End: 457-1476
gcaatccaagactgcttagggttcggaattacaaaaccaaattccctgctaaggctaaagttgatctgaacaaaagtaagggcaaggcaaagagaatagacattagacagggacctgaaaggatccagaaatgggactttacatcccacagaggaaacagacacagggtttcctcatgttgcccaggctggtctcggacacttgaattcaagcaatctgccggccccgccgggtgtgccgcatgagggcgcgggccgcccaaggaccgcgagtggggccgcgagtgctgagcccggcgcgcccgagccgctcctcctcccggcctgctccctgggcggagccggggcagtgcggctctgggctggccgaaggggtggcgctgcgatcccgcagggcagcgacgcgactctggtgcgggccgtcttcttccccccgagctgggcgtgcgcggccgcaatgaactgggagctgctgctgtggctgctggtgctgtgcgcgctgctcctgctcttggtgcagctgctgcgcttcctgagggctgacggcgacctgacgctactatgggccgagtggcagggacgacgcccagaatgggagctgactgatatggtggtgtgggtgactggagcctcgagtggaattggtgaggagctggcttaccagttgtctaaactaggagtttctcttgtgctgtcagccagaagagtgcatgagctggaaagggtgaaaagaagatgcctagagaatggcaatttaaaagaaaaagatatacttgttttgccccttgacctgaccgacactggttcccatgaagcggctaccaaagctgttctccaggagtttggtagaatcgacattctggtcaacaatggtggaatgtcccagcgttctctgtgcatggataccagcttggatgtctacagaaagctaatagagcttaactacttagggacggtgtccttgacaaaatgtgttctgcctcacatgatcgagaggaagcaaggaaagattgttactgtgaatagcatcctgggtatcatatctgtacctctttccattggatactgtgctagcaagcatgctctccggggtttttttaatggccttcgaacagaacttgccacatacccaggtataatagtttctaacatttgcccaggacctgtgcaatcaaatattgtggagaattccctagctggagaagtcacaaagactataggcaataatggagaccagtcccacaagatgacaaccagtcgttgtgtgcggctgatgttaatcagcatggccaatgatttgaaagaagtttggatctcagaacaacctttcttgttagtaacatatttgtggcaatacatgccaacctgggcctggtggataaccaacaagatggggaagaaaaggattgagaactttaagagtggtgtggatgcagactcttcttattttaaaatctttaagacaaaacatgactgaaaagagcacctgtacttttcaagccactggagggagaaatggaaaacatgaaaacagcaatcttcttatgcttctgaataatcaaagactaatttgtgattttactttttaatagatatgactttgcttccaacatggaatgaaataaaaaataaataataaaagattgccatgaatcttgcaaaaaaggtattaactcatactatattcttggataaaataaccttttaaaatactttagcacatatgcttaaaatctaagttaacagatttgtcttagtccatttgtgctgctataacaaaataccacagatttggtaatttataaacaacagaaatctgtttttcctggctcttgaggctgggaattccaagaccaatgcaccagcagaattagtgtctggtgaaggctgatctctgcttccaagatggcacctcattgctgcatcctccacagtggaggaatgtatgtcctcacatggtggaagggacagaagggaaagaggagcaaaatgctttcaaaagagcatttaatctcattcattactcagtcacctcttaaaggccacatcctttaatactgttgctttggggattaagtttcgacatgaattttggaggggacaaaaacatccaaaccatagcaacataaatgtatagaatatttcacacaaagcagagtgctgggtaatgaccagatataaagaagtatttgaaatgaccttacctccaagatgcttatactcttagaaaagttgacaggtacagatggctgtaatttgaagcagcaggtaggattcattgcacctattattcattaaacacctgttgtatgtcttctactgt

SEQ ID NO: 126025 - DNA, 1194 bp, Homo sapiens
  Payload ID: 4715
  Gene Symbol: DHRS7
  Gene Name: dehydrogenase/reductase (SDR family) member 7
  Uniprot ID: Q9Y394
  ENST ID: ENST00000536410
  CDS Start-End: 165-1034
gcttagggttcggaattacaaaaccaaattccctgctaaggctaaagttgatctgaacaaaagtaagggcaaggcaaagagaatagacattagacagggacctgaaaggatccagaaatgggactttacatcccacagaggaaacagaatgggagctgactgatatggtggtgtgggtgactggagcctcgagtggaattggtgaggagctggcttaccagttgtctaaactaggagtttctcttgtgctgtcagccagaagagtgcatgagctggaaagggtgaaaagaagatgcctagagaatggcaatttaaaagaaaaagatatacttgttttgccccttgacctgaccgacactggttcccatgaagcggctaccaaagctgttctccaggagtttggtagaatcgacattctggtcaacaatggtggaatgtcccagcgttctctgtgcatggataccagcttggatgtctacagaaagctaatagagcttaactacttagggacggtgtccttgacaaaatgtgttctgcctcacatgatcgagaggaagcaaggaaagattgttactgtgaatagcatcctgggtatcatatctgtacctctttccattggatactgtgctagcaagcatgctctccggggtttttttaatggccttcgaacagaacttgccacatacccaggtataatagtttctaacatttgcccaggacctgtgcaatcaaatattgtggagaattccctagctggagaagtcacaaagactataggcaataatggagaccagtcccacaagatgacaaccagtcgttgtgtgcggctgatgttaatcagcatggccaatgatttgaaagaagtttggatctcagaacaacctttcttgttagtaacatatttgtggcaatacatgccaacctgggcctggtggataaccaacaagatggggaagaaaaggattgagaactttaagagtggtgtggatgcagactcttcttattttaaaatctttaagacaaaacatgactgaaaagagcacctgtacttttcaagccactggagggagaaatggaaaacatgaaaacagcaatcttcttatgcttctgaataatcaaagactaatttgtgattttactttttaatagatatgactttgcttccaacatggaatgaaataaaaaataaataat

SEQ ID NO: 126026 - DNA, 1361 bp, Homo sapiens
  Payload ID: 4715
  Gene Symbol: DHRS7
  Gene Name: dehydrogenase/reductase (SDR family) member 7
  ENST ID: ENST00000554101
  CDS Start-End: 1-1199
tgctgtggctgctggtgctgtgcgcgctgctcctgctcttggtgcagctgctgcgcttcctgagggctgacggcgacctgacgctactatgggccgagtggcagggacgacgcccagaatgggagctgactgatatggtggtgtgggtgactggagcctcgagtggaattggtgaggagctggcttaccagttgtctaaactaggagtttctcttgtgctgtcagccagaagagtgcatgagctggaaagggtgaaaagaagatgcctagagaatggcaatttaaaagaaaaagatatacttgttttgccccttgacctgaccgacactggttcccatgaagcggctaccaaagctgttctccaggagtttggtagaatcgacattctggtcaacaatggtggaatgtcccagcgttctctgtgcatggataccagcttggatgtctacagaaagctaatagagcttaactacttagggacggtgtccttgacaaaatgtgttctgcctcacatgatcgagaggaagcaaggaaagattgttactgtgaatagcatcctgggtatcatatctgtacctctttccattggatactgtgctagcaagcatgctctccggggtttttttaatggccttcgaacagaacttgccacatacccaggtataatagtttctaacatttgcccaggacctgtgcaatcaaatattgtggagaattccctagctggagaagtcacaaagactataggcaataatggagaccagtcccacaagatgacaaccagtcgttgtgtgcggctgatgttaatcagcatggccaatgatttgaaagaagtttggatctcagaacaacctttcttgttagtaacatatttgtggcaatacatgccaacctgggcctggtggataaccaacaagatggggaagaaaaggattgagaactttaagagtggtgtggtaagaccaatttctaagtttcttaatagtatgtaccaatcttgcaggaaggtacagaattttccagtgtttaaaaaactttctggctgggtgcagtggctcatgtctgtaatcccagcactttgggaggccaaggcagatcacttgaggccaggagttcaagaccaacctggccaacatagtgaaaccccatctctactaaaaatacaaaaagtagctgggcatggtggtgcatgcctgtaatcccagctactcgggaggctgaggcatgagaattgcttgaaccgaggaggcggaggttgcagtgagccaggatggtgccactgcactccagcccgggtgatagagcgagactctatttcaaaatcaaaaaacctttctaaccctccaccaatctcatgatat

SEQ ID NO: 126027 - DNA, 480 bp, Homo sapiens
  Payload ID: 4715
  Gene Symbol: DHRS7
  Gene Name: dehydrogenase/reductase (SDR family) member 7
  ENST ID: ENST00000557137
  CDS Start-End: 1-480
tgaactgggagctgctgctgtggctgctggtgctgtgcgcgctgctcctgctcttggtgcagctgctgcgcttcctgagggctgacggcgacctgacgctactatgggccgagtggcagggacgacgcccagaatgggagctgactgatatggtggtgtgggtgactggagcctcgagtggaattggtgaggagctggcttaccagttgtctaaactaggagtttctcttgtgctgtcagccagaagagtgcatgagctggaaagggtgaaaagaagatgcctagagaatggcaatttaaaagaaaaagatatacttgttttgccccttgacctgaccgacactggttcccatgaagcggctaccaaagctgttctccaggagtttggtagaggtttttttaatggccttcgaacagaacttgccacatacccaggtataatagtttctaacatttgcccaggacctgtgcaatcaaata

SEQ ID NO: 126028 - DNA, 1322 bp, Homo sapiens
  Payload ID: 4715
  Gene Symbol: DHRS7
  Gene Name: dehydrogenase/reductase (SDR family) member 7
  Uniprot ID: Q9Y394
  ENST ID: ENST00000557185
  CDS Start-End: 121-1140
ggagccggggcagtgcggctctgggctggccgaaggggtggcgctgcgatcccgcagggcagcgacgcgactctggtgcgggccgtcttcttccccccgagctgggcgtgcgcggccgcaatgaactgggagctgctgctgtggctgctggtgctgtgcgcgctgctcctgctcttggtgcagctgctgcgcttcctgagggctgacggcgacctgacgctactatgggccgagtggcagggacgacgcccagaatgggagctgactgatatggtggtgtgggtgactggagcctcgagtggaattggtgaggagctggcttaccagttgtctaaactaggagtttctcttgtgctgtcagccagaagagtgcatgagctggaaagggtgaaaagaagatgcctagagaatggcaatttaaaagaaaaagatatacttgttttgccccttgacctgaccgacactggttcccatgaagcggctaccaaagctgttctccaggagtttggtagaatcgacattctggtcaacaatggtggaatgtcccagcgttctctgtgcatggataccagcttggatgtctacagaaagctaatagagcttaactacttagggacggtgtccttgacaaaatgtgttctgcctcacatgatcgagaggaagcaaggaaagattgttactgtgaatagcatcctgggtatcatatctgtacctctttccattggatactgtgctagcaagcatgctctccggggtttttttaatggccttcgaacagaacttgccacatacccaggtataatagtttctaacatttgcccaggacctgtgcaatcaaatattgtggagaattccctagctggagaagtcacaaagactataggcaataatggagaccagtcccacaagatgacaaccagtcgttgtgtgcggctgatgttaatcagcatggccaatgatttgaaagaagtttggatctcagaacaacctttcttgttagtaacatatttgtggcaatacatgccaacctgggcctggtggataaccaacaagatggggaagaaaaggattgagaactttaagagtggtgtggatgcagactcttcttattttaaaatctttaagacaaaacatgactgaaaagagcacctgtacttttcaagccactggagggagaaatggaaaacatgaaaacagcaatcttcttatgcttctgaataatcaaagactaatttgtgattttactttttaatagatatgactttgcttccaacatggaatgaaataaaaaataaataataaaagattgccatgaatcttgc

SEQ ID NO: 126029 - DNA, 686 bp, Homo sapiens
  Payload ID: 4715
  Gene Symbol: DHRS7
  Gene Name: dehydrogenase/reductase (SDR family) member 7
  ENST ID: ENST00000557751
  CDS Start-End: 1-638
acattctggtcaacaatggtggaatgtcccagcgttctctgtgcatggataccagcttggatgtctacagaaagctaatagagcttaactacttagggacggtgtccttgacaaaatgtgttctgcctcacatgatcgagaggaagcaaggaaagattgttactgtgaatagcatcctgggtatcatatctgtacctctttccattggatactgtgctagcaagcatgctctccggggtttttttaatggccttcgaacagaacttgccacatacccaggtataatagtttctaacatttgcccaggacctgtgcaatcaaatattgtggagaattccctagctggagaagtcacaaagactataggcaataatggagaccagtcccacaagatgacaaccagtcgttgtgtgcggctgatgttaatcagcatggccaatgatttgaaagaagtttggatctcagaacaacctttcttgatgcagactcttcttattttaaaatctttaagacaaaacatgactgaaaagagcacctgtacttttcaagccactggagggagaaatggaaaacatgaaaacagcaatcttcttatgcttctgaataatcaaagactaatttgtgattttactttttaatagatatgactttgcttccaacatggaatgaaataaaaaataaataat

SEQ ID NO: 126030 - DNA, 582 bp, Homo sapiens
  Payload ID: 4715
  Gene Symbol: DHRS7
  Gene Name: dehydrogenase/reductase (SDR family) member 7
  ENST ID: ENST00000557326
  CDS Start-End: 400-582
atgcactctaactgggtccctctgaggcttgtgaatggaaaaccctcttgctttcaaatgcttgaaaacaagaaagatgctactattgatgcctcaaatacatacacagggtttcctcatgttgcccaggctggtctcggacacttgaattcaagcaatctgccggccccgccgggtgtgccgcatgagggcgcgggccgcccaaggaccgcgagtggggccgcgagtgctgagcccggcgcgcccgagccgctcctcctcccggcctgctccctgggcggagccggggcagtgcggctctgggctggccgaaggggtggcgctgcgatcccgcagggcagcgacgcgactctggtgcgggccgtcttcttccccccgagctgggcgtgcgcggccgcaatgaactgggagctgctgctgtggctgctggtgctgtgcgcgctgctcctgctcttggtgcagctgctgcgcttcctgagggctgacggcgacctgacgctactatgggccgagtggcagggacgacgcccagaatgggagctgactgatatggtggtgtgggtgactggagcctcgagtgga

SEQ ID NO: 126031 - DNA, 1321 bp, Homo sapiens
  Payload ID: 4715
  Gene Symbol: DHRS7
  Gene Name: dehydrogenase/reductase (SDR family) member 7
  ENST ID: ENST00000611054
  CDS Start-End: 121-1251
ggagccggggcagtgcggctctgggctggccgaaggggtggcgctgcgatcccgcagggcagcgacgcgactctggtgcgggccgtcttcttccccccgagctgggcgtgcgcggccgcaatgaactgggagctgctgctgtggctgctggtgctgtgcgcgctgctcctgctcttggtgcagctgctgcgcttcctgagggctgacggcgacctgacgctactatgggccgagtggcagggacgacgcccagaatgggagctgactgatatggtggtgtgggtgactggagcctcgagtggaattggtgaggagctggcttaccagttgtctaaactaggagtttctcttgtgctgtcagccagaagagtgcatgagctggaaagggtgaaaagaagatgcctagagaatggcaatttaaaagaaaaagatatacttgttttgccccttgacctgaccgacactggttcccatgaagcggctaccaaagctgttctccaggagtttggtagaatcgacattctggtcaacaatggtggaatgtcccagcgttctctgtgcatggataccagcttggatgtctacagaaagctaatagagcttaactacttagggacggtgtccttgacaaaatgtgttctgcctcacatgatcgagaggaagcaaggaaagattgttactgtgaatagcatcctgggtatcatatctgtacctctttccattggatactgtgctagcaagcatgctctccggggtttttttaatggccttcgaacagaacttgccacatacccaggtataatagtttctaacatttgcccaggacctgtgcaatcaaatattgtggagaattccctagctggagaagtcacaaagactataggcaataatggagaccagtcccacaagatgacaaccagtcgttgtgtgcggctgatgttaatcagcatggccaatgatttgaaagaagtttggatctcagaacaacctttcttgttagtaacatatttgtggcaatacatgccaacctgggcctggtggataaccacaagatggggaagaaaaggattgagaactttaagagtggtgtggatgcagactcttcttattttaaaatctttaagacaaaacatgactgaaaagagcacctgtacttttcaagccactggagggagaaatggaaaacatgaaaacagcaatcttcttatgcttctgaataatcaaagactaatttgtgattttactttttaatagatatgactttgcttccaacatggaatgaaataaaaaataaataataaaagattgccatgaatcttgc

SEQ ID NO: 126032 - DNA, 2175 bp, Homo sapiens
  Payload ID: 4716
  Gene Symbol: DHRS7B
  Gene Name: dehydrogenase/reductase (SDR family) member 7B
  Uniprot ID: Q6IAN0
  ENST ID: ENST00000395511
  CDS Start-End: 321-1298
acctttgtgccagttatcacactgttctgattactgtggcattataatcatcttgataactgtatcgtgaattctccaactgtgttcttcgccggaagtccacggaacaccaaccacgaccttcggaatttccctccggaagatgaaggcactgtagttatgcgggtggaccctatcagatctcgggtccatcgggtcctgtgtacaccttgagggacgcccacccaacgcgcatgcgcagcctcaatgctgggattggacggagcctcgccggctgcgtacacgtcacttccgaggcgggaggatgaagttgattgactatggtctctccggctaccaggaagagtctgccgaaggtgaaggccatggacttcatcacctccacagccatcctgcccctgctgttcggctgcctgggcgtcttcggcctcttccggctgctgcagtgggtgcgcgggaaggcctacctgcggaatgctgtggtggtgatcacaggcgccacctcagggctgggcaaagaatgtgcaaaagtcttctatgctgcgggtgctaaactggtgctctgtggccggaatggtggggccctagaagagctcatcagagaactcaccgcttctcatgccaccaaggtgcagacacacaagccttacttggtgaccttcgacctcacagactctggggccatagttgcagcagcagctgagatcctgcagtgctttggctatgtcgacatacttgtcaacaatgctgggatcagctaccgtggtaccatcatggacaccacagtggatgtggacaagagggtcatggagacaaactactttggcccagttgctctaacgaaagcactcctgccctccatgatcaagaggaggcaaggccacattgtcgccatcagcagcatccagggcaagatgagcattccttttcgatcagcatatgcagcctccaagcacgcaacccaggctttctttgactgtctgcgtgccgagatggaacagtatgaaattgaggtgaccgtcatcagccccggctacatccacaccaacctctctgtaaatgccatcaccgcggatggatctaggtatggagttatggacaccaccacagcccagggccgaagccctgtggaggtggcccaggatgttcttgctgctgtggggaagaagaagaaagatgtgatcctggctgacttactgccttccttggctgtttatcttcgaactctggctcctgggctcttcttcagcctcatggcctccagggccagaaaagagcggaaatccaagaactcctagtactctgaccagccagggccagggcagagaagcagcactcttaggcttgcttactctacaagggacagttgcatttgttgagactttaatggagatttgtctcacaagtgggaaagactgaagaaacacatctcgtgcagatctgctggcagaggacaatcaaaaacgacaacaagcttcttcccagggtgaggggaaacacttaaggaataaatatggagctggggtttaacactaaaaactagaaataaacatctcaaacagtaagagttgtagtcttccaggactagaaccttgtgtcctttgaattctcgccctgccagctcctagaaatagtttcaatcttggaatcagatgttatgtcacctgacccagttgtttctgtatttgacttaaacctcattgttgtggcagaaagaccacctccagtactgaggggagaaagttgtagtttcaagaagtcagcagtcacgcccatttccaggtccctatgatatctcatccaacttaaaacgtgggccagtatgtaatggcttatttggtgtatcccaagggatgcctgctttagcacctcataggaattcctgtttctctcttaactctcaccacatccctgtaggatgccaggcaccactccaagcagaaggtgaacttactaaagagagagcagccaaaagggagaggaggaccctgcgtggccccgtgcatcctctagaagtgaaaccattaaattggccagctgggcagactctacagcagcccctggtctggtggaagtgagccatttgttagctctaactagttggatcatagccagaaagaatgcctgtttctgcctttctgatttattaaaaatacattgttgaggctcactgaa

SEQ ID NO: 126033 - DNA, 668 bp, Homo sapiens
  Payload ID: 4716
  Gene Symbol: DHRS7B
  Gene Name: dehydrogenase/reductase (SDR family) member 7B
  ENST ID: ENST00000583388
  CDS Start-End: 1-376
catcatggacaccacagtggatgtggacaagagggtcatggagacaaactactttggcccagttgctctaacgaaagcactcctgccctccatgatcaagaggaggcaaggccacattgtcgccatcagcagcatccagggcaagatgagcattccttttcgatcagcatttatggacaccaccacagcccagggccgaagccctgtggaggtggcccaggatgttcttgctgctgtggggaagaagaagaaagatgtgatcctggctgacttactgccttccttggctgtttatcttcgaactctggctcctgggctcttcttcagcctcatggcctccagggccagaaaagagcggaaatccaagaactcctagtactctgaccagccagggccagggcagagaagcagcactcttaggcttgcttactctacaagggacagttgcatttgttgagactttaatggagatttgtctcacaagtgggaaagactgaagaaacacatctcgtgcagatctgctggcagaggacaatcaaaaacgacaacaagcttcttcccagggtgaggggaaacacttaaggaataaatatggagctggggtttaacactaaaaactagaaataaacatctcaaacagtaagagttgtagtcttccaggactagaa

SEQ ID NO: 126034 - DNA, 767 bp, Homo sapiens
  Payload ID: 4716
  Gene Symbol: DHRS7B
  Gene Name: dehydrogenase/reductase (SDR family) member 7B
  ENST ID: ENST00000582161
  CDS Start-End: 389-767
aacaacccttgatgctgttgcagaaatcataggttgtgacacccacagcattctctcaaccatctacacattcctccaagattatcacactgttctgattactgtggcattataatcatcttgataactgtatcgtgaattctccaactgtgttcttcgccggaagtccacggaacaccaaccacgaccttcggaatttccctccggaagatgaaggcactgtagttatgcgggtggaccctatcagatctcgggtccatcgggtcctgtgtacaccttgagggacgcccacccaacgcgcatgcgcagcctcaatgctgggattggacggagcctcgccggctgcgtacacgtcacttccgaggcgggaggatgaagttgattgactatggtctctccggctaccaggaagagtctgccgaaggtgaaggccatggacttcatcacctccacagccatcctgcccctgctgttcggctgcctgggcgtcttcggcctcttccggctgctgcagtgggtgcgcgggaaggcctacctgcggaatgctgtggtggtgatcacaggcgccacctcagggctgggcaaagaatgtgcaaaagtcttctatgctgcgggtgctaaactggtgctctgtggccggaatggtggggccctagaagagctcatcagagaactcaccgcttctcatgccaccaaggtgcagacacacaagccttacttggtgaccttcgacctcacagactctggggccatagttgcagcagcag

SEQ ID NO: 126035 - DNA, 729 bp, Homo sapiens
  Payload ID: 4716
  Gene Symbol: DHRS7B
  Gene Name: dehydrogenase/reductase (SDR family) member 7B
  ENST ID: ENST00000581463
  CDS Start-End: 1-324
atgatcaagaggaggcaaggccacattgtcgccatcagcagcatccagggcaagatgagcattccttttcgatcagcatatgcagcctccaagcacgcaacccaggctttctttgactgtctgcgtgccgagatggaacagtatgaaattgaggtgaccgtcatcagccccggctacatccacaccaacctctctgtaaatgccatcaccgcggatggatctaggtatggaggtaaattgtcaacctccctcctgacatggaagagaagggtctccttagtgttcacactggagacagtagacccaggcaagagctggaactgagacagcagcagcacctgtctaaagctcagcccgagtctaaggttgaatgaaagtgccgagcacacagcaggtttccaggaaatggcagcaatgaagggcgctctccctttagatggaaatgagaggacatttctccttggatgctgttggctgccacactcagagacacctggtgtccaggtgctgtcctttcctctccattatataacatggttagcaactggaggttgatgtgataggctgccctcaaaggaatgcaggtttaccaactgtgtactccgtcatcagaagatgggaacatcacatatgttgctgaggtttttggttttggggccgttgtgttctgactcacagctggggtgcatggagcttgggctagcattaaagagtgcttaacctacatac

SEQ ID NO: 126036 - DNA, 998 bp, Homo sapiens
  Payload ID: 4716
  Gene Symbol: DHRS7B
  Gene Name: dehydrogenase/reductase (SDR family) member 7B
  ENST ID: ENST00000578426
  CDS Start-End: 18-290
gatgaagttgattgactatggtctctccggctaccaggaagagtctgccgaaggtgaaggccatggacttcatcacctccacagccatcctgcccctgctgttcggctgcctgggcgtcttcggcctcttccggctgctgcagtgggtgcgcgggaaggcctacctgcggaatgctgtggtggtgatcacaggcgccacctcagggctgggcaaaggtgcagacacacaagccttacttggtgaccttcgacctcacagactctggggccatagttgcagcagcagctgagatcctgcagtgctttggctatgtcgacatacttgtcaacaatgctgggatcagctaccgtggtaccatcatggacaccacagtggatgtggacaagagggtcatggagacaaactactttggcccagttgctctaacgaaagcactcctgccctccatgatcaagaggaggcaaggccacattgtcgccatcagcagcatccagggcaagatgagcattccttttcgatcagcatatgcagcctccaagcacgcaacccaggctttctttgactgtctgcgtgccgagatggaacagtatgaaattgaggtgaccgtcatcagccccggctacatccacaccaacctctctgtaaatgccatcaccgcggatggatctaggtatggagttatggacaccaccacagcccagggccgaagccctgtggaggtggcccaggatgttcttgctgctgtggggaagaagaagaaagatgtgatcctggctgacttactgccttccttggctgtttatcttcgaactctggctcctgggctcttcttcagcctcatggcctccagggccagaaaagagcggaaatccaagaactcctagtactctgaccagccagggccagggcagagaagcagcactcttaggcttgcttactctacaagggacagttgcatttgttgagactttaatggagatttgtctcacaagtggga

SEQ ID NO: 126037 - DNA, 1479 bp, Homo sapiens
  Payload ID: 4716
  Gene Symbol: DHRS7B
  Gene Name: dehydrogenase/reductase (SDR family) member 7B
  ENST ID: ENST00000579303
  CDS Start-End: 255-1187
gattgactatggtctctccggctaccaggtaggggctggggaagaaggaacctccgagatgaggcgatagggtctggccttgagctgaggcgacgccccggcttgggtgaggggaagcggtgtagtggtcgagctaaggccgcgggccctgggcggcttccggatccccgcgacgccgaactctgaaggaagactcagcccaggcgctgggaccagagccctggctccggcgaagtctgccgaaggtgaaggccatggacttcatcacctccacagccatcctgcccctgctgttcggctgcctgggcgtcttcggcctcttccggctgctgcagtgggtgcgcgggaaggcctacctgcggaatgctgtggtggtgatcacaggcgccacctcagggctgggcaaagaatgtgcaaaagtcttctatgctgcgggtgctaaactggtgctctgtggccggaatggtggggccctagaagagctcatcagagaactcaccgcttctcatgccaccaaggtgcagacacacaagccttacttggtgaccttcgacctcacagactctggggccatagttgcagcagcagctgagatcctgcagtgctttggctatgtcgacatacttgtcaacaatgctgggatcagctaccgtggtaccatcatggacaccacagtggatgtggacaagagggtcatggagacaaactactttggcccagttgctctaacgaaagcactcctgccctccatgatcaagaggaggcaaggccacattgtcgccatcagcagcatccagggcaagatgagcattccttttcgatcagcatatgcagcctccaagcacgcaacccaggctttctttgactgtctgcgtgccgagatggaacagtatgaaattgaggtgaccgtcatcagccccggctacatccacaccaacctctctgtaaatgccatcaccgcggatggatctaggtatggagttatggacaccaccacagcccagggccgaagccctgtggaggtggcccaggatgttcttgctgctgtggggaagaagaagaaagatgtgatcctggctgacttactgccttccttggctgtttatcttcgaactctggctcctgggctcttcttcagcctcatggcctccagggccagaaaagagcggaaatccaagaactcctagtactctgaccagccagggccagggcagagaagcagcactcttaggcttgcttactctacaagggacagttgcatttgttgagactttaatggagatttgtctcacaagtgggaaagactgaagaaacacatctcgtgcagatctgctggcagaggacaatcaaaaacgacaacaagcttcttcccagggtgaggggaaacacttaaggaataaatatggagctggggtttaacactaaaaactagaaataaacatctcaaacagtaagagttgtagtcttccaggactagaa

SEQ ID NO: 126038 - DNA, 1006 bp, Homo sapiens
  Payload ID: 4717
  Gene Symbol: DHRS7C
  Gene Name: dehydrogenase/reductase (SDR family) member 7C
  Uniprot ID: A6NNS2
  ENST ID: ENST00000330255
  CDS Start-End: 14-952
cccccagaacaagatgggagtcatggccatgctgatgctccccctgctgctgctgggaatcagcggcctcctcttcatttaccaagaggtgtccaggctgtggtcaaagtcagctgtgcagaacaaagtggtggtgatcaccgatgccatctcaggactgggcaaggagtgtgctcgggtgttccacacaggtggggcaaggctggtgctgtgtggaaagaactgggagaggctagagaacctatatgatgccttgatcagcgtggctgaccccagcaagcagacattcaccccaaagctggtcctgttggacctctcagacatcagctgtgtcccagatgtggcaaaagaagtcctggattgctatggctgtgtggacatcctcatcaacaatgccagtgtgaaggtgaaggggcctgcccataagatttctctggagctcgacaaaaagatcatggatgccaattactttggccccatcacattgacgaaagccctgcttcccaacatgatctcccggagaacaggccaaatcgtgttagtgaataatatccaagggaagtttggaatcccgttccgtacgacttacgctgcctccaagcacgcagccctgggcttctttgactgcctccgagccgaagtggaggaatacgatgttgtcatcagcaccgtgagcccgactttcatccggtcgtaccacgtgtatccagagcaaggaaactgggaagcttccatttggaaattctttttcaggaagctgacctacggcgtgcacccagtagaggtggcggaggaggtgatgcgcaccgtgcggaggaagaagcaagaggtgtttatggccaaccccatccccaaggccgccgtgtacgtccgcaccttcttcccggagttctttttcgccgtggtggcctgtggggtgaaggagaagctcaatgtcccggaggaggggtaactgcaggaggccaaatgggccaccccttggaaataaaggtttttctggcaggtg

SEQ ID NO: 126039 - DNA, 984 bp, Homo sapiens
  Payload ID: 4717
  Gene Symbol: DHRS7C
  Gene Name: dehydrogenase/reductase (SDR family) member 7C
  Uniprot ID: A6NNS2
  ENST ID: ENST00000571134
  CDS Start-End: 14-949
cccccagaacaagatgggagtcatggccatgctgatgctccccctgctgctgctgggaatcagcggcctcctcttcatttaccaagaggtgtccaggctgtggtcaaagtcagctgtgcagaacaaagtggtggtgatcaccgatgccatctcaggactgggcaaggagtgtgctcgggtgttccacacaggtggggcaaggctggtgctgtgtggaaagaactgggagaggctagagaacctatatgatgccttgatcagcgtggctgaccccagcaagacattcaccccaaagctggtcctgttggacctctcagacatcagctgtgtcccagatgtggcaaaagaagtcctggattgctatggctgtgtggacatcctcatcaacaatgccagtgtgaaggtgaaggggcctgcccataagatttctctggagctcgacaaaaagatcatggatgccaattactttggccccatcacattgacgaaagccctgcttcccaacatgatctcccggagaacaggccaaatcgtgttagtgaataatatccaagggaagtttggaatcccgttccgtacgacttacgctgcctccaagcacgcagccctgggcttctttgactgcctccgagccgaagtggaggaatacgatgttgtcatcagcaccgtgagcccgactttcatccggtcgtaccacgtgtatccagagcaaggaaactgggaagcttccatttggaaattctttttcaggaagctgacctacggcgtgcacccagtagaggtggcggaggaggtgatgcgcaccgtgcggaggaagaagcaagaggtgtttatggccaaccccatccccaaggccgccgtgtacgtccgcaccttcttcccggagttctttttcgccgtggtggcctgtggggtgaaggagaagctcaatgtcccggaggaggggtaactgcaggaggccaaatgggccaccccttggaaata

SEQ ID NO: 126040 - DNA, 453 bp, Homo sapiens
  Payload ID: 4717
  Gene Symbol: DHRS7C
  Gene Name: dehydrogenase/reductase (SDR family) member 7C
  ENST ID: ENST00000571771
  CDS Start-End: 1-399
agtgtgaaggtgaaggggcctgcccataagatttctctggagctcgacaaaaagatcatggatgccaattactttggccccatcacattgacgaaagccctgcttcccaacatgatctcccggagaacaggccaaatcgtgttagtgaataatatccaagggaagtttggaatcccgttccgtacgactttctttttcaggaagctgacctacggcgtgcacccagtagaggtggcggaggaggtgatgcgcaccgtgcggaggaagaagcaagaggtgtttatggccaaccccatccccaaggccgccgtgtacgtccgcaccttcttcccggagttctttttcgccgtggtggcctgtggggtgaaggagaagctcaatgtcccggaggaggggtaactgcaggaggccaaatgggccaccccttggaaataaaggtttttctggcaggtg

SEQ ID NO: 126041 - DNA, 1917 bp, Homo sapiens
  Payload ID: 4718
  Gene Symbol: DHRS9
  Gene Name: dehydrogenase/reductase (SDR family) member 9
  Uniprot ID: Q9BPW9
  ENST ID: ENST00000357546
  CDS Start-End: 558-1517
aggaagaaaatataaagtacacttttaaaacatgaagtcttcatagcagcttatagtcgttcagagaaacatgttccactgagaatgacttgagagagaggattacatcattatgccagaaggaagaagccactgtgcatgctctatcaccagcctcaccctcctggtcagccttacaagagtgacactggatatactccagaagttggacccaccacagcctgcacactggacttcttggcttttatgagctattcaagagatatttagtcatcacgttgtgtcacaatgggagtgactcacagagcaaggagagaacctgaggattcctcacacatgtagtactcagagctctacggaaacccaggcacctcgacctcaagaggatcagcctggccagggtggcacaactcttccttccccgtgcacagcaggaaagctgccatcagctgagcaagtccaccaacagtttctgtgtcccacttcatctttaataaggacaccatcttcttgtattatacaagaaaggagtgtacctatcacacacagggggaaaaatgctcttttgggtgctaggcctcctaatcctctgtggttttctgtggactcgtaaaggaaaactaaagattgaagacatcactgataagtacatttttatcactggatgtgactcgggctttggaaacttggcagccagaacttttgataaaaagggatttcatgtaatcgctgcctgtctgactgaatcaggatcaacagctttaaaggcagaaacctcagagagacttcgtactgtgcttctggatgtgaccgacccagagaatgtcaagaggactgcccagtgggtgaagaaccaagttggggagaaaggtctctggggtctgatcaataatgctggtgttcccggcgtgctggctcccactgactggctgacactagaggactacagagaacctattgaagtgaacctgtttggactcatcagtgtgacactaaatatgcttcctttggtcaagaaagctcaagggagagttattaatgtctccagtgttggaggtcgccttgcaatcgttggagggggctatactccatccaaatatgcagtggaaggtttcaatgacagcttaagacgggacatgaaagcttttggtgtgcacgtctcatgcattgaaccaggattgttcaaaacaaacttggcagatccagtaaaggtaattgaaaaaaaactcgccatttgggagcagctgtctccagacatcaaacaacaatatggagaaggttacattgaaaaaagtctagacaaactgaaaggcaataaatcctatgtgaacatggacctctctccggtggtagagtgcatggaccacgctctaacaagtctcttccctaagactcattatgccgctggaaaagatgccaaaattttctggatacctctgtctcacatgccagcagctttgcaagactttttattgttgaaacagaaagcagagctggctaatcccaaggcagtgtgactcagctaaccacaaatgtctcctccaggctatgaaattggccgatttcaagaacacatctccttttcaaccccattccttatctgctccaacctggactcatttagatcgtgcttatttggattgcaaaagggagtcccaccatcgctggtggtatcccagggtccctgctcaagttttctttgaaaaggagggctggaatggtacatcacataggcaagtcctgccctgtatttaggctttgcctgcttggtgtgatgtaagggaaattgaaagacttgcccattcaaaatgatctttaccgtggcctgccccatgcttatggtccccagcatttacagtaacttgtgaatgttaagtatcatctcttatctaaatattaaaagataagtcaaacatt

SEQ ID NO: 126042 - DNA, 1044 bp, Homo sapiens
  Payload ID: 4718
  Gene Symbol: DHRS9
  Gene Name: dehydrogenase/reductase (SDR family) member 9
  Uniprot ID: Q9BPW9
  ENST ID: ENST00000421653
  CDS Start-End: 526-1044
cggaaacccaggcacctcgacctcaagaggatcagcctggccagggtggcacaactcttccttccccgtgcacagcaggaaagctgccatcagctgagcaagtccaccaacagtttctgtgtcccacttcatctttaataaggaaaactaaagattgaagacatcactgataagtacatttttatcactggatgtgactcgggctttggaaacttggcagccagaacttttgataaaaagggatttcatgtaatcgctgcctgtctgactgaatcaggatcaacagctttaaaggcagaaacctcagagagacttcgtactgtgcttctggatgtgaccgacccagagaatgtcaagaggactgcccagtgggtgaagaaccaagttggggagaaaggtctctggggtctgatcaataatgctggtgttcccggcgtgctggctcccactgactggctgacactagaggactacagagaacctattgaagtgaacctgtttggactcatcagtgtgacactaaatatgcttcctttggtcaagaaagctcaagggagagttattaatgtctccagtgttggaggtcgccttgcaatcgttggagggggctatactccatccaaatatgcagtggaaggtttcaatgacagcttaagacgggacatgaaagcttttggtgtgcacgtctcatgcattgaaccaggattgttcaaaacaaacttggcagatccagtaaaggtaattgaaaaaaaactcgccatttgggagcagctgtctccagacatcaaacaacaatatggagaaggttacattgaaaaaagtctagacaaactgaaaggcaataaatcctatgtgaacatggacctctctccggtggtagagtgcatggaccacgctctaacaagtctcttccctaagactcattatgccgctggaaaagatgccaaaattttctggatacctctgtctcacatgccagcagctttgcaagactttttattgttgaaacagaaagcagagctggctaatcccaaggcagtgtga

SEQ ID NO: 126043 - DNA, 1678 bp, Homo sapiens
  Payload ID: 4718
  Gene Symbol: DHRS9
  Gene Name: dehydrogenase/reductase (SDR family) member 9
  Uniprot ID: Q9BPW9
  ENST ID: ENST00000428522
  CDS Start-End: 324-1283
atgtagtactcagagctctacggaaacccaggcacctcgacctcaagaggatcagcctggccagggtggcacaactcttccttccccgtgcacagcaggaaagctgccatcagctgagcaagtccaccaacagtttctgtgtcccacttcatctttaataagtttgaagataattgggagtctgacagaacaattaaaattgaattattgtttctaatagattttaagcccattctgcagtggaatttcatgaactagcaagaggacaccatcttcttgtattatacaagaaaggagtgtacctatcacacacagggggaaaaatgctcttttgggtgctaggcctcctaatcctctgtggttttctgtggactcgtaaaggaaaactaaagattgaagacatcactgataagtacatttttatcactggatgtgactcgggctttggaaacttggcagccagaacttttgataaaaagggatttcatgtaatcgctgcctgtctgactgaatcaggatcaacagctttaaaggcagaaacctcagagagacttcgtactgtgcttctggatgtgaccgacccagagaatgtcaagaggactgcccagtgggtgaagaaccaagttggggagaaaggtctctggggtctgatcaataatgctggtgttcccggcgtgctggctcccactgactggctgacactagaggactacagagaacctattgaagtgaacctgtttggactcatcagtgtgacactaaatatgcttcctttggtcaagaaagctcaagggagagttattaatgtctccagtgttggaggtcgccttgcaatcgttggagggggctatactccatccaaatatgcagtggaaggtttcaatgacagcttaagacgggacatgaaagcttttggtgtgcacgtctcatgcattgaaccaggattgttcaaaacaaacttggcagatccagtaaaggtaattgaaaaaaaactcgccatttgggagcagctgtctccagacatcaaacaacaatatggagaaggttacattgaaaaaagtctagacaaactgaaaggcaataaatcctatgtgaacatggacctctctccggtggtagagtgcatggaccacgctctaacaagtctcttccctaagactcattatgccgctggaaaagatgccaaaattttctggatacctctgtctcacatgccagcagctttgcaagactttttattgttgaaacagaaagcagagctggctaatcccaaggcagtgtgactcagctaaccacaaatgtctcctccaggctatgaaattggccgatttcaagaacacatctccttttcaaccccattccttatctgctccaacctggactcatttagatcgtgcttatttggattgcaaaagggagtcccaccatcgctggtggtatcccagggtccctgctcaagttttctttgaaaaggagggctggaatggtacatcacataggcaagtcctgccctgtatttaggctttgcctgcttggtgtgatgtaagggaaattgaaagacttgcccattcaaaatgatctttaccgtggcctgccccatgcttatggtccccagcatttacagtaacttgtgaatgttaagtatcatctcttatctaaatattaaaagataagtcaa

SEQ ID NO: 126044 - DNA, 1652 bp, Homo sapiens
  Payload ID: 4718
  Gene Symbol: DHRS9
  Gene Name: dehydrogenase/reductase (SDR family) member 9
  Uniprot ID: Q9BPW9
  ENST ID: ENST00000432060
  CDS Start-End: 113-1252
aggaagaaaatataaagtacacttttaaaacatgaagtcttcatagcagcttatagtcgttcagagaaacatgttccactgagaatgacttgagagagaggattacatcattatgccagaaggaagaagccactgtgcatgctctatcaccagcctcaccctcctggtcagccttacaagagtgacactggatatactccagaagttggacccaccacagcctgcacactggagacaccatcttcttgtattatacaagaaaggagtgtacctatcacacacagggggaaaaatgctcttttgggtgctaggcctcctaatcctctgtggttttctgtggactcgtaaaggaaaactaaagattgaagacatcactgataagtacatttttatcactggatgtgactcgggctttggaaacttggcagccagaacttttgataaaaagggatttcatgtaatcgctgcctgtctgactgaatcaggatcaacagctttaaaggcagaaacctcagagagacttcgtactgtgcttctggatgtgaccgacccagagaatgtcaagaggactgcccagtgggtgaagaaccaagttggggagaaaggtctctggggtctgatcaataatgctggtgttcccggcgtgctggctcccactgactggctgacactagaggactacagagaacctattgaagtgaacctgtttggactcatcagtgtgacactaaatatgcttcctttggtcaagaaagctcaagggagagttattaatgtctccagtgttggaggtcgccttgcaatcgttggagggggctatactccatccaaatatgcagtggaaggtttcaatgacagcttaagacgggacatgaaagcttttggtgtgcacgtctcatgcattgaaccaggattgttcaaaacaaacttggcagatccagtaaaggtaattgaaaaaaaactcgccatttgggagcagctgtctccagacatcaaacaacaatatggagaaggttacattgaaaaaagtctagacaaactgaaaggcaataaatcctatgtgaacatggacctctctccggtggtagagtgcatggaccacgctctaacaagtctcttccctaagactcattatgccgctggaaaagatgccaaaattttctggatacctctgtctcacatgccagcagctttgcaagactttttattgttgaaacagaaagcagagctggctaatcccaaggcagtgtgactcagctaaccacaaatgtctcctccaggctatgaaattggccgatttcaagaacacatctccttttcaaccccattccttatctgctccaacctggactcatttagatcgtgcttatttggattgcaaaagggagtcccaccatcgctggtggtatcccagggtccctgctcaagttttctttgaaaaggagggctggaatggtacatcacataggcaagtcctgccctgtatttaggctttgcctgcttggtgtgatgtaagggaaattgaaagacttgcccattcaaaatgatctttaccgtggcctgccccatgcttatggtccccagcatttacagtaacttgtgaatgttaagtatcatctcttatctaaatattaaaagataagtcaaacatt

SEQ ID NO: 126045 - DNA, 524 bp, Homo sapiens
  Payload ID: 4718
  Gene Symbol: DHRS9
  Gene Name: dehydrogenase/reductase (SDR family) member 9
  ENST ID: ENST00000450153
  CDS Start-End: 327-524
tactcagagctctacggaaacccaggcacctcgacctcaagaggatcagcctggccagggtggcacaactcttccttccccgtgcacagcaggaaagctgccatcagctgagcaagtccaccaacagtttctgtgtcccacttcatctttaataaggaaaacaaactcaggaagaaaaagaaaagcagaagtgatcaaggagagcgctcgagttgcaatattttcctttggctgctgacaggcagttactataaagcattgtgcatggacaccatcttcttgtattatacaagaaaggagtgtacctatcacacacagggggaaaaatgctcttttgggtgctaggcctcctaatcctctgtggttttctgtggactcgtaaaggaaaactaaagattgaagacatcactgataagtacatttttatcactggatgtgactcgggctttggaaacttggcagccagaacttttgataaaaagggatttcatgtaatcgctgcctgtctgactgaatcaggatca

SEQ ID NO: 126046 - DNA, 1817 bp, Homo sapiens
  Payload ID: 4718
  Gene Symbol: DHRS9
  Gene Name: dehydrogenase/reductase (SDR family) member 9
  Uniprot ID: Q9BPW9
  ENST ID: ENST00000436483
  CDS Start-End: 458-1417
atttatttttaagaaacagaggaaggtgaataagagaagtgaaattaaataatcctattttaacttttttactaggaaaacaaactcaggaagaaaaagaaaagcagaagtgatcaaggagagcgctcgagttgcaatattttcctttggctgctgacaggcagttactataaagcattgtgcatggtaggaaaatggaggctaagaaaagttaatttgtccgagggccctctgatgatagtgaaactgggatggaacctctgcctgcttgcttctgaggtctgggctcctaactactgctctactgcctcgagccaagagatttacgccctattaagcaatttgttgtgcgataaattggaagacacagcagataagcaaacaactcaagcaaccaggacaccatcttcttgtattatacaagaaaggagtgtacctatcacacacagggggaaaaatgctcttttgggtgctaggcctcctaatcctctgtggttttctgtggactcgtaaaggaaaactaaagattgaagacatcactgataagtacatttttatcactggatgtgactcgggctttggaaacttggcagccagaacttttgataaaaagggatttcatgtaatcgctgcctgtctgactgaatcaggatcaacagctttaaaggcagaaacctcagagagacttcgtactgtgcttctggatgtgaccgacccagagaatgtcaagaggactgcccagtgggtgaagaaccaagttggggagaaaggtctctggggtctgatcaataatgctggtgttcccggcgtgctggctcccactgactggctgacactagaggactacagagaacctattgaagtgaacctgtttggactcatcagtgtgacactaaatatgcttcctttggtcaagaaagctcaagggagagttattaatgtctccagtgttggaggtcgccttgcaatcgttggagggggctatactccatccaaatatgcagtggaaggtttcaatgacagcttaagacgggacatgaaagcttttggtgtgcacgtctcatgcattgaaccaggattgttcaaaacaaacttggcagatccagtaaaggtaattgaaaaaaaactcgccatttgggagcagctgtctccagacatcaaacaacaatatggagaaggttacattgaaaaaagtctagacaaactgaaaggcaataaatcctatgtgaacatggacctctctccggtggtagagtgcatggaccacgctctaacaagtctcttccctaagactcattatgccgctggaaaagatgccaaaattttctggatacctctgtctcacatgccagcagctttgcaagactttttattgttgaaacagaaagcagagctggctaatcccaaggcagtgtgactcagctaaccacaaatgtctcctccaggctatgaaattggccgatttcaagaacacatctccttttcaaccccattccttatctgctccaacctggactcatttagatcgtgcttatttggattgcaaaagggagtcccaccatcgctggtggtatcccagggtccctgctcaagttttctttgaaaaggagggctggaatggtacatcacataggcaagtcctgccctgtatttaggctttgcctgcttggtgtgatgtaagggaaattgaaagacttgcccattcaaaatgatctttaccgtggcctgccccatgcttatggtccccagcatttacagtaacttgtgaatgttaagtatcatctcttatctaaatattaaaagataagtcaaacatt

SEQ ID NO: 126047 - DNA, 1465 bp, Homo sapiens
  Payload ID: 4718
  Gene Symbol: DHRS9
  Gene Name: dehydrogenase/reductase (SDR family) member 9
  Uniprot ID: Q9BPW9
  ENST ID: ENST00000412271
  CDS Start-End: 106-1065
agattttaagcccattctgcagtggaatttcatgaactagcaagaggacaccatcttcttgtattatacaagaaaggagtgtacctatcacacacagggggaaaaatgctcttttgggtgctaggcctcctaatcctctgtggttttctgtggactcgtaaaggaaaactaaagattgaagacatcactgataagtacatttttatcactggatgtgactcgggctttggaaacttggcagccagaacttttgataaaaagggatttcatgtaatcgctgcctgtctgactgaatcaggatcaacagctttaaaggcagaaacctcagagagacttcgtactgtgcttctggatgtgaccgacccagagaatgtcaagaggactgcccagtgggtgaagaaccaagttggggagaaaggtctctggggtctgatcaataatgctggtgttcccggcgtgctggctcccactgactggctgacactagaggactacagagaacctattgaagtgaacctgtttggactcatcagtgtgacactaaatatgcttcctttggtcaagaaagctcaagggagagttattaatgtctccagtgttggaggtcgccttgcaatcgttggagggggctatactccatccaaatatgcagtggaaggtttcaatgacagcttaagacgggacatgaaagcttttggtgtgcacgtctcatgcattgaaccaggattgttcaaaacaaacttggcagatccagtaaaggtaattgaaaaaaaactcgccatttgggagcagctgtctccagacatcaaacaacaatatggagaaggttacattgaaaaaagtctagacaaactgaaaggcaataaatcctatgtgaacatggacctctctccggtggtagagtgcatggaccacgctctaacaagtctcttccctaagactcattatgccgctggaaaagatgccaaaattttctggatacctctgtctcacatgccagcagctttgcaagactttttattgttgaaacagaaagcagagctggctaatcccaaggcagtgtgactcagctaaccacaaatgtctcctccaggctatgaaattggccgatttcaagaacacatctccttttcaaccccattccttatctgctccaacctggactcatttagatcgtgcttatttggattgcaaaagggagtcccaccatcgctggtggtatcccagggtccctgctcaagttttctttgaaaaggagggctggaatggtacatcacataggcaagtcctgccctgtatttaggctttgcctgcttggtgtgatgtaagggaaattgaaagacttgcccattcaaaatgatctttaccgtggcctgccccatgcttatggtccccagcatttacagtaacttgtgaatgttaagtatcatctcttatctaaatattaaaagataagtcaaacatt

SEQ ID NO: 126048 - DNA, 2863 bp, Homo sapiens
  Payload ID: 4718
  Gene Symbol: DHRS9
  Gene Name: dehydrogenase/reductase (SDR family) member 9
  Uniprot ID: Q9BPW9
  ENST ID: ENST00000602501
  CDS Start-End: 1504-2463
atctgaaaaattaataattccttaattatcaaatatccattatttaaatttataattgtgtcataaatattgtcataaatagatttgctgttttaaagcttgttccttcattttctctgttttgttttagataaacattgtcataaatagatttgttgttttaaagcttgttccttcattttctctgattgttttgttttagattcagaggttacttatgcttgtttgttacatggatgttacatgtgtaatgggggatattggacttctagtgtactcatcacccatatactgaacactgtactcaaaagggattgaaagaaactaggaaacttggcaggaagatcattcttaagccaggaaaaaaatttttaatgctcacatgtgaacatgtgatggtcataccagaaggagcacccacctccctccctctgtgacagacacattttcttagccttcacctttccttctttcaagttgctgaaaatccacagtgtttctgttcatttgttactttcattctcacctatcttctctcttgctccatctaccagaacaataattccccatataatacttctcacttcacttttcaacgcaggacctcttgttggtctgatctgtttgtctgtccgctttatcaatattatcagatgtaagtttacatgaatacacacacatattcactaaactgaggggaaaaaatgccttgtaggtcataaaaaagcagggaaattcccaacaattcatatttgatccctggatccaggggtggcagcaataagcctgctttagatatttactccccattttatgatccggtggtttggtttttcaaatgatgatatggctcctttcgcaatgacttgatgtttaggaggtgtgcttcaataaatacattttaaaatcaacaatcaagttagagttgtacaaatggctctgaaatgtcccactacactgttagaccaagggcacagattgtgcttctgtactatttatcctagtatccctcggcatatattaactgctctaaaaatctccttggctacacgctgcatcaaatcaaagttaaatgttataccacctttctattctatttttaatattcaaagagggtgctcagattttagaacaaatttcaatgtttaagtacacacaaaaaaatcattaactcatatatttcaagagtaggaaatgggaactggtgttaaaactcttataacaaatgtcactgtcttaagggacagtgtttaaaaacgcatacctggccgggcgcggtggctcatgcctgtaatcccagcactttgggaggccgaggccggcggatcacaaggaaaacaaactcaggaagaaaaagaaaagcagaagtgatcaaggagagcgctcgagttgcaatattttcctttggctgctgacaggcagttactataaagcattgtgcatggacaccatcttcttgtattatacaagaaaggagtgtacctatcacacacagggggaaaaatgctcttttgggtgctaggcctcctaatcctctgtggttttctgtggactcgtaaaggaaaactaaagattgaagacatcactgataagtacatttttatcactggatgtgactcgggctttggaaacttggcagccagaacttttgataaaaagggatttcatgtaatcgctgcctgtctgactgaatcaggatcaacagctttaaaggcagaaacctcagagagacttcgtactgtgcttctggatgtgaccgacccagagaatgtcaagaggactgcccagtgggtgaagaaccaagttggggagaaaggtctctggggtctgatcaataatgctggtgttcccggcgtgctggctcccactgactggctgacactagaggactacagagaacctattgaagtgaacctgtttggactcatcagtgtgacactaaatatgcttcctttggtcaagaaagctcaagggagagttattaatgtctccagtgttggaggtcgccttgcaatcgttggagggggctatactccatccaaatatgcagtggaaggtttcaatgacagcttaagacgggacatgaaagcttttggtgtgcacgtctcatgcattgaaccaggattgttcaaaacaaacttggcagatccagtaaaggtaattgaaaaaaaactcgccatttgggagcagctgtctccagacatcaaacaacaatatggagaaggttacattgaaaaaagtctagacaaactgaaaggcaataaatcctatgtgaacatggacctctctccggtggtagagtgcatggaccacgctctaacaagtctcttccctaagactcattatgccgctggaaaagatgccaaaattttctggatacctctgtctcacatgccagcagctttgcaagactttttattgttgaaacagaaagcagagctggctaatcccaaggcagtgtgactcagctaaccacaaatgtctcctccaggctatgaaattggccgatttcaagaacacatctccttttcaaccccattccttatctgctccaacctggactcatttagatcgtgcttatttggattgcaaaagggagtcccaccatcgctggtggtatcccagggtccctgctcaagttttctttgaaaaggagggctggaatggtacatcacataggcaagtcctgccctgtatttaggctttgcctgcttggtgtgatgtaagggaaattgaaagacttgcccattcaaaatgatctttaccgtggcctgccccatgcttatggtccccagcatttacagtaacttgtgaatgttaagtatcatctcttatctaaatattaaaagataagtcaaacatt

SEQ ID NO: 126049 - DNA, 2571 bp, Homo sapiens
  Payload ID: 4719
  Gene Symbol: DHRSX
  Gene Name: dehydrogenase/reductase (SDR family) X-linked
  Uniprot ID: Q8N5I4
  ENST ID: ENST00000334651
  CDS Start-End: 54-1046
gcgcagagtcccgcgggcggcgcggaagcggcggcggcgcggccggggcagccatgtcgccattgtctgcggcgcgggcggccctgcgggtctacgcggtaggcgccgcggtgatcctggcgcagctgctgcggcgctgccgcgggggcttcctggagccagttttccccccacgacctgaccgtgtcgctatagtgacgggagggacagatggcattggctattctacagcgaagcatctggcgagacttggcatgcatgttatcatagctggaaataatgacagcaaagccaaacaagttgtaagcaaaataaaagaagaaaccttgaacgacaaagtggaatttttatactgtgacttggcttccatgacttccatccggcagtttgtgcagaagttcaagatgaagaagattcctctccatgtcctgatcaacaatgctggggtgatgatggtccctcagaggaaaaccagagatggattcgaagaacatttcggcctgaactacctagggcacttcctgctgaccaaccttctcttggatacgctgaaagagtctgggtcccctggccacagtgcgagggtggtcaccgtctcctctgccacccattacgtcgctgagctgaacatggatgaccttcagagcagtgcctgctactcaccccacgcagcctacgcccagagcaagctggcccttgtcctgttcacctaccacctccagcggctgctggcggctgagggaagccacgtgaccgccaacgtggtggaccccggggtggtcaacacggacgtctacaagcacgtgttctgggccacccgtctggcgaagaagcttctcggctggttgcttttcaagacccccgatgaaggagcgtggacttccatctacgcagcagtcaccccagagctggaaggagttggtggccattacctatacaacgagaaagagaccaagtccctccacgtcacctacaaccagaaactgcagcagcagctgtggtctaagagttgtgagatgactggggtccttgatgtgaccctgtgatatcctgtctcaggatagctgctgccccaagaaacacattgcacctgccaatagcttgtgggtctgtgaagactgcggtgtttgagtttctcacacccacctgcccacagggctctgtcctctagttttgagacagctgcctcaacctctgcagaacttcaagaagccaaataaacattttggaggataatcaccccaagtggtcttcaaccataaactttgtgattccaaagtgcccagttgtcacaggtgccataaataattacattttccaacataaatgtgccattttccttgccgcgttaatacaactgagtacaaaagttccaagagagatgctctcttttcaggggctgcaatgtcctctctgagacctagtggtggatgaggtctcctgtttgattttgttcctgcactcactcatttttccagagacccagctgtgattcacaggtgtcagacatggggaggtgtgagccttgcttgctacagcctgtaggatgagtttgacgtggccagcagcaccatctggtcaacctcattccagaatggcacagtcacaagtgaagcatgccactgtcaaatccgagaatgtaaaccgctgaacagctatggatcaaatggtagccctcaaaagatatgttcatgccctaaccctcagaacctataaatattactttatttggaaaagaatctttgcagatagaattaagaattttgagatgggtcattatggatcatcccagtgaacctaatgccatcacgagggttcttatcagagacaggtagagggagatttgagtacagaagacaagatattcgtgtgatgatgcagacagagactggagtgatgccaccacaagccaagcaatgcctggagccaccaggagctgggacaggcaggaaggattctcccttatacccctcagagcaatcttggcccctctgacgtcttgactttagacttctggtccccagaacggagagagaataaatctttcttgttttaaggctccaacaaattggtagtcacttgttacagcaaccacaggaaatgtatacagcttctgatacttctgaaaacctcacacagccaaagggtacatccttggtatagaggctcactcttactcaccagccaggcaaggaaggctcaatcctttggtgttagagagatagatgttgggttttcaaatttcaacatagagaaatcagtcatttgcaatgcttttgagaaagtactgtgtataccctacgagcctgcactccttatgtgtgagactgatgaccattggttggcttattatccattccactaagtgacaaaatcccactgactattcaaatccaggctcctggcatgcctgtaccttagaatcacaaccagctgcaattccaggatggagttcaaactaattgtgggggcatgtgcttcttacatgactgctagattgttcccagatggggaaggttgccctgataagcaacttaaatgaaaataataaatgtattgtttggcctcttt

SEQ ID NO: 126050 - DNA, 744 bp, Homo sapiens
  Payload ID: 4719
  Gene Symbol: DHRSX
  Gene Name: dehydrogenase/reductase (SDR family) X-linked
  ENST ID: ENST00000412516
  CDS Start-End: 49-744
gagtcccgcgggcggcgcggaagcggcggcggcgcggccggggcagccatgtcgccattgtctgcggcgcgggcggccctgcgggtctacgcggtaggcgccgcggtgatcctggcgcagctgctgcggcgctgccgcgggggcttcctggagccagttttccccccacgacctgaccgtgtcgctatagtgacgggagggacagatggcattggctattctacagcgaagcatctggcgagacttggcatgcatgttatcatagtggaatttttatactgtgacttggcttccatgacttccatccggcagtttgtgcagaagttcaagatgaagaagattcctctccatgtcctgatcaacaatgctggggtgatgatggtccctcagaggaaaaccagagatggattcgaagaacatttcggcctgaactacctagggcacttcctgctgaccaaccttctcttggatacgctgaaagagtctgggtcccctggccacagtgcgagggtggtcaccgtctcctctgccacccattacgtcgctgagctgaacatggatgaccttcagagcagtgcctgctactcaccccacgcagcctacgcccagagcaagctggcccttgtcctgttcacctaccacctccagcggctgctggcggctgagggaagccacgtgaccgccaacgtggtggaccccggggtggtcaacacggacgtctacaagcacgtgttctgggccacc

SEQ ID NO: 126051 - DNA, 797 bp, Homo sapiens
  Payload ID: 4719
  Gene Symbol: DHRSX
  Gene Name: dehydrogenase/reductase (SDR family) X-linked
  ENST ID: ENST00000444280
  CDS Start-End: 433-797
gtgcgcgctgggacctccccgccccgcgctttccgtccccgccggctcttctgcgcgcctggcccggcccgacccggcccgacccttccctccccgcgcgtgtggcctccccgcctgtcccgggtcgggctccaaccaagcagcccccgtgcagccgcccccccgcgcaccctgacacctccgggccatggccggggacccgggggctcgcacgccccgcgcccaagacatcaggcggctctgcctgccgcctgcggtcggccagtgaccgcgcgcccccgccaggccccggaggggaggagcgggcgtcccagggacctcgacccctacccaccccaggttttccccccacgacctgaccgtgtcgctatagtgacgggagggacagatggcattggctattctacagcgaagcatctggcgagacttggcatgcatgttatcatagctggaaataatgacagcaaagccaaacaagttgtaagcaaaataaaagaagaaaccttgaacgacaaagtggaatttttatactgtgacttggcttccatgacttccatccggcagtttgtgcagaagttcaagatgaagaagattcctctccatgtcctgatcaacaatgctggggtgatgatggtccctcagaggaaaaccagagatggattcgaagaacatttcggcctgaactacctagggcacttcctgctgaccaaccttctcttggatacgctgaaagagtctgggtcccctggccacagtgcgagggtggtcaccgtctcctctgccacccattacgtcgc

SEQ ID NO: 126052 - DNA, 539 bp, Homo sapiens
  Payload ID: 4719
  Gene Symbol: DHRSX
  Gene Name: dehydrogenase/reductase (SDR family) X-linked
  ENST ID: ENST00000441131
  CDS Start-End: 39-230
caaacacagcgggtgttaggatctgtgtggagtcccggatgccagttttccccccacgacctgaccgtgtcgctatagtgacgggagggacagatggcattggctattctacagcgaagcatctggcgagacttggcatgcatgttatcatagctggaaataatgacagcaaagccaaacaagttgtaagcaaaataaaagaagaaaccttgaacgacaaagagacgtgagtcttgctgtgttgcccgggctggctttgcctctggaactcaagcgatcctcccacctcagcctctcgaggagctgggactacaggcgtgcaccatcatttcctcctaaaatttggaatttttatactgtgacttggcttccatgacttccatccggcagtttgtgcagaagttcaagatgaagaagattcctctccatgtcctgatcaacaatgctggggtgatgatggtccctcagaggaaaaccagagatggattcgaagaacatttcggcctgaactacctagggcacttcctgctgaccaacct

SEQ ID NO: 126053 - DNA, 679 bp, Homo sapiens
  Payload ID: 4719
  Gene Symbol: DHRSX
  Gene Name: dehydrogenase/reductase (SDR family) X-linked
  ENST ID: ENST00000478825
  CDS Start-End: 1-464
gcccggcccgacccggcccgacccttccctccccgcgcgtgtggcctccccgcctgtcccgggtcgggctccaaccaagcagcccccgtgcagccgcccccccgcgcaccctgacacctccgggccatggccggggacccgggggctcgcacgccccgcgcccaagacatcaggcggctctgcctgccgcctgcggtcggccagtgaccgcgcgcccccgccaggccccggaggggaggagcgggcgtcccagggacctcgacccctacccaccccaggttttccccccacgacctgaccgtgtcgctatagtgacgggagggacagatggcattggctattctacagcgaagcatctggcgagacttggcatgcatgttatcatagctggaaataatgacagcaaagccaaacaagttgtaagcaaaataaaagaagaaaccttgaacgacaaagagacgtgagtcttgctgtgttgcccgggctggctttgcctctggaactcaagcgatcctcccacctcagcctctcgaggagctgggactacaggcgtgcaccatcatttcctcctaaaatttggaatttttatactgtgacttggcttccatgacttccatccggcagtttgtgcagaagttcaagatgaagaagattcctctccatgtcctgatcaacaatg

SEQ ID NO: 126054 - DNA, 1658 bp, Homo sapiens
  Payload ID: 4720
  Gene Symbol: DIO1
  Gene Name: deiodinase, iodothyronine, type I
  Uniprot ID: P49895
  ENST ID: ENST00000322679
  CDS Start-End: 24-509
gagcttactctggctttgccgagatggggctgccccagccagggctgtggctgaagaggctctgggtgctcttggaggtggctgtgcatgtggtcgtgggtaaagtgcttctgatattgtttccagacagagtcaagcggaacatcctggccatgggcgagaagacgggtatgaccaggaacccccatttcagccacgacaactggataccaacctttttcagcacccagtatttctggttcgtcttgaaggtccgttggcagcgactagaggacacgactgagctagggggtctggccccaaactgcccggtggtccgcctctcaggacagaggtgcaacatttgggagtttatgcaaggtaataggccactggtgctgaattttggaagttgtacctgaccttcatttatgttcaaatttgaccagttcaagaggcttattgaagactttagttccatagcagattttcttgtcatttacattgaagaagcacatgcatcagggtaaatctggcccttggaactacaacccagaggaagttcgtgctgttctggaaaagctccacagttaatctggacagatacctcaattctaggtgaccaacgggagggcttctcaaggcttagctctccctgagacccagctggcttttacccttgacctgtgtccctagctgaatcactagctcagatttttctgatctaagcaaacaactcccagctgaggaatgcaggccacagcacccaatcaagacaaattgttattatcagaaaatgaagcaacacttgagctgttcaggccagttccctgttgaagaaacagttccctgttgaagaaagtagagcctgacactgctcccactttggagaccacattccctgcacacggtctttgagagagcagttgcactctacaggcacacttctgaggtacggtatctctctccagccactctgataccaagtaattcaagctggcattccttctattagggaaattcattttacccaatttgcatttatggaattgatcatttaagacactaaattagtttttagaaccaattatgggaagaattccagttgttaggaagagatgaggagttggaagaggagggattagaaacaggaggaggcagtcatcctctccttgccaaaagatttaaacctgtccacattggtggtgatgatgggtgagtttccatggtaacacatccctaattttaccagggaagaggagagtactcactttaccatctttgaatatatttcatagaaatctagctctctgtaccctgaaatcttccactagcctcacttttcaacagagtcatctagaagggagggttggcttcccaaaagcataaccttgaccaaaccaaacaataggcaccagcaatgctgtcattcagttatgcagaagctcatttgtgaaattctgtttctctgatttcttcgcaagtctcttaatggtcatttgtgttagattacatcaaactgatggatagccattggtattcatctattttaactctgtgtctttacatatttgtttatgatggccacagcctaaagtacacacggctgtgacttgattcaaaagaaaatgttataagatgcagtaaactaataacagaattattaaaatatatcaggc

SEQ ID NO: 126055 - DNA, 1861 bp, Homo sapiens
  Payload ID: 4720
  Gene Symbol: DIO1
  Gene Name: deiodinase, iodothyronine, type I
  Uniprot ID: P49895
  ENST ID: ENST00000361921
  CDS Start-End: 25-774
agagcttactctggctttgccgagatggggctgccccagccagggctgtggctgaagaggctctgggtgctcttggaggtggctgtgcatgtggtcgtgggtaaagtgcttctgatattgtttccagacagagtcaagcggaacatcctggccatgggcgagaagacgggtatgaccaggaacccccatttcagccacgacaactggataccaacctttttcagcacccagtatttctggttcgtcttgaaggtccgttggcagcgactagaggacacgactgagctagggggtctggccccaaactgcccggtggtccgcctctcaggacagaggtgcaacatttgggagtttatgcaaggtaataggccactggtgctgaattttggaagttgtacctgaccttcatttatgttcaaatttgaccagttcaagaggcttattgaagactttagttccatagcagattttcttgtcatttacattgaagaagcacatgcatcagatggctgggcttttaagaacaacatggacatcagaaatcaccagaaccttcaggatcgcctgcaggcagcccatctactgctggccaggagcccccagtgccctgtggtggtggacaccatgcagaaccagagcagccagctctacgcagcactgcctgagaggctctacataatccaggagggcaggatcctctacaagggtaaatctggcccttggaactacaacccagaggaagttcgtgctgttctggaaaagctccacagttaatctggacagatacctcaattctaggtgaccaacgggagggcttctcaaggcttagctctccctgagacccagctggcttttacccttgacctgtgtccctagctgaatcactagctcagatttttctgatctaagcaaacaactcccagctgaggaatgcaggccacagcacccaatcaagacaaattgttattatcagaaaatgaagcaacacttgagctgttcaggccagttccctgttgaagaaacagttccctgttgaagaaagtagagcctgacactgctcccactttggagaccacattccctgcacacggtctttgagagagcagttgcactctacaggcacacttctgaggtacggtatctctctccagccactctgataccaagtaattcaagctggcattccttctattagggaaattcattttacccaatttgcatttatggaattgatcatttaagacactaaattagtttttagaaccaattatgggaagaattccagttgttaggaagagatgaggagttggaagaggagggattagaaacaggaggaggcagtcatcctctccttgccaaaagatttaaacctgtccacattggtggtgatgatgggtgagtttccatggtaacacatccctaattttaccagggaagaggagagtactcactttaccatctttgaatatatttcatagaaatctagctctctgtaccctgaaatcttccactagcctcacttttcaacagagtcatctagaagggagggttggcttcccaaaagcataaccttgaccaaaccaaacaataggcaccagcaatgctgtcattcagttatgcagaagctcatttgtgaaattctgtttctctgatttcttcgcaagtctcttaatggtcatttgtgttagattacatcaaactgatggatagccattggtattcatctattttaactctgtgtctttacatatttgtttatgatggccacagcctaaagtacacacggctgtgacttgattcaaaagaaaatgttataagatgcagtaaactaataacagaattattaaaatatatcaggcta

SEQ ID NO: 126056 - DNA, 606 bp, Homo sapiens
  Payload ID: 4720
  Gene Symbol: DIO1
  Gene Name: deiodinase, iodothyronine, type I
  Uniprot ID: P49895
  ENST ID: ENST00000388876
  CDS Start-End: 1-606
atggggctgccccagccagggctgtggctgaagaggctctgggtgctcttggaggtggctgtgcatgtggtcgtgggtaaagtgcttctgatattgtttccagacagagtcaagcggaacatcctggccatgggcgagaagacgggtatgaccaggaacccccatttcagccacgacaactggataccaacctttttcagcacccagtatttctggttcgtcttgaaggtccgttggcagcgactagaggacacgactgagctagggggtctggccccaaactgcccggtggtccgcctctcaggacagaggtgcaacatttgggagtttatgcaagatggctgggcttttaagaacaacatggacatcagaaatcaccagaaccttcaggatcgcctgcaggcagcccatctactgctggccaggagcccccagtgccctgtggtggtggacaccatgcagaaccagagcagccagctctacgcagcactgcctgagaggctctacataatccaggagggcaggatcctctacaagggtaaatctggcccttggaactacaacccagaggaagttcgtgctgttctggaaaagctccacagttaa

SEQ ID NO: 126057 - DNA, 771 bp, Homo sapiens
  Payload ID: 4720
  Gene Symbol: DIO1
  Gene Name: deiodinase, iodothyronine, type I
  ENST ID: ENST00000530084
  CDS Start-End: 23-271
agcttactctggctttgccgagatggggctgccccagccagggctgtggctgaagaggctctgggtgctcttggaggtggctgtgcatgtggtcgtgggtaaagtgcttctgatattgtttccagacagagtcaagcggaacatcctggccatgggcgagaagacgggtatgaccaggaacccccatttcagccacgacaactggataccaacctttttcagcacccagtatttctggttcgtcttgaaggtaataggccactggtgctgaattttggaagttgtacctgaccttcatttatgttcaaatttgaccagttcaagaggcttattgaagactttagttccatagcagattttcttgtcatttacattgaagaagcacatgcatcagatggctgggcttttaagaacaacatggacatcagaaatcaccagaaccttcaggatcgcctgcaggcagcccatctactgctggccaggagcccccagtgccctgtggtggtggacaccatgcagaaccagagcagccagctctacgcagcactgcctgagaggctctacataatccaggagggcaggatcctctacaagggtaaatctggcccttggaactacaacccagaggaagttcgtgctgttctggaaaagctccacagttaatctggacagatacctcaattctaggtgaccaacgggagggcttctcaaggcttagctctccctgagacccagctggcttttacccttgacctgtgtccctagctgaat

SEQ ID NO: 126058 - DNA, 523 bp, Homo sapiens
  Payload ID: 4720
  Gene Symbol: DIO1
  Gene Name: deiodinase, iodothyronine, type I
  ENST ID: ENST00000529329
  CDS Start-End: 1-177
atggggctgccccagccagggctgtggctgaagaggctctgggtgctcttggaggtggctgtgcatgtggtcgtgggtaaagtgcttctgatattgtttccagacagagtcaagcggaacatcctggccatgggcgagaagacgggtccgttggcagcgactagaggacacgactgagctagggggtctggccccaaactgcccggtggtccgcctctcaggacagaggtgcaacatttgggagtttatgcaagatggctgggcttttaagaacaacatggacatcagaaatcaccagaaccttcaggatcgcctgcaggcagcccatctactgctggccaggagcccccagtgccctgtggtggtggacaccatgcagaaccagagcagccagctctacgcagcactgcctgagaggctctacataatccaggagggcaggatcctctacaagggtaaatctggcccttggaactacaacccagaggaagttcgtgctgttctggaaaagctccacagttaa

SEQ ID NO: 126059 - DNA, 688 bp, Homo sapiens
  Payload ID: 4720
  Gene Symbol: DIO1
  Gene Name: deiodinase, iodothyronine, type I
  ENST ID: ENST00000529589
  CDS Start-End: 137-688
agcagggaaggcggagagagaacacttccattccagttacagttccactgaattggaagctgtaactaccacttaggcatttttggcttctcataccactgcaccagcagacagagtcaagcggaacatcctggccatgggcgagaagacgggtatgaccaggaacccccatttcagccacgacaactggataccaacctttttcagcacccagtatttctggttcgtcttgaaggtccgttggcagcgactagaggacacgactgagctagggggtctggccccaaactgcccggtggtccgcctctcaggacagaggtgcaacatttgggagtttatgcaaggtaataggccactggtgctgaattttggaagttgtacctgaccttcatttatgttcaaatttgaccagttcaagaggcttattgaagactttagttccatagcagattttcttgtcatttacattgaagaagcacatgcatcagatggctgggcttttaagaacaacatggacatcagaaatcaccagaaccttcaggatcgcctgcaggcagcccatctactgctggccaggagcccccagtgccctgtggtggtggacaccatgcagaaccagagcagccagctctacgcagcactgcctgagaggctctacataatccaggagggcaggatcctctacaag

SEQ ID NO: 126060 - DNA, 614 bp, Homo sapiens
  Payload ID: 4720
  Gene Symbol: DIO1
  Gene Name: deiodinase, iodothyronine, type I
  ENST ID: ENST00000528946
  CDS Start-End: 23-376
agcttactctggctttgccgagatggggctgccccagccagggctgtggctgaagaggctctgggtgctcttggaggtggctgtgcatgtggtcgtgggtaaagtgcttctgatattgtttccagacagagtcaagcggaacatcctggccatgggcgagaagacgggtatgaccaggaacccccatttcagccacgacaactggataccaacctttttcagcacccagtatttctggttcgtcttgaaggtccgttggcagcgactagaggacacgactgagctagggggtctggccccaaactgcccggtggtccgcctctcaggacagaggtgcaacatttgggagtttatgcaagttcaagaggcttattgaagactttagttccatagcagattttcttgtcatttacattgaagaagcacatgcatcagggtaaatctggcccttggaactacaacccagaggaagttcgtgctgttctggaaaagctccacagttaatctggacagatacctcaattctaggtgaccaacgggagggcttctcaaggcttagctctccctgagacccagctggcttttacccttgacctgtgtccctagctgaatca

SEQ ID NO: 126061 - DNA, 626 bp, Homo sapiens
  Payload ID: 4720
  Gene Symbol: DIO1
  Gene Name: deiodinase, iodothyronine, type I
  ENST ID: ENST00000524406
  CDS Start-End: 264-626
atggggctgccccagccagggctgtggctgaagaggctctgggtgctcttggaggtggctgtgcatgtggtcgtggcacccagtatttctggttcgtcttgaaggtccgttggcagcgactagaggacacgactgagctagggggtctggccccaaactgcccggtggtccgcctctcaggacagaggtgcaacatttgggagtttatgcaaggtaataggccactggtgctgaattttggaagttgtacctgaccttcatttatgttcaaatttgaccagttcaagaggcttattgaagactttagttccatagcagattttcttgtcatttacattgaagaagcacatgcatcagatggctgggcttttaagaacaacatggacatcagaaatcaccagaaccttcaggatcgcctgcaggcagcccatctactgctggccaggagcccccagtgccctgtggtggtggacaccatgcagaaccagagcagccagctctacgcagcactgcctgagaggctctacataatccaggagggcaggatcctctacaagggtaaatctggcccttggaactacaacccagaggaagttcgtgctgttctggaaaagctccacagttaa

SEQ ID NO: 126062 - DNA, 406 bp, Homo sapiens
  Payload ID: 4720
  Gene Symbol: DIO1
  Gene Name: deiodinase, iodothyronine, type I
  Uniprot ID: P49895
  ENST ID: ENST00000532493
  CDS Start-End: 1-342
atggggctgccccagccagggctgtggctgaagaggctctgggtgctcttggaggtggctgtgcatgtggtcgtgggtaaagtgcttctgatattgtttccagacagagtcaagcggaacatcctggccatgggcgagaagacgggtatgaccaggaacccccatttcagccacgacaactggataccaacctttttcagcacccagtatttctggttcgtcttgaaggtccgttggcagcgactagaggacacgactgagctagggggtctggccccaaactgcccggtggtccgcctctcaggacagaggtgcaacatttgggagtttatgcaagggtaaatctggcccttggaactacaacccagaggaagttcgtgctgttctggaaaagctccacagttaa

SEQ ID NO: 126063 - DNA, 799 bp, Homo sapiens
  Payload ID: 4720
  Gene Symbol: DIO1
  Gene Name: deiodinase, iodothyronine, type I
  ENST ID: ENST00000527060
  CDS Start-End: 23-199
agcttactctggctttgccgagatggggctgccccagccagggctgtggctgaagaggctctgggtgctcttggaggtggctgtgcatgtggtcgtgggtaaagtgcttctgatattgtttccagacagagtcaagcggaacatcctggccatgggcgagaagacgggtccgttggcagcgactagaggacacgactgagctagggggtctggccccaaactgcccggtggtccgcctctcaggacagaggtgcaacatttgggagtttatgcaaggtaataggccactggtgctgaattttggaagttgtacctgaccttcatttatgttcaaatttgaccagttcaagaggcttattgaagactttagttccatagcagattttcttgtcatttacattgaagaagcacatgcatcagatggctgggcttttaagaacaacatggacatcagaaatcaccagaaccttcaggatcgcctgcaggcagcccatctactgctggccaggagcccccagtgccctgtggtggtggacaccatgcagaaccagagcagccagctctacgcagcactgcctgagaggctctacataatccaggagggcaggatcctctacaagggtaaatctggcccttggaactacaacccagaggaagttcgtgctgttctggaaaagctccacagttaatctggacagatacctcaattctaggtgaccaacgggagggcttctcaaggcttagctctccctgagacccagctggcttttacccttgacctgtgtccctagctgaatca

SEQ ID NO: 126064 - DNA, 558 bp, Homo sapiens
  Payload ID: 4720
  Gene Symbol: DIO1
  Gene Name: deiodinase, iodothyronine, type I
  Uniprot ID: P49895
  ENST ID: ENST00000525202
  CDS Start-End: 1-558
atggggctgccccagccagggctgtggctgaagaggctctgggtgctcttggaggtggctgtgcatgtggtcgtgggtaaagtgcttctgatattgtttccagacagagtcaagcggaacatcctggccatgggcgagaagacgggtaataggccactggtgctgaattttggaagttgtacctgaccttcatttatgttcaaatttgaccagttcaagaggcttattgaagactttagttccatagcagattttcttgtcatttacattgaagaagcacatgcatcagatggctgggcttttaagaacaacatggacatcagaaatcaccagaaccttcaggatcgcctgcaggcagcccatctactgctggccaggagcccccagtgccctgtggtggtggacaccatgcagaaccagagcagccagctctacgcagcactgcctgagaggctctacataatccaggagggcaggatcctctacaagggtaaatctggcccttggaactacaacccagaggaagttcgtgctgttctggaaaagctccacagttaa

SEQ ID NO: 126065 - DNA, 573 bp, Homo sapiens
  Payload ID: 4720
  Gene Symbol: DIO1
  Gene Name: deiodinase, iodothyronine, type I
  ENST ID: ENST00000525044
  CDS Start-End: 23-271
agcttactctggctttgccgagatggggctgccccagccagggctgtggctgaagaggctctgggtgctcttggaggtggctgtgcatgtggtcgtgggtaaagtgcttctgatattgtttccagacagagtcaagcggaacatcctggccatgggcgagaagacgggtatgaccaggaacccccatttcagccacgacaactggataccaacctttttcagcacccagtatttctggttcgtcttgaaggtaataggccactggtgctgaattttggaagttgtacctgaccttcatttatgttcaaatttgaccagttcaagaggcttattgaagactttagttccatagcagattttcttgtcatttacattgaagaagcacatgcatcagggtaaatctggcccttggaactacaacccagaggaagttcgtgctgttctggaaaagctccacagttaatctggacagatacctcaattctaggtgaccaacgggagggcttctcaaggcttagctctccctgagacccagctggcttttacccttgacctgtgtccctagctgaatca

SEQ ID NO: 126066 - DNA, 1856 bp, Homo sapiens
  Payload ID: 4720
  Gene Symbol: DIO1
  Gene Name: deiodinase, iodothyronine, type I
  ENST ID: ENST00000613679
  CDS Start-End: 24-770
gagcttactctggctttgccgagatggggctgccccagccagggctgtggctgaagaggctctgggtgctcttggaggtggctgtgcatgtggtcgtgggtaaagtgcttctgatattgtttccagacagagtcaagcggaacatcctggccatgggcgagaagacgggtatgaccaggaacccccatttcagccacgacaactggataccaacctttttcagcacccagtatttctggttcgtcttgaaggtccgttggcagcgactagaggacacgactgagctagggggtctggccccaaactgcccggtggtccgcctctcaggacagaggtgcaacatttgggagtttatgcaaggtaataggccactggtgctgaattttggaagttgtaccccttcatttatgttcaaatttgaccagttcaagaggcttattgaagactttagttccatagcagattttcttgtcatttacattgaagaagcacatgcatcagatggctgggcttttaagaacaacatggacatcagaaatcaccagaaccttcaggatcgcctgcaggcagcccatctactgctggccaggagcccccagtgccctgtggtggtggacaccatgcagaaccagagcagccagctctacgcagcactgcctgagaggctctacataatccaggagggcaggatcctctacaagggtaaatctggcccttggaactacaacccagaggaagttcgtgctgttctggaaaagctccacagttaatctggacagatacctcaattctaggtgaccaacgggagggcttctcaaggcttagctctccctgagacccagctggcttttacccttgacctgtgtccctagctgaatcactagctcagatttttctgatctaagcaaacaactcccagctgaggaatgcaggccacagcacccaatcaagacaaattgttattatcagaaaatgaagcaacacttgagctgttcaggccagttccctgttgaagaaacagttccctgttgaagaaagtagagcctgacactgctcccactttggagaccacattccctgcacacggtctttgagagagcagttgcactctacaggcacacttctgaggtacggtatctctctccagccactctgataccaagtaattcaagctggcattccttctattagggaaattcattttacccaatttgcatttatggaattgatcatttaagacactaaattagtttttagaaccaattatgggaagaattccagttgttaggaagagatgaggagttggaagaggagggattagaaacaggaggaggcagtcatcctctccttgccaaaagatttaaacctgtccacattggtggtgatgatgggtgagtttccatggtaacacatccctaattttaccagggaagaggagagtactcactttaccatctttgaatatatttcatagaaatctagctctctgtaccctgaaatcttccactagcctcacttttcaacagagtcatctagaagggagggttggcttcccaaaagcataaccttgaccaaaccaaacaataggcaccagcaatgctgtcattcagttatgcagaagctcatttgtgaaattctgtttctctgatttcttcgcaagtctcttaatggtcatttgtgttagattacatcaaactgatggatagccattggtattcatctattttaactctgtgtctttacatatttgtttatgatggccacagcctaaagtacacacggctgtgacttgattcaaaagaaaatgttataagatgcagtaaactaataacagaattattaaaatatatcaggct

SEQ ID NO: 126067 - DNA, 1656 bp, Homo sapiens
  Payload ID: 4720
  Gene Symbol: DIO1
  Gene Name: deiodinase, iodothyronine, type I
  ENST ID: ENST00000617230
  CDS Start-End: 24-506
gagcttactctggctttgccgagatggggctgccccagccagggctgtggctgaagaggctctgggtgctcttggaggtggctgtgcatgtggtcgtgggtaaagtgcttctgatattgtttccagacagagtcaagcggaacatcctggccatgggcgagaagacgggtatgaccaggaacccccatttcagccacgacaactggataccaacctttttcagcacccagtatttctggttcgtcttgaaggtccgttggcagcgactagaggacacgactgagctagggggtctggccccaaactgcccggtggtccgcctctcaggacagaggtgcaacatttgggagtttatgcaaggtaataggccactggtgctgaattttggaagttgtaccccttcatttatgttcaaatttgaccagttcaagaggcttattgaagactttagttccatagcagattttcttgtcatttacattgaagaagcacatgcatcagggtaaatctggcccttggaactacaacccagaggaagttcgtgctgttctggaaaagctccacagttaatctggacagatacctcaattctaggtgaccaacgggagggcttctcaaggcttagctctccctgagacccagctggcttttacccttgacctgtgtccctagctgaatcactagctcagatttttctgatctaagcaaacaactcccagctgaggaatgcaggccacagcacccaatcaagacaaattgttattatcagaaaatgaagcaacacttgagctgttcaggccagttccctgttgaagaaacagttccctgttgaagaaagtagagcctgacactgctcccactttggagaccacattccctgcacacggtctttgagagagcagttgcactctacaggcacacttctgaggtacggtatctctctccagccactctgataccaagtaattcaagctggcattccttctattagggaaattcattttacccaatttgcatttatggaattgatcatttaagacactaaattagtttttagaaccaattatgggaagaattccagttgttaggaagagatgaggagttggaagaggagggattagaaacaggaggaggcagtcatcctctccttgccaaaagatttaaacctgtccacattggtggtgatgatgggtgagtttccatggtaacacatccctaattttaccagggaagaggagagtactcactttaccatctttgaatatatttcatagaaatctagctctctgtaccctgaaatcttccactagcctcacttttcaacagagtcatctagaagggagggttggcttcccaaaagcataaccttgaccaaaccaaacaataggcaccagcaatgctgtcattcagttatgcagaagctcatttgtgaaattctgtttctctgatttcttcgcaagtctcttaatggtcatttgtgttagattacatcaaactgatggatagccattggtattcatctattttaactctgtgtctttacatatttgtttatgatggccacagcctaaagtacacacggctgtgacttgattcaaaagaaaatgttataagatgcagtaaactaataacagaattattaaaatatatcaggct

SEQ ID NO: 126068 - DNA, 796 bp, Homo sapiens
  Payload ID: 4720
  Gene Symbol: DIO1
  Gene Name: deiodinase, iodothyronine, type I
  ENST ID: ENST00000610607
  CDS Start-End: 23-277
agcttactctggctttgccgagatggggctgccccagccagggctgtggctgaagaggctctgggtgctcttggaggtggctgtgcatgtggtcgtgggtaaagtgcttctgatattgtttccagacagagtcaagcggaacatcctggccatgggcgagaagacgggtccgttggcagcgactagaggacacgacgctagggggtctggccccaaactgcccggtggtccgcctctcaggacagaggtgcaacatttgggagtttatgcaaggtaataggccactggtgctgaattttggaagttgtacctgaccttcatttatgttcaaatttgaccagttcaagaggcttattgaagactttagttccatagcagattttcttgtcatttacattgaagaagcacatgcatcagatggctgggcttttaagaacaacatggacatcagaaatcaccagaaccttcaggatcgcctgcaggcagcccatctactgctggccaggagcccccagtgccctgtggtggtggacaccatgcagaaccagagcagccagctctacgcagcactgcctgagaggctctacataatccaggagggcaggatcctctacaagggtaaatctggcccttggaactacaacccagaggaagttcgtgctgttctggaaaagctccacagttaatctggacagatacctcaattctaggtgaccaacgggagggcttctcaaggcttagctctccctgagacccagctggcttttacccttgacctgtgtccctagctgaatca

SEQ ID NO: 126069 - DNA, 6136 bp, Homo sapiens
  Payload ID: 4721
  Gene Symbol: DIO2
  Gene Name: deiodinase, iodothyronine, type II
  Uniprot ID: Q92813
  ENST ID: ENST00000438257
  CDS Start-End: 156-977
gggcttccttttaatttagttttttttccccttctcccccaacccccaaccttcccccttacctcccccaccccctttatcaccaccccccttttaaataagagggtgaaggggaaccagagcgcacaagggaactgactcaggaggcagagaagatgggcatcctcagcgtagacttgctgatcacactgcaaattctgccagtttttttctccaactgcctcttcctggctctctatgactcggtcattctgctcaagcacgtggtgctgctgttgagccgctccaagtccactcgcggagagtggcggcgcatgctgacctcagagggactgcgctgcgtctggaagagcttcctcctcgatgcctacaaacaggtgaaattgggtgaggatgcccccaattccagtgtggtgcatgtctccagtacagaaggaggtgacaacagtggcaatggtacccaggagaagatagctgagggagccacatgccaccttcttgactttgccagccctgagcgcccactagtggtcaactttggctcagccacttgacctcctttcacgagccagctgccagccttccgcaaactggtggaagagttctcctcagtggctgacttcctgctggtctacattgatgaggctcatccatcagatggctgggcgataccgggggactcctctttgtcttttgaggtgaagaagcaccagaaccaggaagatcgatgtgcagcagcccagcagcttctggagcgtttctccttgccgccccagtgccgagttgtggctgaccgcatggacaataacgccaacatagcttacggggtagcctttgaacgtgtgtgcattgtgcagagacagaaaattgcttatctgggaggaaagggccccttctcctacaaccttcaagaagtccggcattggctggagaagaatttcagcaagagatgaaagaaaactagattagctggttaaaggtatgattataagagagcttattgttttaaaaagttatataaaggcaaggaaattaagaactgaatccatatttcaacagagccctattggcttactgaaagacaggagtttatctatcggaagaacatgaatctctaacagctccatacttctttcactactcaaatggcattgggctgagtaagtaaccatatcacctctcttcttagtaaaaagccctatgtgaaaagatcccaagatggagaggaagaaacgctaattcagcatgtgttcattctgcattgagaaggaactgatacatctgatgcatgctttgagaccagaagaaaagacttacctgaataattactacattagggaagctactgtctacgttaagataaagggtattgccttggctctatttggcatggatggagcccagttggaaaattcccaaatattacaacaagtccttgaacccaggccatgtggttagacgttggtgttaaggttagaccttatgttagagtcatttctgatgttccagcttctagccatgtagtgctctcagtcttcataccccagaaattattggtatatttgtagataccgagaatgatccctcagtctgagaggttagaatgatcatctgtaatctgagggttaatttctaggcaggtggagagagtggtaaaaaagaaatgaaattgacaagctaggaaagaggaggcagaaagatttggaaaattcacagagtttcacccttaagctgtagagagtgggtcacatttgttagccacggaaacatagaaacatacacaaggccagaaaaagaagaaggagctcaactaaaagtggcatagagaatacacatataaaaacaatatatttgtcatatgctcctagagaggagaaaggggtgattgaaagaaaaaaaaatacttaaatatttgtaattgtgaggggtttcttttggaaataattacttttgaaccatgtatgtggtatgtatattttcagtgggttaattataccccatgatacctattaaaggaaaaccagtgggtctggtggtgctggtcttttcctccccattcctacaatttctatgtggcccaagtcattcctaatcttggtctctatagcagtgttctctctgaatgctgagctgaagaaattatacgtacatacacacatacatacatacatacaaatatatgtatatatattctcagctgctgcgggaggtaggtaccatggccattcagcacagccttgatttcctcccaaagtaggtgagctatagtgaagaataggtgcaaacaaacaagcttacttccattgcaaaatagaagaagaggaagttagagataattctgatcaatcattttggaggctttgttataaggcaacccccggtatatcatggaatttccattgacatttgaatttggacttggatcttcccttggtcccattagctgaggtttagtaatctaaagtccctatagtatatgattataatgctattttaaaaaatatatatataaaatatttttttctttttaaaatagacactatagttttacccataagtaatatttaaagattatagctcccaaaagaatggaccaaccactttcgtatcataatttctttttggtaaatatgagactattatgaaatcatagtatatgattgtatttaaaggtacaatcaaaggatcttttgtccattccattaataactgaataaaaaataaataaaatggatagaaaaaaactaaagttgaaaatacattcttaaactagttgtctgaattgagaaaagagtgagaactaggtgtgcaagaaccaaacgtattttattttattttttaaatgggagcaacatatcagtcgtgtcaccagctggtatattgtgtaaatattaaagctccattgggactgatttttcatggcaacatcagctttctaatgttctaaattctataaaaaccacccacaaagaaacaaagcaaatttcattatctaatgagttgctggaaaatcatattgagaataattatttcagattcctcagttgttaacttctacattcaaggcttatctctgcccccattgatttttaacctcaaaatggtgttgagatttacgtggaaccctaaagcagtaaaataaaaaacctggttgcagcacattcacactgttgtccttaaaattccccttttttctctatgtacgataaagtaacagtatgtcagataagccggtggggggatgagattaggctgaggcagtgctagtcaactggggaaaaggatgatggaaaaatcacccagttgtgctatatttttaaagaaggaggtcgtttatgtgtgcagacaattctccctgaggttagcccaatggagaaatgaagcagaggaaggaaacatagaaagacatgggctatcagggaggaagatgttcaatagaacatgcaagaatttctggaagaaaggctgtggaagggccaatggagaaaatgaatggacaaagctcaggaatcctacgctatgtagaatgtcttggtgttatcagggttaagcctgtaattatgtaacctatttatcgcaacatgaatttttatgatttcttgtgatgtattcttttatgaaattaacaagaactcattattttgaggtagaggaaaatcaatgctttatctgatatgctgagaaattattagattgccaatactcatgtgcgtttcatgtgttttataaggtttgttcctttgaagaattgtagttcttagtcccacagggaaatgtgtatctatttatatatcatagtataaatctatgatatatttatatcatatataaaagtctgagttctctttcttagtccctaatcatgtttctcccataggctgtgtttacatggagctatcggtttagccttttaagcttcattagcttgtctattattgaaatagtttccaagaaattttagatattatcataacatctgggtctactcaaacacttattgtttgaaagacttatgtcttggacctatcaaaaactgactttatttattgcttagtgaaaatactagtgggatcaacaatgattttcttgaatgggcatgaatggagatgcccgcacagtaatgtagaaatgtttcatacagctattaaaatgtaactgacctccttagaggcagattagtaactgttcctactttgtatagctaagtgacagtcacttaacttacatgactttcttttttcacattgggtctctggtcctgtgtcttcacctcatttatagcacgtctccttgatttttggtagtatcaacttcccagtgatctgttcagttaagttcttctcccgttaaccaggaagtgcttattctctcatcacagtgggaagaatagcctattgtctttcattttgcctgagtgtattttactatttgggctctgaaataaaaattatgaaatatggtgaggtcacatgttggtgctgccttgctgcataaaattctagagggcaggttagagacagtatgtatgccttcgggaaaattcaaaggtggattacaaggtgtcctcagcatgccctatggcctatgtgcgaagcaagaagaattgactgatttacaggacttctctttatgtcaatcttaagaggatggatgaatctggacatttgttccacccgacctctgactgatggtttggaaaataactttaattaggatcatatgaccattgaaaaaggaaaaatgtagactctgacttccgtcccactgaaggattaatgaaaacctttactagcatttagagcttttcagaacatccccactgtcatgtgtctcagcagtggagactgcaagtaaggcttttaattttaggaggtttttttttttttttttttttccctaaatggtatggccaaaagtcagagttaaaatatatatagttagattccaacttcctccttcactctaaaaatagaatccaaacccactcttcatatatgcttccagaatggggcttaagtaccaatctctgctttgcaatgggcacaatcttggtcatgtcctgaggctctctaagaaaagagaggatctaggatgggagagctagaaagttgctaactgggaagaacaaggccctgagggcttggtctaccaatctgggaagatttgaaaacaaacttctcgcaactgaaggaaggctgaaggctgctgcaagtcattgagtgactttaggatgagcaaaacattgggccacttcctaatgccctatgtgtatagtaccagaagcaaggtctcagacttaacagacccagctctgttccaaggtgagtctgaaccaatagaaagcaaacatgtgcagatatccaaacaagactgctcatgcaagtcggggctggctacccgtcttaggcagcaacagcagagctccagggagcttattcaatatttactgagacttcgaagacccagcagatgtttaatgaagtcactattttggctcaaaccctccacttctccccctcccctcaaaaagccaacaggtaaacacataaatgaaagaaacccacagaaggggatgggaaataaagaaaattctctcaagacttctccaggcccatgtcactggtcagcgtggtttttatgtgtattaggattgggggatgtgaagaaataagtatccagtactttataaccaaagcaattaaatgatattgggtagggaatgttggccagttttgtttagttttgcatcacattgtcaccagactcactagcccaagtaatcgggcgcccgaagagggagacagagatgtgcagagttgaccagtgtgcggatgataactactgacgaaagagtcatcgactcagttagtggttggatgtagtcacattagtttgcctctccccatctttgtctccctggcaaggagaatatgcgggacatgatgctaagagtcctgggtaaatgtggtgagaatgcacgcgtgcatatgctacacatatgtgcttctcagttgcagaaaatgaactgctttgggagattatcagtagaaagagtgttatcatattggtgctgagtgctatgtgtgcttatacaatttgttcttgtattttaataaactttgaataaaagaataaa

SEQ ID NO: 126070 - DNA, 6272 bp, Homo sapiens
  Payload ID: 4721
  Gene Symbol: DIO2
  Gene Name: deiodinase, iodothyronine, type II
  ENST ID: ENST00000422005
  CDS Start-End: 50-487
tgaaggggaaccagagcgcacaagggaactgactcaggaggcagagaagatgggcatcctcagcgtagacttgctgatcacactgcaaattctgccagtttttttctccaactgcctcttcctggctctctatgactcggtcattctgctcaagcacgtggtgctgctgttgagccgctccaagtccactcgcggagagtggcggcgcatgctgacctcagagggactgcgctgcgtctggaagagcttcctcctcgatgcctacaaacagctaaattgtcctccatcaggttttagcaaagatggacacattttactagtatatgaagcttataaaagcagactactggtctactcacatttggatttatggatgactgacagtgttgtacttactctaaatttcccaaggcaaattagtctgtgttttggaaagaattctgcagctgaactatacattgtttctaagaaggagaaggtgccttaactttccaagaaaatttactgcaggtgaaattgggtgaggatgcccccaattccagtgtggtgcatgtctccagtacagaaggaggtgacaacagtggcaatggtacccaggagaagatagctgagggagccacatgccaccttcttgactttgccagccctgagcgcccactagtggtcaactttggctcagccacttgacctcctttcacgagccagctgccagccttccgcaaactggtggaagagttctcctcagtggctgacttcctgctggtctacattgatgaggctcatccatcagatggctgggcgataccgggggactcctctttgtcttttgaggtgaagaagcaccagaaccaggaagatcgatgtgcagcagcccagcagcttctggagcgtttctccttgccgccccagtgccgagttgtggctgaccgcatggacaataacgccaacatagcttacggggtagcctttgaacgtgtgtgcattgtgcagagacagaaaattgcttatctgggaggaaagggccccttctcctacaaccttcaagaagtccggcattggctggagaagaatttcagcaagagatgaaagaaaactagattagctggttaaaggtatgattataagagagcttattgttttaaaaagttatataaaggcaaggaaattaagaactgaatccatatttcaacagagccctattggcttactgaaagacaggagtttatctatcggaagaacatgaatctctaacagctccatacttctttcactactcaaatggcattgggctgagtaagtaaccatatcacctctcttcttagtaaaaagccctatgtgaaaagatcccaagatggagaggaagaaacgctaattcagcatgtgttcattctgcattgagaaggaactgatacatctgatgcatgctttgagaccagaagaaaagacttacctgaataattactacattagggaagctactgtctacgttaagataaagggtattgccttggctctatttggcatggatggagcccagttggaaaattcccaaatattacaacaagtccttgaacccaggccatgtggttagacgttggtgttaaggttagaccttatgttagagtcatttctgatgttccagcttctagccatgtagtgctctcagtcttcataccccagaaattattggtatatttgtagataccgagaatgatccctcagtctgagaggttagaatgatcatctgtaatctgagggttaatttctaggcaggtggagagagtggtaaaaaagaaatgaaattgacaagctaggaaagaggaggcagaaagatttggaaaattcacagagtttcacccttaagctgtagagagtgggtcacatttgttagccacggaaacatagaaacatacacaaggccagaaaaagaagaaggagctcaactaaaagtggcatagagaatacacatataaaaacaatatatttgtcatatgctcctagagaggagaaaggggtgattgaaagaaaaaaaaatacttaaatatttgtaattgtgaggggtttcttttggaaataattacttttgaaccatgtatgtggtatgtatattttcagtgggttaattataccccatgatacctattaaaggaaaaccagtgggtctggtggtgctggtcttttcctccccattcctacaatttctatgtggcccaagtcattcctaatcttggtctctatagcagtgttctctctgaatgctgagctgaagaaattatacgtacatacacacatacatacatacatacaaatatatgtatatatattctcagctgctgcgggaggtaggtaccatggccattcagcacagccttgatttcctcccaaagtaggtgagctatagtgaagaataggtgcaaacaaacaagcttacttccattgcaaaatagaagaagaggaagttagagataattctgatcaatcattttggaggctttgttataaggcaacccccggtatatcatggaatttccattgacatttgaatttggacttggatcttcccttggtcccattagctgaggtttagtaatctaaagtccctatagtatatgattataatgctattttaaaaaatatatatataaaatatttttttctttttaaaatagacactatagttttacccataagtaatatttaaagattatagctcccaaaagaatggaccaaccactttcgtatcataatttctttttggtaaatatgagactattatgaaatcatagtatatgattgtatttaaaggtacaatcaaaggatcttttgtccattccattaataactgaataaaaaataaataaaatggatagaaaaaaactaaagttgaaaatacattcttaaactagttgtctgaattgagaaaagagtgagaactaggtgtgcaagaaccaaacgtattttattttattttttaaatgggagcaacatatcagtcgtgtcaccagctggtatattgtgtaaatattaaagctccattgggactgatttttcatggcaacatcagctttctaatgttctaaattctataaaaaccacccacaaagaaacaaagcaaatttcattatctaatgagttgctggaaaatcatattgagaataattatttcagattcctcagttgttaacttctacattcaaggcttatctctgcccccattgatttttaacctcaaaatggtgttgagatttacgtggaaccctaaagcagtaaaataaaaaacctggttgcagcacattcacactgttgtccttaaaattccccttttttctctatgtacgataaagtaacagtatgtcagataagccggtggggggatgagattaggctgaggcagtgctagtcaactggggaaaaggatgatggaaaaatcacccagttgtgctatatttttaaagaaggaggtcgtttatgtgtgcagacaattctccctgaggttagcccaatggagaaatgaagcagaggaaggaaacatagaaagacatgggctatcagggaggaagatgttcaatagaacatgcaagaatttctggaagaaaggctgtggaagggccaatggagaaaatgaatggacaaagctcaggaatcctacgctatgtagaatgtcttggtgttatcagggttaagcctgtaattatgtaacctatttatcgcaacatgaatttttatgatttcttgtgatgtattcttttatgaaattaacaagaactcattattttgaggtagaggaaaatcaatgctttatctgatatgctgagaaattattagattgccaatactcatgtgcgtttcatgtgttttataaggtttgttcctttgaagaattgtagttcttagtcccacagggaaatgtgtatctatttatatatcatagtataaatctatgatatatttatatcatatataaaagtctgagttctctttcttagtccctaatcatgtttctcccataggctgtgtttacatggagctatcggtttagccttttaagcttcattagcttgtctattattgaaatagtttccaagaaattttagatattatcataacatctgggtctactcaaacacttattgtttgaaagacttatgtcttggacctatcaaaaactgactttatttattgcttagtgaaaatactagtgggatcaacaatgattttcttgaatgggcatgaatggagatgcccgcacagtaatgtagaaatgtttcatacagctattaaaatgtaactgacctccttagaggcagattagtaactgttcctactttgtatagctaagtgacagtcacttaacttacatgactttcttttttcacattgggtctctggtcctgtgtcttcacctcatttatagcacgtctccttgatttttggtagtatcaacttcccagtgatctgttcagttaagttcttctcccgttaaccaggaagtgcttattctctcatcacagtgggaagaatagcctattgtctttcattttgcctgagtgtattttactatttgggctctgaaataaaaattatgaaatatggtgaggtcacatgttggtgctgccttgctgcataaaattctagagggcaggttagagacagtatgtatgccttcgggaaaattcaaaggtggattacaaggtgtcctcagcatgccctatggcctatgtgcgaagcaagaagaattgactgatttacaggacttctctttatgtcaatcttaagaggatggatgaatctggacatttgttccacccgacctctgactgatggtttggaaaataactttaattaggatcatatgaccattgaaaaaggaaaaatgtagactctgacttccgtcccactgaaggattaatgaaaacctttactagcatttagagcttttcagaacatccccactgtcatgtgtctcagcagtggagactgcaagtaaggcttttaattttaggaggtttttttttttttttttttttccctaaatggtatggccaaaagtcagagttaaaatatatatagttagattccaacttcctccttcactctaaaaatagaatccaaacccactcttcatatatgcttccagaatggggcttaagtaccaatctctgctttgcaatgggcacaatcttggtcatgtcctgaggctctctaagaaaagagaggatctaggatgggagagctagaaagttgctaactgggaagaacaaggccctgagggcttggtctaccaatctgggaagatttgaaaacaaacttctcgcaactgaaggaaggctgaaggctgctgcaagtcattgagtgactttaggatgagcaaaacattgggccacttcctaatgccctatgtgtatagtaccagaagcaaggtctcagacttaacagacccagctctgttccaaggtgagtctgaaccaatagaaagcaaacatgtgcagatatccaaacaagactgctcatgcaagtcggggctggctacccgtcttaggcagcaacagcagagctccagggagcttattcaatatttactgagacttcgaagacccagcagatgtttaatgaagtcactattttggctcaaaccctccacttctccccctcccctcaaaaagccaacaggtaaacacataaatgaaagaaacccacagaaggggatgggaaataaagaaaattctctcaagacttctccaggcccatgtcactggtcagcgtggtttttatgtgtattaggattgggggatgtgaagaaataagtatccagtactttataaccaaagcaattaaatgatattgggtagggaatgttggccagttttgtttagttttgcatcacattgtcaccagactcactagcccaagtaatcgggcgcccgaagagggagacagagatgtgcagagttgaccagtgtgcggatgataactactgacgaaagagtcatcgactcagttagtggttggatgtagtcacattagtttgcctctccccatctttgtctccctggcaaggagaatatgcgggacatgatgctaagagtcctgggtaaatgtggtgagaatgcacgcgtgcatatgctacacatatgtgcttctcagttgcagaaaatgaactgctttgggagattatcagtagaaagagtgttatcatattggtgctgagtgctatgtgtgcttatacaatttgttcttgtattttaataaactttgaataaaagaataaagct

SEQ ID NO: 126071 - DNA, 517 bp, Homo sapiens
  Payload ID: 4721
  Gene Symbol: DIO2
  Gene Name: deiodinase, iodothyronine, type II
  ENST ID: ENST00000557125
  CDS Start-End: 1-171
atgggcatcctcagcgtagacttgctgatcacactgcaaattctgccaccttccgcaaactggtggaagagttctcctcagtggctgacttcctgctggtctacattgatgaggctcatccatcagatggctgggcgataccgggggactcctctttgtcttttgaggtgaagaagcaccagaaccaggaagatcgatgtgcagcagcccagcagcttctggagcgtttctccttgccgccccagtgccgagttgtggctgaccgcatggacaataacgccaacatagcttacggggtagcctttgaacgtgtgtgcattgtgcagagacagaaaattgcttatctgggaggaaagggccccttctcctacaaccttcaagaagtccggcattggctggagaagaatttcagcaagagatgaaagaaaactagattagctggttaaaggtatgattataagagagcttattgttttaaaaagttatataaaggcaaggaaattaagaactgaatcca

SEQ ID NO: 126072 - DNA, 776 bp, Homo sapiens
  Payload ID: 4721
  Gene Symbol: DIO2
  Gene Name: deiodinase, iodothyronine, type II
  ENST ID: ENST00000555844
  CDS Start-End: 1-112
catgctgacctcagagggactgcgctgcgtctggaagagcttcctcctcgatgcctacaaacagctaaattgtcctccatcaggttttagcaaagatggacacattttatgactagtatatgaagcttataaaagcagactactggtctactcacatttggatttatggatgactgacagtgttgtacttactctaaatttcccaaggcaaattagtctgtgttttggaaagaattctgcagctgaactatacattgtttctaagaaggagaaggtgccttaactttccaagaaaatttactgcaggtgaaattgggtgaggatgcccccaattccagtgtggtgcatgtctccagtacagaaggaggtgacaacagtggcaatggtacccaggagaagatagctgagggagccacatgccaccttcttgactttgccagccctgagcgcccactagtggtcaactttggctcagccacttgacctcctttcacgagccagctgccagccttccgcaaactggtggaagagttctcctcagtggctgacttcctgctggtctacattgatgaggctcatccatcagatggctgggcgataccgggggactcctctttgtcttttgaggtgaagaagcaccagaaccaggaagatcgatgtgcagcagcccagcagcttctggagcgtttctccttgccgccccagtgccgagttgtggctgaccgcatggacaataacgccaacatagcttacggggtagcctttgaacgtgtgtg

SEQ ID NO: 126073 - DNA, 1049 bp, Homo sapiens
  Payload ID: 4721
  Gene Symbol: DIO2
  Gene Name: deiodinase, iodothyronine, type II
  ENST ID: ENST00000555750
  CDS Start-End: 29-958
aagggaactgactcaggaggcagagaagatgggcatcctcagcgtagacttgctgatcacactgcaaattctgccagtttttttctccaactgcctcttcctggctctctatgactcggtcattctgctcaagcacgtggtgctgctgttgagccgctccaagtccactcgcggagagtggcggcgcatgctgacctcagagggactgcgctgcgtctggaagagcttcctcctcgatgcctacaaacagctaaattgtcctccatcaggttttagcaaagatggacacattttatgactagtatatgaagcttataaaagcagactactggtctactcacatttggatttatggatggtgaaattgggtgaggatgcccccaattccagtgtggtgcatgtctccagtacagaaggaggtgacaacagtggcaatggtacccaggagaagatagctgagggagccacatgccaccttcttgactttgccagccctgagcgcccactagtggtcaactttggctcagccacttgacctcctttcacgagccagctgccagccttccgcaaactggtggaagagttctcctcagtggctgacttcctgctggtctacattgatgaggctcatccatcagatggctgggcgataccgggggactcctctttgtcttttgaggtgaagaagcaccagaaccaggaagatcgatgtgcagcagcccagcagcttctggagcgtttctccttgccgccccagtgccgagttgtggctgaccgcatggacaataacgccaacatagcttacggggtagcctttgaacgtgtgtgcattgtgcagagacagaaaattgcttatctgggaggaaagggccccttctcctacaaccttcaagaagtccggcattggctggagaagaatttcagcaagagatgaaagaaaactagattagctggttaaaggtatgattataagagagcttattgttttaaaaagttatataaaggcaaggaaattaagaactgaatccatatttcaacagagccctatt

SEQ ID NO: 126074 - DNA, 569 bp, Homo sapiens
  Payload ID: 4721
  Gene Symbol: DIO2
  Gene Name: deiodinase, iodothyronine, type II
  ENST ID: ENST00000554188
  CDS Start-End: 406-569
aaagtgcttgcaattgcatagagcaaagagcatgctgaacagtgatgttccagtttaaaaggacagagctgcaaacaaaggactttggacttgggccggaactacacatcagctctcctgggcctctagcttgccaactacggacactgtgacttttcagccatcacaattgttaggtagcctggaaaaaaaagagaagcaacagttcctgagggaagaatgcattaacaactcggatgggtgctgtctgccagcactgcagaggaacctacggagagggctgctgggagagaatgctcatacctcccaaggcgtcagcctgccctcccgcccccaagttgctttgctcaagagggtgaaggggaaccagagcgcacaagggaactgactcaggaggcagagaagatgggcatcctcagcgtagacttgctgatcacactgcaaattctgccagtttttttctccaactgcctcttcctggctctctatgactcggtcattctgctcaagcacgtggtgctgctgttgagccgctccaagtccactcgcggagagtggcggcgcatgct

SEQ ID NO: 126075 - DNA, 491 bp, Homo sapiens
  Payload ID: 4721
  Gene Symbol: DIO2
  Gene Name: deiodinase, iodothyronine, type II
  ENST ID: ENST00000553594
  CDS Start-End: 474-491
gaggagcagctggttgatccaggagagacagggaggcgctgagatgagatgagctctctcccttatgtggagaagtccttttaggaatctgccatgtttaaatgactttggacttgggccggaactacacatcagctctcctgggcctctagcttgccaactacggacactgtgacttttcagccatcacaattgttatttagggagaaagaagagattgagtcacagtttcagaaaagaaagggtagcctggaaaaaaaagagaagcaacagttcctgagggaagaatgcattaacaactcggatgggtgctgtctgccagcactgcagaggaacctacggagagggctgctgggagagaatgctcatacctcccaaggcgtcagcctgccctcccgcccccaagttgctttgctcaagagggtgaaggggaaccagagcgcacaagggaactgactcaggaggcagagaagatgggcatcctcagcgta

SEQ ID NO: 126076 - DNA, 417 bp, Homo sapiens
  Payload ID: 4721
  Gene Symbol: DIO2
  Gene Name: deiodinase, iodothyronine, type II
  ENST ID: ENST00000553968
  CDS Start-End: 399-417
gcagagagaggcactttgcaccacagacagatagcaagaagggaaagacagagagtgagaaaaaagaggagtcagtcgctcctggggaagggagagagtgagactgggagaaagagaagcacagaaagtgtgtgtaaaacggagtaaagaaagaaaaaaaaaaaactacccttaaagcacatttaaaaaaaaaaaaaactctggcaattcaagaaagaaacaggctacgtttaaagagcatagagacaatgaaaggctaaagaaaattttaaaatctctgccacagtctcataggtgcttggaaatgaaagtagaactgcctgtctttaacggactctgacagagagggtgaaggggaaccagagcgcacaagggaactgactcaggaggcagagaagatgggcatcctcagcgtag

SEQ ID NO: 126077 - DNA, 6367 bp, Homo sapiens
  Payload ID: 4721
  Gene Symbol: DIO2
  Gene Name: deiodinase, iodothyronine, type II
  Uniprot ID: Q92813
  ENST ID: ENST00000557010
  CDS Start-End: 387-1208
agactggtctagcctcccagcctacatctttcttcagtgctggatgcttcctgccctcaaacatcggactccaagttcttcagttttgagactcagactgactgtccttgctcctcaagcttgcagacagcctattgtgggacgttgtgatcattaggtagcctggaaaaaaaagagaagcaacagttcctgagggaagaatgcattaacaactcggatgggtgctgtctgccagcactgcagaggaacctacggagagggctgctgggagagaatgctcatacctcccaaggcgtcagcctgccctcccgcccccaagttgctttgctcaagagggtgaaggggaaccagagcgcacaagggaactgactcaggaggcagagaagatgggcatcctcagcgtagacttgctgatcacactgcaaattctgccagtttttttctccaactgcctcttcctggctctctatgactcggtcattctgctcaagcacgtggtgctgctgttgagccgctccaagtccactcgcggagagtggcggcgcatgctgacctcagagggactgcgctgcgtctggaagagcttcctcctcgatgcctacaaacaggtgaaattgggtgaggatgcccccaattccagtgtggtgcatgtctccagtacagaaggaggtgacaacagtggcaatggtacccaggagaagatagctgagggagccacatgccaccttcttgactttgccagccctgagcgcccactagtggtcaactttggctcagccacttgacctcctttcacgagccagctgccagccttccgcaaactggtggaagagttctcctcagtggctgacttcctgctggtctacattgatgaggctcatccatcagatggctgggcgataccgggggactcctctttgtcttttgaggtgaagaagcaccagaaccaggaagatcgatgtgcagcagcccagcagcttctggagcgtttctccttgccgccccagtgccgagttgtggctgaccgcatggacaataacgccaacatagcttacggggtagcctttgaacgtgtgtgcattgtgcagagacagaaaattgcttatctgggaggaaagggccccttctcctacaaccttcaagaagtccggcattggctggagaagaatttcagcaagagatgaaagaaaactagattagctggttaaaggtatgattataagagagcttattgttttaaaaagttatataaaggcaaggaaattaagaactgaatccatatttcaacagagccctattggcttactgaaagacaggagtttatctatcggaagaacatgaatctctaacagctccatacttctttcactactcaaatggcattgggctgagtaagtaaccatatcacctctcttcttagtaaaaagccctatgtgaaaagatcccaagatggagaggaagaaacgctaattcagcatgtgttcattctgcattgagaaggaactgatacatctgatgcatgctttgagaccagaagaaaagacttacctgaataattactacattagggaagctactgtctacgttaagataaagggtattgccttggctctatttggcatggatggagcccagttggaaaattcccaaatattacaacaagtccttgaacccaggccatgtggttagacgttggtgttaaggttagaccttatgttagagtcatttctgatgttccagcttctagccatgtagtgctctcagtcttcataccccagaaattattggtatatttgtagataccgagaatgatccctcagtctgagaggttagaatgatcatctgtaatctgagggttaatttctaggcaggtggagagagtggtaaaaaagaaatgaaattgacaagctaggaaagaggaggcagaaagatttggaaaattcacagagtttcacccttaagctgtagagagtgggtcacatttgttagccacggaaacatagaaacatacacaaggccagaaaaagaagaaggagctcaactaaaagtggcatagagaatacacatataaaaacaatatatttgtcatatgctcctagagaggagaaaggggtgattgaaagaaaaaaaaatacttaaatatttgtaattgtgaggggtttcttttggaaataattacttttgaaccatgtatgtggtatgtatattttcagtgggttaattataccccatgatacctattaaaggaaaaccagtgggtctggtggtgctggtcttttcctccccattcctacaatttctatgtggcccaagtcattcctaatcttggtctctatagcagtgttctctctgaatgctgagctgaagaaattatacgtacatacacacatacatacatacatacaaatatatgtatatatattctcagctgctgcgggaggtaggtaccatggccattcagcacagccttgatttcctcccaaagtaggtgagctatagtgaagaataggtgcaaacaaacaagcttacttccattgcaaaatagaagaagaggaagttagagataattctgatcaatcattttggaggctttgttataaggcaacccccggtatatcatggaatttccattgacatttgaatttggacttggatcttcccttggtcccattagctgaggtttagtaatctaaagtccctatagtatatgattataatgctattttaaaaaatatatatataaaatatttttttctttttaaaatagacactatagttttacccataagtaatatttaaagattatagctcccaaaagaatggaccaaccactttcgtatcataatttctttttggtaaatatgagactattatgaaatcatagtatatgattgtatttaaaggtacaatcaaaggatcttttgtccattccattaataactgaataaaaaataaataaaatggatagaaaaaaactaaagttgaaaatacattcttaaactagttgtctgaattgagaaaagagtgagaactaggtgtgcaagaaccaaacgtattttattttattttttaaatgggagcaacatatcagtcgtgtcaccagctggtatattgtgtaaatattaaagctccattgggactgatttttcatggcaacatcagctttctaatgttctaaattctataaaaaccacccacaaagaaacaaagcaaatttcattatctaatgagttgctggaaaatcatattgagaataattatttcagattcctcagttgttaacttctacattcaaggcttatctctgcccccattgatttttaacctcaaaatggtgttgagatttacgtggaaccctaaagcagtaaaataaaaaacctggttgcagcacattcacactgttgtccttaaaattccccttttttctctatgtacgataaagtaacagtatgtcagataagccggtggggggatgagattaggctgaggcagtgctagtcaactggggaaaaggatgatggaaaaatcacccagttgtgctatatttttaaagaaggaggtcgtttatgtgtgcagacaattctccctgaggttagcccaatggagaaatgaagcagaggaaggaaacatagaaagacatgggctatcagggaggaagatgttcaatagaacatgcaagaatttctggaagaaaggctgtggaagggccaatggagaaaatgaatggacaaagctcaggaatcctacgctatgtagaatgtcttggtgttatcagggttaagcctgtaattatgtaacctatttatcgcaacatgaatttttatgatttcttgtgatgtattcttttatgaaattaacaagaactcattattttgaggtagaggaaaatcaatgctttatctgatatgctgagaaattattagattgccaatactcatgtgcgtttcatgtgttttataaggtttgttcctttgaagaattgtagttcttagtcccacagggaaatgtgtatctatttatatatcatagtataaatctatgatatatttatatcatatataaaagtctgagttctctttcttagtccctaatcatgtttctcccataggctgtgtttacatggagctatcggtttagccttttaagcttcattagcttgtctattattgaaatagtttccaagaaattttagatattatcataacatctgggtctactcaaacacttattgtttgaaagacttatgtcttggacctatcaaaaactgactttatttattgcttagtgaaaatactagtgggatcaacaatgattttcttgaatgggcatgaatggagatgcccgcacagtaatgtagaaatgtttcatacagctattaaaatgtaactgacctccttagaggcagattagtaactgttcctactttgtatagctaagtgacagtcacttaacttacatgactttcttttttcacattgggtctctggtcctgtgtcttcacctcatttatagcacgtctccttgatttttggtagtatcaacttcccagtgatctgttcagttaagttcttctcccgttaaccaggaagtgcttattctctcatcacagtgggaagaatagcctattgtctttcattttgcctgagtgtattttactatttgggctctgaaataaaaattatgaaatatggtgaggtcacatgttggtgctgccttgctgcataaaattctagagggcaggttagagacagtatgtatgccttcgggaaaattcaaaggtggattacaaggtgtcctcagcatgccctatggcctatgtgcgaagcaagaagaattgactgatttacaggacttctctttatgtcaatcttaagaggatggatgaatctggacatttgttccacccgacctctgactgatggtttggaaaataactttaattaggatcatatgaccattgaaaaaggaaaaatgtagactctgacttccgtcccactgaaggattaatgaaaacctttactagcatttagagcttttcagaacatccccactgtcatgtgtctcagcagtggagactgcaagtaaggcttttaattttaggaggtttttttttttttttttttttccctaaatggtatggccaaaagtcagagttaaaatatatatagttagattccaacttcctccttcactctaaaaatagaatccaaacccactcttcatatatgcttccagaatggggcttaagtaccaatctctgctttgcaatgggcacaatcttggtcatgtcctgaggctctctaagaaaagagaggatctaggatgggagagctagaaagttgctaactgggaagaacaaggccctgagggcttggtctaccaatctgggaagatttgaaaacaaacttctcgcaactgaaggaaggctgaaggctgctgcaagtcattgagtgactttaggatgagcaaaacattgggccacttcctaatgccctatgtgtatagtaccagaagcaaggtctcagacttaacagacccagctctgttccaaggtgagtctgaaccaatagaaagcaaacatgtgcagatatccaaacaagactgctcatgcaagtcggggctggctacccgtcttaggcagcaacagcagagctccagggagcttattcaatatttactgagacttcgaagacccagcagatgtttaatgaagtcactattttggctcaaaccctccacttctccccctcccctcaaaaagccaacaggtaaacacataaatgaaagaaacccacagaaggggatgggaaataaagaaaattctctcaagacttctccaggcccatgtcactggtcagcgtggtttttatgtgtattaggattgggggatgtgaagaaataagtatccagtactttataaccaaagcaattaaatgatattgggtagggaatgttggccagttttgtttagttttgcatcacattgtcaccagactcactagcccaagtaatcgggcgcccgaagagggagacagagatgtgcagagttgaccagtgtgcggatgataactactgacgaaagagtcatcgactcagttagtggttggatgtagtcacattagtttgcctctccccatctttgtctccctggcaaggagaatatgcgggacatgatgctaagagtcctgggtaaatgtggtgagaatgcacgcgtgcatatgctacacatatgtgcttctcagttgcagaaaatgaactgctttgggagattatcagtagaaagagtgttatcatattggtgctgagtgctatgtgtgcttatacaatttgttcttgtattttaataaactttgaataaaagaataaa

SEQ ID NO: 126078 - DNA, 984 bp, Homo sapiens
  Payload ID: 4721
  Gene Symbol: DIO2
  Gene Name: deiodinase, iodothyronine, type II
  ENST ID: ENST00000556811
  CDS Start-End: 1-175
catgctgacctcagagggactgcgctgcgtctggaagagcttcctcctcgatgcctacaaacagactgacagtgttgtacttactctaaatttcccaaggcaaattagtctgtgttttggaaagaattctgcagctgaactatacattgtttctaagaaggagaaggtgccttaactttccaagaaaatttactgcaggtgaaattgggtgaggatgcccccaattccagtgtggtgcatgtctccagtacagaaggaggtgacaacagtggcaatggtacccaggagaagatagctgagggagccacatgccaccttcttgactttgccagccctgagcgcccactagtggtcaactttggctcagccacttgacctcctttcacgagccagctgccagccttccgcaaactggtggaagagttctcctcagtggctgacttcctgctggtctacattgatgaggctcatccatcagatggctgggcgataccgggggactcctctttgtcttttgaggtgaagaagcaccagaaccaggaagatcgatgtgcagcagcccagcagcttctggagcgtttctccttgccgccccagtgccgagttgtggctgaccgcatggacaataacgccaacatagcttacggggtagcctttgaacgtgtgtgcattgtgcagagacagaaaattgcttatctgggaggaaagggccccttctcctacaaccttcaagaagtccggcattggctggagaagaatttcagcaagagatgaaagaaaactagattagctggttaaaggtatgattataagagagcttattgttttaaaaagttatataaaggcaaggaaattaagaactgaatccatatttcaacagagccctattggcttactgaaagacaggagtttatctatcggaagaacatgaatctctaacagctccatacttctttcactactcaaatggcattgggctgagta

SEQ ID NO: 126079 - DNA, 2102 bp, Homo sapiens
  Payload ID: 4722
  Gene Symbol: DIO3
  Gene Name: deiodinase, iodothyronine, type III
  Uniprot ID: P55073
  ENST ID: ENST00000510508
  CDS Start-End: 147-1061
agcccaagatttctagggcattggccgcgctgctgggtgatccctccgggctcaagttgcaagggggcgggccgggccggaggtggagtctcccgccaattgaagcctccgctataaattgaactccctgcactgctgaagcccagatgcctcgccaggccacgtcgcggttggtggtcggagagggcgaggggtcccagggggcttcggggcctgcagccaccatgctccgctccctgctgcttcactccttgaggctctgcgcccagaccgcctcgtgcctcgtgctcttcccgcgcttcctcggcacggccttcatgctctggcttctcgatttcttgtgtatccgcaagcatttcctgggccgccgccgccgggggcagcccgagcccgaagtggagctcaacagtgaaggcgaggaggtgcctcccgatgacccgcccatctgcgtgtccgacgacaaccgcctgtgcaccctggcgtcgctcaaggcggtgtggcatggccagaagttggatttcttcaagcaggcgcacgagggcggtccggcgcccaactccgaggtggttctgcccgacggcttccagagccagcacatcctcgactacgcgcaagggaaccgcccgctggttctcaatttcggcagctgcacctgaccaccgttcatggcgcgcatgagcgccttccagcgcctggtcactaagtaccagcgcgacgtcgacttcctcatcatctacatcgaggaagcgcacccctccgacggctgggtcaccacggactctccctacatcatcccacagcaccggagcctggaggaccgggtcagcgcagcgagggtactgcagcaaggtgcacccggctgcgctctggtcctcgacaccatggccaactccagcagctcggcctatggcgcctacttcgagcgtctctatgtcatccagagtggcactattatgtaccagggcggccgtggccccgacggctaccaggtctctgagctgcgcacttggttggaacgctatgatgagcaactgcacggcgctcggccccggagggtgtaaacatccaacggacaattgactgaacttggtgggctgggccttcgagccttcgaagcccacgtgcaagcgcctcaaaccaagtcacgcttggcgaggccccagtgacactgatgtgctgagccaccatttcagactgagtctgcaccctcagccacatgaacaatctcccctacctccctgggactctgcttctgtaactgtctcattcacacctgcctggctcactggaaatcctcttttgagcgcgggatatggcttgcccttgtccgtgtgcccccaggactttgcctctacagcattttcttacaccccctccccagcgtgccctcagccaagtgctttggcccggtgcttcccgcagctgcacagagaccttggccacgcccgcgcgccctgagcgcagctgggttccaggagactctcagctcagctgagctagttgcctggcacccacctgtcgcgcgcggagagggggttccctgttgcttttgtgtctgtttcctgtccctggtaggggaagtgatgtcgtggatggggaggggtgggcagggtagtttcccccgcttgttttgggtgcacaggagccccactgctgatgacgaactatctctaactggtcttgaccacgagctagttctgaattgcaggggcctcaaagcagcacctaaaccttgagggggagggtgctctgggtttccgtgaggtaaccaccttaaatgggagggaagttggggtgtctgctttgggaccagaggaagatagcttgagaggcattggcgaggttcgcagcgccccagggagagagaaaaagctgagactcctggggaatgacgttggggtgatggagtccggggaaagagaggtggggggagagcctgaggtccccaagtgaggggagtcctaggcagagctgctgattgtggggctgggaggtggagggcccctgattcgaaggccatttggtgagtgttttgctggaaatatttcctgtatataaacttctttcaatctacaataataaaggcttgaggtaaactgctt

SEQ ID NO: 126080 - DNA, 1441 bp, Homo sapiens
  Payload ID: 4723
  Gene Symbol: DEK
  Gene Name: DEK proto-oncogene
  Uniprot ID: P35659
  ENST ID: ENST00000244776
  CDS Start-End: 167-1192
attttgaaaatcttgttgattctggggagccgagcgcgcggcgcgagcgtcacgccagacagcggcccgcgcgccttctcctcggcgtcggccgccgccgcctcccagaacctcctcgtgccctcgcgtgccaggcccgcggcggccgaaatccgcggttcacagcatgtccgcctcggcccctgctgcggagggggagggaacccccacccagcccgcgtccgagaaagaacccgaaatgcccggtcccagagaggagagcgaggaggaagaggacgaggacgacgaggaggaggaggaggaggaaaaaggaaaggggcagaaactttgtgaaattgagaggatacatttttttctaagtaagaagaaaaccgatgaacttagaaatctacacaaactgctttacaacaggccaggcactgtgtcctcattaaagaagaatgtgggtcagttcagtggctttccatttgaaaaaggaagtgtccaatataaaaagaaggaagaaatgttgaaaaaatttagaaatgccatgttaaagagcatctgtgaggttcttgatttggagagatcaggtgtaaatagtgaactagtgaagaggatcttgaatttcttaatgcatccaaagccttctggcaaaccattgccgaaatctaaaaaaacttgtagcaaaggcagtaaaaaggaacggaacagttctggaatggcaaggaaggctaagcgaaccaaatgtcctgaaattctgtcagatgaatctagtagtgatgaagatgaaaagaaaaacaaggaagagtcttcagatgatgaagataaagaaagtgaagaggagccaccaaaaaagacagccaaaagagaaaaacctaaacagaaagctacttctaaaagtaaaaaatctgtgaaaagtgccaatgttaagaaagcagatagcagcaccaccaagaagaatcaaaacagttccaaaaaagaaagtgagtctgaggatagttcagatgatgaacctttaattaaaaagttgaagaaaccccctacagatgaagagttaaaggaaacaataaagaaattactggccagtgctaacttggaagaagtcacaatgaaacagatttgcaaaaaggtctatgaaaattatcctacttatgatttaactgaaagaaaagatttcataaaaacaactgtaaaagagctaatttcttgagatagaggacagagaagatgactcgttcccatagatttgaagatctgatttataccattataccagcaaagagaatgtatttccttttctaaatccttgttaagcaacgttagtagaacttactgctgacctttttatcttgagtgttatgtgaatttgagtttgctgttttaaattgcatttctatgccatttttagtttaaaatcttgcatggcattaattgttccttgcttttatagttgtatttt

SEQ ID NO: 126081 - DNA, 3427 bp, Homo sapiens
  Payload ID: 4723
  Gene Symbol: DEK
  Gene Name: DEK proto-oncogene
  Uniprot ID: P35659
  ENST ID: ENST00000397239
  CDS Start-End: 449-1576
tccgcgctgccaggccgcctcgcctcccgctcccgcccgccccgcgggacacagcccgcccgcactccggggcccgagcgccgaccacactccaggcgcagccggggagagccccgcgcgcgcatccctccgcccgcggccgaggcgacccctcgcggtcccgcccgcccgagcttcccgcggaggcacccggccgccccgcctcccccgccccgcgcccgccaactcccagctcgcggccctgattggtcgccgcattcccgctctccttcccgaaccgccattttgaaaatcttgttgattctggggagccgagcgcgcggcgcgagcgtcacgccagacagcggcccgcgcgccttctcctcggcgtcggccgccgccgcctcccagaacctcctcgtgccctcgcgtgccaggcccgcggcggccgaaatccgcggttcacagcatgtccgcctcggcccctgctgcggagggggagggaacccccacccagcccgcgtccgagaaagaacccgaaatgcccggtcccagagaggagagcgaggaggaagaggacgaggacgacgaggaggaggaggaggaggaaaaagaaaagagtctcatcgtggaaggcaagagggaaaagaaaaaagtagagaggttgacaatgcaagtctcttccttacagagagagccatttacaattgcacaaggaaaggggcagaaactttgtgaaattgagaggatacatttttttctaagtaagaagaaaaccgatgaacttagaaatctacacaaactgctttacaacaggccaggcactgtgtcctcattaaagaagaatgtgggtcagttcagtggctttccatttgaaaaaggaagtgtccaatataaaaagaaggaagaaatgttgaaaaaatttagaaatgccatgttaaagagcatctgtgaggttcttgatttggagagatcaggtgtaaatagtgaactagtgaagaggatcttgaatttcttaatgcatccaaagccttctggcaaaccattgccgaaatctaaaaaaacttgtagcaaaggcagtaaaaaggaacggaacagttctggaatggcaaggaaggctaagcgaaccaaatgtcctgaaattctgtcagatgaatctagtagtgatgaagatgaaaagaaaaacaaggaagagtcttcagatgatgaagataaagaaagtgaagaggagccaccaaaaaagacagccaaaagagaaaaacctaaacagaaagctacttctaaaagtaaaaaatctgtgaaaagtgccaatgttaagaaagcagatagcagcaccaccaagaagaatcaaaacagttccaaaaaagaaagtgagtctgaggatagttcagatgatgaacctttaattaaaaagttgaagaaaccccctacagatgaagagttaaaggaaacaataaagaaattactggccagtgctaacttggaagaagtcacaatgaaacagatttgcaaaaaggtctatgaaaattatcctacttatgatttaactgaaagaaaagatttcataaaaacaactgtaaaagagctaatttcttgagatagaggacagagaagatgactcgttcccatagatttgaagatctgatttataccattataccagcaaagagaatgtatttccttttctaaatccttgttaagcaacgttagtagaacttactgctgacctttttatcttgagtgttatgtgaatttgagtttgctgttttaaattgcatttctatgccatttttagtttaaaatcttgcatggcattaattgttccttgcttttatagttgtattttgtacattttggatttctttatataaggtcatagattcttgagctgttgtggtttttagtgcacttaatattagcttgcttaaggcatacttttaatcaagtagaacaaaaactattatcaccaggatttatacatacagagattgtagtatttagtatatgaaatattttgaatacacatctctgtcagtgtgaaaattcagcggcagtgtgtccatcatattaaaaatatacaagctacagttgtccagatcactgaattggaacttttctcctgcatgtgtatatatgtcaaattgtcagcatgacaaaagtgacagatgttatttttgtatttttaaaaaacaattggttgtatataaagtttttttatttcttttgtgcagatcactttttaaactcacataggtaggtatctttatagttgtagactatggaatgtcagtgttcagccaaacagtatgatggaacagtgaaagtcaattcagtgatggcaacactgaaggaacagttaccctgctttgcctcgaaagtgtcatcaatttgtaattttagtattaactctgtaaaagtgtctgtaggtacgttttatattatataaggacagaccaaaaatcaacctatcaaagcttcaaaaactttgggaaagggtgggattaagtacaagcacatttggcttacagtaaatgaactgatttttattaactgcttttgcccatataaaatgctgatatttactggaaacctagccagcttcacgattatgactaaagtaccagattataatgccagaatataatgtgcaggcaatcgtggatgtctctgacaaagtgtgtctcaaaaataatatacttttacattaaagaaatttaatgtttctctggagttggggctcttggctttcagagtttggttaatcagtgttgattctagatgatcaacataatggaccactcctgaatgagacttaattttgtctttcaaatttactgtcttaaatcagtttattaaatctgaattttaaaacatgctgtttatgacacaatgacacatttgttgcaccaattaagtgttgaaaaatatctttgcatcatagaacagaaatatataaaaatatatgttgaatgttaacaggtattttcacaggtttgtttcttgatagttactcagacactagggaaaggtaaatacaagtgaacaaaataagcaactaaatgagacctaataattggccttcgattttaaatatttgttcttataaaccttgtcaataaaaataaatctaaatcactggtgttttaagtcacttgcatttgatatcttataggtgtatatagcatttccttatggggaataattctgaaaagggatttttaaattgattcagccctataacctatacaatttggaatactcttttgtggtaatggaccattttcttggagtgacttcacaaaactgaataattaaggttaattttatgaccatttgctataaagaaggtaagtagtcatgcatagagtatttggaagtgaggaaatggagttgttctgtatgaaagttcttgatgagtacgcacacttattaaatggatgtatcacca

SEQ ID NO: 126082 - DNA, 1372 bp, Homo sapiens
  Payload ID: 4723
  Gene Symbol: DEK
  Gene Name: DEK proto-oncogene
  ENST ID: ENST00000505224
  CDS Start-End: 161-1204
aaaatcttgttgattctggggagccgagcgcgcggcgcgagcgtcacgccagacagcggcccgcgcgccttctcctcggcgtcggccgccgccgcctcccagaacctcctcgtgccctcgcgtgccaggcccgcggcggccgaaatccgcggttcacagcatgtccgcctcggcccctgctgcggagggggagggaacccccacccagcccgcgtccgagaaagaacccgaaatgcccggtcccagagaggagagcgaggaggaagaggacgaggacgacgaggaggaggaggaggaggaaaaagaaaagagtctcatcgtggaaggcaagagggaaaagaaaaaagtagagaggatacatttttttctaagtaagaagaaaaccgatgaacttagaaatctacacaaactgctttacaacaggccaggcactgtgtcctcattaaagaagaatgtgggtcagttcagtggctttccatttgaaaaaggaagtgtccaatataaaaagaaggaagaaatgttgaaaaaatttagaaatgccatgttaaagagcatctgtgaggttcttgatttggagagatcaggtgtaaatagtgaactagtgaagaggatcttgaatttcttaatgcatccaaagccttctggcaaaccattgccgaaatctaaaaaaacttgtagcaaaggcagtaaaaaggaacggaacagttctggaatggcaaggaaggctaagcgaaccaaatgtcctgaaattctgtcagatgaatctagtagtgatgaagatgaaaagaaaaacaaggaagagtcttcagatgatgaagataaagaaagtgaagaggagccaccaaaaaagacagccaaaagagaaaaacctaaacagaaagctacttctaaaagtaaaaaatctgtgaaaagtgccaatgttaagaaagcagatagcagcaccaccaagaagaatcaaaacagttccaaaaaagaaagtgagtctgaggatagttcagatgatgaacctttaattaaaaagttgaagaaaccccctacagatgaagagttaaaggaaacaataaagaaattactggccagtgctaacttggaagaagtcacaatgaaacagatttgcaaaaaggtctatgaaaattatcctacttatgatttaactgaaagaaaagatttcataaaaacaactgtaaaagagctaatttcttgagatagaggacagagaagatgactcgttcccatagatttgaagatctgatttataccattataccagcaaagagaatgtatttccttttctaaatccttgttaagcaacatcactttttaaactcacataggtaggtatctttatagttgtagactatggaatgtcagt

SEQ ID NO: 126083 - DNA, 730 bp, Homo sapiens
  Payload ID: 4723
  Gene Symbol: DEK
  Gene Name: DEK proto-oncogene
  ENST ID: ENST00000515770
  CDS Start-End: 1-485
agaatgtgggtcagttcagtggctttccatttgaaaaaggaagtgtccaatataaaaagaaggaagaaatgttgaaaaaatttagaaatgccatgttaaagagcatctgtgaggttcttgatttggagagatcaggtgtaaatagtgaactagtgaagaggatcttgaatttcttaatgcatccaaagccttctggcaaaccattgccgaaatctaaaaaaacttgtagcaaaggcagtaaaaaggaacggaacagttctggaatggcaaggaaggctaagcgaaccaaatgtcctgaaattctgtcagatgaatctagtagtgatgaagatgaaaagaaaaacaaggaagagtcttcagatgatgaagataaagaaagtgaagaggagtacaacctttctgctgtgaggacagaattctggctctgtgacaggcgtcttttttggagaccctccttcaagagccctgctgcctataaatcatagccaccaaaaaagacagccaaaagagaaaaacctaaacagaaagctacttctaaaagtaaaaaatctgtgaaaagtgccaatgttaagaaagcagatagcagcaccaccaagaagaatcaaaacagttccaaaaaagaaagtgagtctgaggatagttcagatgatgaacctttaattaaaaagttgaagaaaccccctacagatgaagagttaaaggaaacaataaagaaattactggccagtgc

SEQ ID NO: 126084 - DNA, 739 bp, Homo sapiens
  Payload ID: 4723
  Gene Symbol: DEK
  Gene Name: DEK proto-oncogene
  ENST ID: ENST00000507591
  CDS Start-End: 1-471
attctgtcagatgaatctagtagtgatgaagatgaaaagaaaaacaaggaagagtcttcagatgatgaagataaagaaagtgaagaggagccaccaaaaaagacagccaaaagagaaaaacctaaacagaaagctacttctaaaagtaaaaaatctgtgaaaagtgccaatgttaagaaagcagatagcagcaccaccaagaagaatcaaaacagttccaaaaaagaaagtgagtctgaggatagttcagatgatgaacctttaattaaaaagttgaagaaaccccctacagatgaagagttaaaggaaacaataaagaaattactggccagtgctaacttggaagaagtcacaatgaaacagatttgcaaaaaggtctatgaaaattatcctacttatgatttaactgaaagaaaagatttcataaaaacaactgtaaaagaggtaaatatttcagtctttcaagtttgactttagaaatataagacaaaagtaattacataaaatactccatatttttcaaaatattcatgtcactaaatatcacatttgatcctcacatttcttcataatagggaaatttatttcttctcattcccactttaaagcttaaaattaaagtttgaacagttagtgataagacctgaactcagattatgatgtggcctcatggtgtacctgggtagctgggcatctcaacgttgctctcacaaatacttgaggaagttcctgtctacga

SEQ ID NO: 126085 - DNA, 661 bp, Homo sapiens
  Payload ID: 4723
  Gene Symbol: DEK
  Gene Name: DEK proto-oncogene
  ENST ID: ENST00000515742
  CDS Start-End: 207-661
gcgcggtttcccgcctcgggaatccctggacggcggcggcggagcgggagggaagccgcccctggggactgagcgctgcggtcccggctatgggaggaggcaactttcagggcaggtgtcccgcgggaagggtagcatcattcagggtggccgcccggtcctgcctgcgggagtaggaggaccgagacgtccggctttcttcccgcatgcaggttcacagcatgtccgcctcggcccctgctgcggagggggagggaacccccacccagcccgcgtccgagaaagaacccgaaatgcccggtcccagagaggagagcgaggaggaagaggacgaggacgacgaggaggaggaggaggaggaaaaagaaaagagtctcatcgtggaaggcaagagggaaaagaaaaaagtagagaggttgacaatgcaagtctcttccttacagagagagccatttacaattgcacaaggaaaggggcagaaactttgtgaaattgagaggatacatttttttctaagtaagaagaaaaccgatgaacttagaaatctacacaaactgctttacaacaggccaggcactgtgtcctcattaaagaagaatgtgggtcagttcagtggctttccatttgaaaaaggaagtgtccaatataaaaagaaggaaga

SEQ ID NO: 126086 - DNA, 580 bp, Homo sapiens
  Payload ID: 4723
  Gene Symbol: DEK
  Gene Name: DEK proto-oncogene
  ENST ID: ENST00000503715
  CDS Start-End: 214-580
attttgaaaatcttgttgattctggggagccgagcgcgcggcgcgagcgtcacgccagacagcggcccgcgcgccttctcctcggcgtcggccgccgccgcctcccagaacctcctcgtgccctcgcgtgccaggcccgcggcggccgaaatccgcgaaaagagtctcatcgtggaaggcaagagggaaaagaaaaaagtagagaggttgacaatgcaagtctcttccttacagagagagccatttacaattgcacaaggaaaggggcagaaactttgtgaaattgagaggatacatttttttctaagtaagaagaaaaccgatgaacttagaaatctacacaaactgctttacaacaggccaggcactgtgtcctcattaaagaagaatgtgggtcagttcagtggctttccatttgaaaaaggaagtgtccaatataaaaagaaggaagaaatgttgaaaaaatttagaaatgccatgttaaagagcatctgtgaggttcttgatttggagagatcaggtgtaaatagtgaactagtgaagaggatcttgaatttcttaatgcatccaaagccttctg

SEQ ID NO: 126087 - DNA, 2382 bp, Homo sapiens
  Payload ID: 4724
  Gene Symbol: DAZ1
  Gene Name: deleted in azoospermia 1
  Uniprot ID: Q9NQZ3
  ENST ID: ENST00000382510
  CDS Start-End: 124-1965
ctttgaccactcgaagccccacagcgtgttccagcggacttcaccagcagacccagaagtggtgggtgaaacactgcctctgttcctccttgagcctgtcgggagctgctgcctgccaccaccatgtctgctgcaaatcctgagactccaaactcaaccatctccagagaggccagcacccagtcttcatcagctgcagctagccaaggctgggtgttaccagaaggcaaaatcgtgccaaacactgtttttgttggtggaattgatgctaggatggatgaaactgagattggaagctgctttggtagatacggttcagtgaaagaagtgaagataatcacgaatcgaactggtgtgtccaaaggctatggatttgtttcgtttgttaatgacgtggatgtccagaagatagtaggatcacagatacatttccatggtaaaaagctgaagctgggccctgcaatcaggaaacaaaagttatgtgctcgtcatgtgcagccacgtcctttggtagttaatcctcctcctccaccacagtttcagaacgtctggcggaatccaaacactgaaacctacctgcagccccaaatcacgccgaatcctgtaactcagcacgttcagtctgctgcaaatcctgagactccaaactcaaccatctccagagaggccagcacccagtcttcatcagctgcagctagccaaggctgggtgttaccagaaggcaaaatcgtgccaaacactgtttttgttggtggaattgatgctaggatggatgaaactgagattggaagctgctttggtagatacggttcagtgaaagaagtgaagataatcacgaatcgaactggtgtgtccaaaggctatggatttgtttcgtttgttaatgacgtggatgtccagaagatagtaggatcacagatacatttccatggtaaaaagctgaagctgggccctgcaatcaggaaacaaaagttatgtgctcgtcatgtgcagccacgtcctttggtagttaatcctcctcctccaccacagtttcagaacgtctggcggaatccaaacactgaaacctacctgcagccccaaatcacgccgaatcctgtaactcagcacgttcagtctgctgcaaatcctgagactccaaactcaaccatctccagagaggccagcacccagtcttcatcagctgcagctagccaaggctgggtgttaccagaaggcaaaatcgtgccaaacactgtttttgttggtggaattgatgctaggatggatgaaactgagattggaagctgctttggtagatacggttcagtgaaagaagtgaagataatcacgaatcgaactggtgtgtccaaaggctatggatttgtttcgtttgttaatgacgtggatgtccagaagatagtaggatcacagatacatttccatggtaaaaagctgaagctgggccctgcaatcaggaaacaaaagttatgtgctcgtcatgtgcagccacgtcctttggtagttaatcctcctcctccaccacagtttcagaacgtctggcggaatccaaacactgaaacctacctgcagccccaaatcacgccgaatcctgtaactcagcacgttcaggcttactctgcttatccacattcaccaggtcaggtcatcactggatgtcagttgcttgtatataattatcaggaatatcctacttatcccgattcagcatttcaggtcaccactggatatcagttgcctgtatataattatcagccatttcctgcttatccaagatcaccatttcaggtcactgctggatatcagttgcctgtatataattatcaggcatttcctgcttatccaaattcaccatttcaagtcgccactggatatcagttccctgtatgtgaaatttgcaaaatactggtattaaagaacgctgcagcttttttatgtcactcaaaggttaatcggagtatctgaaaggaattgtttttataaaaacattgaagtattagttacttgctataaatagatttttatttttgttttttagcctgttatatttccttctgtaaaataaaatatgtccagaagaggcatgttgtttctagattaggtagtgtcctcattttatattgtgaccacacagctagagcaccagagcccttttgctatactcacagtcttgttttcccagcctcttttactagtctttcaggaggtttgctcttagaactggtgatgtaaagaatggaagtagctgtatgagcagttcaaaggccaagccgtggaatggtagcaatgggatataatacctttctaagggaaacatttgtatcagtatcatttgatctgccatggacatgtgtttaaagtggctttctggcccttctttca

SEQ ID NO: 126088 - DNA, 4421 bp, Homo sapiens
  Payload ID: 4724
  Gene Symbol: DAZ1
  Gene Name: deleted in azoospermia 1
  Uniprot ID: Q9NQZ3
  ENST ID: ENST00000405239
  CDS Start-End: 295-2529
gctgccacccattggctcaggccgataccacgcgccccgatacccggcacaggagccacctcccagagccccgcagtccatgcctcagtcggcctgcgctcctcagcctggcggttctacctccgagggttcgcccgcccttggttttccttacaccttagcctttggctcctttgaccactcgaagccccacagcgtgttccagcggacttcaccagcagacccagaagtggtgggtgaaacactgcctctgttcctccttgagcctgtcgggagctgctgcctgccaccaccatgtctgctgcaaatcctgagactccaaactcaaccatctccagagaggccagcacccagtcttcatcagctgcagctagccaaggctgggtgttaccagaaggcaaaatcgtgccaaacactgtttttgttggtggaattgatgctaggatggatgaaactgagattggaagctgctttggtagatacggttcagtgaaagaagtgaagataatcacgaatcgaactggtgtgtccaaaggctatggatttgtttcgtttgttaatgacgtggatgtccagaagatagtaggatcacagatacatttccatggtaaaaagctgaagctgggccctgcaatcaggaaacaaaagttatgtgctcgtcatgtgcagccacgtcctttggtagttaatcctcctcctccaccacagtttcagaacgtctggcggaatccaaacactgaaacctacctgcagccccaaatcacgccgaatcctgtaactcagcacgttcagtctgctgcaaatcctgagactccaaactcaaccatctccagagaggccagcacccagtcttcatcagctgcagctagccaaggctgggtgttaccagaaggcaaaatcgtgccaaacactgtttttgttggtggaattgatgctaggatggatgaaactgagattggaagctgctttggtagatacggttcagtgaaagaagtgaagataatcacgaatcgaactggtgtgtccaaaggctatggatttgtttcgtttgttaatgacgtggatgtccagaagatagtaggatcacagatacatttccatggtaaaaagctgaagctgggccctgcaatcaggaaacaaaagttatgtgctcgtcatgtgcagccacgtcctttggtagttaatcctcctcctccaccacagtttcagaacgtctggcggaatccaaacactgaaacctacctgcagccccaaatcacgccgaatcctgtaactcagcacgttcagtctgctgcaaatcctgagactccaaactcaaccatctccagagaggccagcacccagtcttcatcagctgcagctagccaaggctgggtgttaccagaaggcaaaatcgtgccaaacactgtttttgttggtggaattgatgctaggatggatgaaactgagattggaagctgctttggtagatacggttcagtgaaagaagtgaagataatcacgaatcgaactggtgtgtccaaaggctatggatttgtttcgtttgttaatgacgtggatgtccagaagatagtaggatcacagatacatttccatggtaaaaagctgaagctgggccctgcaatcaggaaacaaaagttatgtgctcgtcatgtgcagccacgtcctttggtagttaatcctcctcctccaccacagtttcagaacgtctggcggaatccaaacactgaaacctacctgcagccccaaatcacgccgaatcctgtaactcagcacgttcaggcttactctgcttatccacattcaccaggtcaggtcatcactggatgtcagttgcttgtatataattatcaggaatatcctacttatcccgattcagcatttcaggtcaccactggatatcagttgcctgtatataattatcagccatttcctgcttatccaagatcaccatttcaggtcactgctggatatcagttgcctgtatataattatcaggcatttcctgcttatccaaattcaccatttcaagtcgccactggatatcagttccctgtatacaattatcagccatttcctgcttatccaagttcaccatttcaggtcactgctggatatcagttgcctgtatataattatcaggcatttcctgcttatccaaattcaccatttcaagtcgccactggatatcagttccctgtatacaattatcaggcatttcctgcttatccaaattcaccagttcaggtcaccactggatatcagttgcctgtatacaattatcaggcatttcctgcttatccaagttcaccatttcaggtcaccactggatatcagttgcctgtatataattatcaggcatttcctgcttatccaaattcagcagttcaggtcaccactggatatcagttccatgtatacaattaccagatgccaccgcagtgccctgttggggagcaaaggagaaatctgtggaccgaagcatacaaatggtggtatcttgtctgtttaatccagagaagagactgataaattccgttgttactcaagatgactgcttcaagggtaaaagagtgcatcgctttagaagaagtttggcagtatttaaatctgttggatcctctcagctatctagtttcatgggaagttgctggttttgaatattaagctaaaagttttccactattacagaaattctgaattttggtaaatcacactgaaactttctgtataacttgtattattagactctctagttttatcttaacactgaaactgttcttcattagatgtttatttagaacctggttctgtgtttaatatatagtttaaagtaacaaataatcgagactgaaagaatgttaagatttatctgcaaggatttttaaaaaattgaaacttgcattttaagtgtttaaaagcaaatactgactttcaaaaaagtttttaaaacctgatttgaaagctaacaattttgatagtctgaacacaagcatttcacttctccaagaagtacctgtgaacagtacaatatttcagtattgagctttgcatttatgatttatctagaaatttacctcaaaagcagaatttttaaaactgcatttttaatcagtggaactcaatgtatagttagctttattgaagtcttatccaaacccagtaaaacagattctaagcaaacagtccaatcagtgagtcataatgtttattcaaagtattttatcttttatctagaatccacatatgtatgtccaatttgattgggatagtagttaggataactaaaattctgggcctaattttttaaagaatccaagacaaactaaactttactgggtatataaccttctcaatgagttaccattcttttttataaaaaaaattgttccttgaaatgctaaacttaatggctgtatgtgaaatttgcaaaatactggtattaaagaacgctgcagcttttttatgtcactcaaaggttaatcggagtatctgaaaggaattgtttttataaaaacattgaagtattagttacttgctataaatagatttttatttttgttttttagcctgttatatttccttctgtaaaataaaatatgtccagaagaggcatgttgtttctagattaggtagtgtcctcattttatattgtgaccacacagctagagcaccagagcccttttgctatactcacagtcttgttttcccagcctcttttactagtctttcaggaggtttgctcttagaactggtgatgtaaagaatggaagtagctgtatgagcagttcaaaggccaagccgtggaatggtagcaatgggatataatacctttctaagggaaacatttgtatcagtatcatttgatctgccatggacatgtgtttaaagtggctttctggcccttctttcaatggcttcttccctaaaacgtggagactctaagttaatgtcgttactatgggccatattactaatgcccactggggtctatgatttctcaaaattttcattcggaatccgaaggatacagtctttaaactttagaattcccaagaaggctttattacacctcagaaattgaaagcaccatgactttgtccattaaaaaattatccatagtttttttagtgcttttaacattccgacatacatcattctgtgattaaatctccagatttctgtaaatgatacctacattctaaagagttaattctaattattccgatatgaccttaaggaaaagtaaaggaataaatttttgtctttgttgaagtatttaatagagtaaggtaaagaagatattaagtccctttcaaaatggaaaattaattctaaactgagaaaaatgttcctactacctattgctgatactgtctttgcataaatgaataaaaataaactttttttcttcaaatgtg

SEQ ID NO: 126089 - DNA, 1846 bp, Homo sapiens
  Payload ID: 4724
  Gene Symbol: DAZ1
  Gene Name: deleted in azoospermia 1
  ENST ID: ENST00000426000
  CDS Start-End: 209-1309
agtcggcctgcgctcctcagcctggcggttctacctccgagggttcgcccgcccttggttttccttacaccttagcctttggctcctttgaccactcgaagccccacagcgtgttccagcggacttcaccagcagacccagaagtggtgggtgaaacactgcctctgttcctccttgagcctgtcgggagctgctgcctgccaccaccatgtctgctgcaaatcctgagactccaaactcaaccatctccagagaggccagcacccagtcttcatcagctgcagctagccaaggctgggtgttaccagaaggcaaaatcgtgccaaacactgtttttgttggtggaattgatgctaggatggatgaaactgagattggaagctgctttggtagatacggttcagtgaaagaagtgaagataatcacgaatcgaactggtgtgtccaaaggctatggatttgtttcgtttgttaatgacgtggatgtccagaagatagtaggatcacagatacatttccatggtaaaaagctgaagctgggccctgcaatcaggaaacaaaagttatgtgctcgtcatgtgcagccacgtcctttggtagttaatcctcctcctccaccacagtttcagaacgtctggcggaatccaaacactgaaacctacctgcagccccaaatcacgccgaatcctgtaactcagcacgttcaggcttactctgcttatccacattcaccaggtcaggtcatcactggatgtcagttgcttgtatataattatcaggaatatcctacttatcccgattcagcatttcaggtcaccactggatatcagttgcctgtatataattatcagccatttcctgcttatccaagatcaccatttcaggtcactgctggatatcagttgcctgtatataattatcagccatttcctgcttatccaagttcaccatttcaggtcactgctggatatcagttgcctgtatataattatcaggcatttcctgcttatccaaattcaccagttcaggtcaccactggatatcagttgcctgtatacaattatcaggcatttcctgcttatccaagttcaccatttcaggtcaccactggatatcagttgcctgtatataattatcaggcatttcctgcttatccaaattcagcagttcaggtcaccactggatatcagttccatgtatacaattaccagatgccaccgcagtgccctgttggggagcaaaggagaaatctgtggaccgaagcatacaaatggtggtatcttgtctgtttaatccagagaagagactgataaattccgttgttactcaagatgactgcttcaagggtaaaagagtgcatcgctttagaagaagtttggcagtatttaaatctgttggatcctctcagctatctagtttcatgggaagttgctggttttgaatattaagctaaaagttttccactattacagaaattctgaattttggtaaatcacactgaaactttctgtataacttgtattattagactctctagttttatcttaacactgaaactgttcttcattagatgtttatttagaacctggttctgtgtttaatatatagtttaaagtaacaaataatcgagactgaaagaatgttaagatttatctgcaaggatttttaaaaaattgaaacttgcattttaagtgtttaaaagcaaatactgactttcaaaaaagtttttaaaacctgatttgaaagctaacaattttgatagtctgaacacaagcatttcacttctccaagaagtacctgtgaacagtacaatatttcagtattgagctttgcatttatgatttatc

SEQ ID NO: 126090 - DNA, 3268 bp, Homo sapiens
  Payload ID: 4724
  Gene Symbol: DAZ1
  Gene Name: deleted in azoospermia 1
  ENST ID: ENST00000540248
  CDS Start-End: 211-1383
tcagtcggcctgcgctcctcagcctggcggttctacctccgagggttcgcccgcccttggttttccttacaccttagcctttggctcctttgaccactcgaagccccacagcgtgttccagcggacttcaccagcagacccagaagtggtgggtgaaacactgcctctgttcctccttgagcctgtcgggagctgctgcctgccaccaccatgtctgctgcaaatcctgagactccaaactcaaccatctccagagaggccagcacccagtcttcatcagctgcagctagccaaggctgggtgttaccagaaggcaaaatcgtgccaaacactgtttttgttggtggaattgatgctaggatggatgaaactgagattggaagctgctttggtagatacggttcagtgaaagaagtgaagataatcacgaatcgaactggtgtgtccaaaggctatggatttgtttcgtttgttaatgacgtggatgtccagaagatagtaggatcacagatacatttccatggtaaaaagctgaagctgggccctgcaatcaggaaacaaaagttatgtgctcgtcatgtgcagccacgtcctttggtagttaatcctcctcctccaccacagtttcagaacgtctggcggaatccaaacactgaaacctacctgcagccccaaatcacgccgaatcctgtaactcagcacgttcaggcttactctgcttatccacattcaccaggtcaggtcatcactggatgtcagttgcttgtatataattatcaggaatatcctacttatcccgattcagcatttcaggtcaccactggatatcagttgcctgtatataattatcagccatttcctgcttatccaagatcaccatttcaggtcactgctggatatcagttgcctgtatataattatcaggcatttcctgcttatccaaattcaccatttcaagtcgccactggatatcagttccctgtatacaattatcagccatttcctgcttatccaagttcaccatttcaggtcactgctggatatcagttgcctgtatataattatcaggcatttcctgcttatccaaattcaccatttcaagtcgccactggatatcagttccctgtatacaattatcaggcatttcctgcttatccaaattcaccagttcaggtcaccactggatatcagttgcctgtatacaattatcaggcatttcctgcttatccaaattcagcagttcaggtcaccactggatatcagttccatgtatacaattaccagatgccaccgcagtgccctgttggggagcaaaggagaaatctgtggaccgaagcatacaaatggtggtatcttgtctgtttaatccagagaagagactgataaattccgttgttactcaagatgactgcttcaagggtaaaagagtgcatcgctttagaagaagtttggcagtatttaaatctgttggatcctctcagctatctagtttcatgggaagttgctggttttgaatattaagctaaaagttttccactattacagaaattctgaattttggtaaatcacactgaaactttctgtataacttgtattattagactctctagttttatcttaacactgaaactgttcttcattagatgtttatttagaacctggttctgtgtttaatatatagtttaaagtaacaaataatcgagactgaaagaatgttaagatttatctgcaaggatttttaaaaaattgaaacttgcattttaagtgtttaaaagcaaatactgactttcaaaaaagtttttaaaacctgatttgaaagctaacaattttgatagtctgaacacaagcatttcacttctccaagaagtacctgtgaacagtacaatatttcagtattgagctttgcatttatgatttatctagaaatttacctcaaaagcagaatttttaaaactgcatttttaatcagtggaactcaatgtatagttagctttattgaagtcttatccaaacccagtaaaacagattctaagcaaacagtccaatcagtgagtcataatgtttattcaaagtattttatcttttatctagaatccacatatgtatgtccaatttgattgggatagtagttaggataactaaaattctgggcctaattttttaaagaatccaagacaaactaaactttactgggtatataaccttctcaatgagttaccattcttttttataaaaaaaattgttccttgaaatgctaaacttaatggctgtatgtgaaatttgcaaaatactggtattaaagaacgctgcagcttttttatgtcactcaaaggttaatcggagtatctgaaaggaattgtttttataaaaacattgaagtattagttacttgctataaatagatttttatttttgttttttagcctgttatatttccttctgtaaaataaaatatgtccagaagaggcatgttgtttctagattaggtagtgtcctcattttatattgtgaccacacagctagagcaccagagcccttttgctatactcacagtcttgttttcccagcctcttttactagtctttcaggaggtttgctcttagaactggtgatgtaaagaatggaagtagctgtatgagcagttcaaaggccaagccgtggaatggtagcaatgggatataatacctttctaagggaaacatttgtatcagtatcatttgatctgccatggacatgtgtttaaagtggctttctggcccttctttcaatggcttcttccctaaaacgtggagactctaagttaatgtcgttactatgggccatattactaatgcccactggggtctatgatttctcaaaattttcattcggaatccgaaggatacagtctttaaactttagaattcccaagaaggctttattacacctcagaaattgaaagcaccatgactttgtccattaaaaaattatccatagtttttttagtgcttttaacattccgacatacatcattctgtgattaaatctccagatttctgtaaatgatacctacattctaaagagttaattctaattattccgatatgaccttaaggaaaagtaaaggaataaatttttgtctttgttgaagtatttaatagagtaaggtaaagaagatattaagtccctttcaaaatggaaaattaattctaaactgagaaaaatgttcctactacctattgctgatactgtctttgcataaatgaataaaaataaactttttttcttc

SEQ ID NO: 126091 - DNA, 1891 bp, Homo sapiens
  Payload ID: 4724
  Gene Symbol: DAZ1
  Gene Name: deleted in azoospermia 1
  ENST ID: ENST00000620725
  CDS Start-End: 188-1648
ctggcggttctacctccgagggttcgcccgcccttggttttccttacaccttagcctttggctcctttgaccactcgaagccccacagcgtgttccagcggacttcaccagcagacccagaagtggtgggtgaaacactgcctctgttcctccttgagcctgtcgggagctgctgcctgccaccaccatgtctgctgcaaatcctgagactccaaactcaaccatctccagagaggccagcacccagtcttcatcagctgcagctagccaaggctgggtgttaccagaaggcaaaatcgtgccaaacactgtttttgttggtggaattgatgctaggatggatgaaactgagattggaagctgctttggtagatacggttcagtgaaagaagtgaagataatcacgaatcgaactggtgtgtccaaaggctatggatttgtttcgtttgttaatgacgtggatgtccagaagatagtaggatcacagatacatttccatggtaaaaagctgaagctgggccctgcaatcaggaaacaaaagttatgtgctcgtcatgtgcagccacgtcctttggtagttaatcctcctcctccaccacagtttcagaacgtctggcggaatccaaacactgaaacctacctgcagccccaaatcacgccgaatcctgtaactcagcacgttcaggcttattctccttatccaaactcaccaggtcaggtcatcactgggtatcagttgcctgtgtataattatcaggcttattctccttatccaaactcaccaggtcaggtcatcactgggtatcagttgcctgtgtataattatcaggcttactctgcttatccacattcaccaggtcaggtcatcactggatgtcagttgcttgtatataattatcaggaatatcctacttatcccgattcagcatttcaggtcaccactggatatcagttgcctgtatataattatcagccatttcctgcttatccaagatcaccatttcaggtcactgctggatatcagttgcctgtatataattatcaggcatttcctgcttatccaaattcaccatttcaagtcgccactggatatcagttccctgtatacaattatcagccatttcctgcttatccaagttcaccatttcaggtcactgctggatatcagttgcctgtatataattatcaggcatttcctgcttatccaaattcaccatttcaagtcgccactggatatcagttccctgtatacaattatcaggcatttcctgcttatccaaattcaccagttcaggtcaccactggatatcagttgcctgtatacaattatcaggcatttcctgcttatccaagttcaccatttcaggtcaccactggatatcagttgcctgtatataattatcaggcatttcctgcttatccaaattcagcagttcaggtcaccactggatatcagttccatgtatacaattaccagacatatcctacttatccaaattcaccaggtcaggtcaccactgggtgtcagttgcctgtatgtaattatcaggtgctaccgcagtggcctgttggggagcaaaagagaaatctgtggaccgaagcatacaaatggtggtatcttgtctgtttaatccagagaagagactgataaattccgttgttactcaagatgactgcttcaagggtaaaagagtgcatcgctttagaagaagtttggcagtatttaaatctgttggatcctctcagctatctagtttcatgggaagttgctggttttgaatattaagctaaaagttttccactattacagaaattctgaattttggtaaatcacactgaaactttctgtataacttgtattattagactctctagttttatcttaacactg

SEQ ID NO: 126092 - DNA, 3277 bp, Homo sapiens
  Payload ID: 4725
  Gene Symbol: DAZ2
  Gene Name: deleted in azoospermia 2
  ENST ID: ENST00000382294
  CDS Start-End: 285-1385
attggctcaggccgataccacgcgccccgatacccggcacaggagccacctcccagagccccgcagtccatgcctcagtcggcctgcgctcctcagcctggcggttctacctccgagggttcgcccgcccttggttttccttacaccttagcctttggctcctttgaccactcgaagccccacagcgtgttccagcggacttcaccagcagacccagaagtggtgggtgaaacactgcctctgttcctccttgagcctgtcgggagctgctgcctgccaccaccatgtctgctgcaaatcctgagactccaaactcaaccatctccagagaggccagcacccagtcttcatcagctgcagctagccaaggctgggtgttaccagaaggcaaaatcgtgccaaacactgtttttgttggtggaattgatgctaggatggatgaaactgagattggaagctgctttggtagatacggttcagtgaaagaagtgaagataatcacgaatcgaactggtgtgtccaaaggctatggatttgtttcgtttgttaatgacgtggatgtccagaagatagtaggatcacagatacatttccatggtaaaaagctgaagctgggccctgcaatcaggaaacaaaagttatgtgctcgtcatgtgcagccacgtcctttggtagttaatcctcctcctccaccacagtttcagaacgtctggcggaatccaaacactgaaacctacctgcagccccaaatcacgccgaatcctgtaactcagcacgttcaggcttattctgcttatccacattcaccaggtcaggtcatcactggatgtcagttgcttgtatataattatcaggaatatcctacttatcccgattcagcatttcaggtcaccactggatatcagttgcctgtatataattatcagccatttcctgcttatccaagttcaccatttcaggtcactgctggatatcagttgcctgtatataattatcaggcatttcctgcttatccaagttcaccatttcaggtcaccactggatatcagttgcctgtatataattatcaggcatttcctgcttatccaagttcaccatttcaggtcaccactggatatcagttgcctgtatataattatcaggcatttcctgcttatccaagttcaccatttcaggtcaccactggatatcagttgcctgtatataattatcaggcatttcctgcttatccaaattcagcagttcaggtcaccactggatatcagttccatgtatacaattaccagatgccaccgcagtgccctgttggggagcaaaggagaaatctgtggaccgaagcatacaaatggtggtatcttgtctgtttaatccagagaagagactgataaattccgttgttactcaagatgactgcttcaagggtaaaagagtgcatcgctttagaagaagtttggcagtatttaaatctgttggatcctctcagctatctagtttcatgggaagttgctggttttgaatattaagctaaaagttttccactattacagaaattctgaattttggtaaatcacactgaaactttctgtataacttgtattattagactctctagttttatcttaacactgaaactgttcttcattagatgtttatttagaacctggttctgtgtttaatatatagtttaaagtaacaaataatcgagactgaaagaatgttaagatttatctgcaaggatttttaaaaaattgaaacttgcattttaagtgtttaaaagcaaatactgactttcaaaaaagtttttaaaacctgatttgaaagctaacaattttgatagtctgaacacaagcatttcacttctccaagaagtacctgtgaacagtacaatatttcagtattgagctttgcatttatgatttatctagaaatttacctcaaaagcagaatttttaaaactgcatttttaatcagtggaactcaatgtatagttagctttattgaagtcttatccaaacccagtaaaacagattctaagcaaacagtccaatcagtgagtcataatgtttattcaaagtattttatcttttatctagaatccacatatgtatgtccaatttgattgggatagtagttaggataactaaaattctgggcctaattttttaaagaatccaagacaaactaaactttactgggtatataaccttctcaatgagttaccattcttttttataaaaaaaattgttccttgaaatgctaaacttaatggctgtatgtgaaatttgcaaaatactggtattaaagaacgctgcagcttttttatgtcactcaaaggttaatcggagtatctgaaaggaattgtttttataaaaacattgaagtattagttacttgctataaatagatttttatttttgttttttagcctgttatatttccttctgtaaaataaaatatgtccagaagaggcatgttgtttctagattaggtagtgtcctcattttatattgtgaccacacagctagagcaccagagcccttttgctatactcacagtcttgttttcccagcctcttttactagtctttcaggaggtttgctcttagaactggtgatgtaaagaatggaagtagctgtatgagcagttcaaaggccaagccgtggaatggtagcaatgggatataatacctttctaagggaaacatttgtatcagtatcatttgatctgccatggacatgtgtttaaagtggctttctggcccttctttcaatggcttcttccctaaaacgtggagactctaagttaatgtcgttactatgggccatattactaatgcccactggggtctatgatttctcaaaattttcattcggaatccgaaggatacagtctttaaactttagaattcccaagaaggctttattacacctcagaaattgaaagcaccatgactttgtccattaaaaaattatccatagtttttttagtgcttttaacattccgacatacatcattctgtgattaaatctccagatttctgtaaatgatacctacattctaaagagttaattctaattattccgatatgaccttaaggaaaagtaaaggaataaatttttgtctttgttgaagtatttaatagagtaaggtaaagaagatattaagtccctttcaaaatggaaaattaattctaaactgagaaaaatgttcctactacctattgctgatactgtctttgcataaatgaataaaaataaactttttttcttcaaatgtg

SEQ ID NO: 126093 - DNA, 3781 bp, Homo sapiens
  Payload ID: 4725
  Gene Symbol: DAZ2
  Gene Name: deleted in azoospermia 2
  Uniprot ID: Q13117
  ENST ID: ENST00000382306
  CDS Start-End: 285-1889
attggctcaggccgataccacgcgccccgatacccggcacaggagccacctcccagagccccgcagtccatgcctcagtcggcctgcgctcctcagcctggcggttctacctccgagggttcgcccgcccttggttttccttacaccttagcctttggctcctttgaccactcgaagccccacagcgtgttccagcggacttcaccagcagacccagaagtggtgggtgaaacactgcctctgttcctccttgagcctgtcgggagctgctgcctgccaccaccatgtctgctgcaaatcctgagactccaaactcaaccatctccagagaggccagcacccagtcttcatcagctgcagctagccaaggctgggtgttaccagaaggcaaaatcgtgccaaacactgtttttgttggtggaattgatgctaggatggatgaaactgagattggaagctgctttggtagatacggttcagtgaaagaagtgaagataatcacgaatcgaactggtgtgtccaaaggctatggatttgtttcgtttgttaatgacgtggatgtccagaagatagtaggatcacagatacatttccatggtaaaaagctgaagctgggccctgcaatcaggaaacaaaagttatgtgctcgtcatgtgcagccacgtcctttggtagttaatcctcctcctccaccacagtttcagaacgtctggcggaatccaaacactgaaacctacctgcagccccaaatcacgccgaatcctgtaactcagcacgttcaggcttattctgcttatccacattcaccaggtcaggtcatcactggatgtcagttgcttgtatataattatcaggaatatcctacttatcccgattcagcatttcaggtcaccactggatatcagttgcctgtatataattatcagccatttcctgcttatccaagatcaccatttcaggtcactgctggatatcagttgcctgtatataattatcaggcatttcctgcttatccaaattcaccatttcaagtcgccactggatatcagttccctgtatacaattatcagccatttcctgcttatccaagttcaccatttcaggtcactgctggatatcagttgcctgtatataattatcaggcatttcctgcttatccaaattcaccatttcaagtcgccactggatatcagttccctgtatacaattatcaggcatttcctgcttatccaaattcaccagttcaggtcaccactggatatcagttgcctgtatacaattatcaggcatttcctgcttatccaagttcaccatttcaggtcaccactggatatcagttgcctgtatataattatcaggcatttcctgcttatccaagttcaccatttcaggtcaccactggatatcagttgcctgtatataattatcaggcatttcctgcttatccaagttcaccatttcaggtcaccactggatatcagttgcctgtatataattatcaggcatttcctgcttatccaagttcaccatttcaggtcaccactggatatcagttgcctgtatataattatcaggcatttcctgcttatccaagttcaccatttcaggtcaccactggatatcagttgcctgtatataattatcaggcatttcctgcttatccaagttcaccatttcaggtcaccactggatatcagttgcctgtatataattatcaggcatttcctgcttatccaaattcagcagttcaggtcaccactggatatcagttccatgtatacaattaccagatgccaccgcagtgccctgttggggagcaaaggagaaatctgtggaccgaagcatacaaatggtggtatcttgtctgtttaatccagagaagagactgataaattccgttgttactcaagatgactgcttcaagggtaaaagagtgcatcgctttagaagaagtttggcagtatttaaatctgttggatcctctcagctatctagtttcatgggaagttgctggttttgaatattaagctaaaagttttccactattacagaaattctgaattttggtaaatcacactgaaactttctgtataacttgtattattagactctctagttttatcttaacactgaaactgttcttcattagatgtttatttagaacctggttctgtgtttaatatatagtttaaagtaacaaataatcgagactgaaagaatgttaagatttatctgcaaggatttttaaaaaattgaaacttgcattttaagtgtttaaaagcaaatactgactttcaaaaaagtttttaaaacctgatttgaaagctaacaattttgatagtctgaacacaagcatttcacttctccaagaagtacctgtgaacagtacaatatttcagtattgagctttgcatttatgatttatctagaaatttacctcaaaagcagaatttttaaaactgcatttttaatcagtggaactcaatgtatagttagctttattgaagtcttatccaaacccagtaaaacagattctaagcaaacagtccaatcagtgagtcataatgtttattcaaagtattttatcttttatctagaatccacatatgtatgtccaatttgattgggatagtagttaggataactaaaattctgggcctaattttttaaagaatccaagacaaactaaactttactgggtatataaccttctcaatgagttaccattcttttttataaaaaaaattgttccttgaaatgctaaacttaatggctgtatgtgaaatttgcaaaatactggtattaaagaacgctgcagcttttttatgtcactcaaaggttaatcggagtatctgaaaggaattgtttttataaaaacattgaagtattagttacttgctataaatagatttttatttttgttttttagcctgttatatttccttctgtaaaataaaatatgtccagaagaggcatgttgtttctagattaggtagtgtcctcattttatattgtgaccacacagctagagcaccagagcccttttgctatactcacagtcttgttttcccagcctcttttactagtctttcaggaggtttgctcttagaactggtgatgtaaagaatggaagtagctgtatgagcagttcaaaggccaagccgtggaatggtagcaatgggatataatacctttctaagggaaacatttgtatcagtatcatttgatctgccatggacatgtgtttaaagtggctttctggcccttctttcaatggcttcttccctaaaacgtggagactctaagttaatgtcgttactatgggccatattactaatgcccactggggtctatgatttctcaaaattttcattcggaatccgaaggatacagtctttaaactttagaattcccaagaaggctttattacacctcagaaattgaaagcaccatgactttgtccattaaaaaattatccatagtttttttagtgcttttaacattccgacatacatcattctgtgattaaatctccagatttctgtaaatgatacctacattctaaagagttaattctaattattccgatatgaccttaaggaaaagtaaaggaataaatttttgtctttgttgaagtatttaatagagtaaggtaaagaagatattaagtccctttcaaaatggaaaattaattctaaactgagaaaaatgttcctactacctattgctgatactgtctttgcataaatgaataaaaataaactttttttcttcaaatgtg

SEQ ID NO: 126094 - DNA, 3853 bp, Homo sapiens
  Payload ID: 4725
  Gene Symbol: DAZ2
  Gene Name: deleted in azoospermia 2
  Uniprot ID: Q13117
  ENST ID: ENST00000382424
  CDS Start-End: 285-1961
attggctcaggccgataccacgcgccccgatacccggcacaggagccacctcccagagccccgcagtccatgcctcagtcggcctgcgctcctcagcctggcggttctacctccgagggttcgcccgcccttggttttccttacaccttagcctttggctcctttgaccactcgaagccccacagcgtgttccagcggacttcaccagcagacccagaagtggtgggtgaaacactgcctctgttcctccttgagcctgtcgggagctgctgcctgccaccaccatgtctgctgcaaatcctgagactccaaactcaaccatctccagagaggccagcacccagtcttcatcagctgcagctagccaaggctgggtgttaccagaaggcaaaatcgtgccaaacactgtttttgttggtggaattgatgctaggatggatgaaactgagattggaagctgctttggtagatacggttcagtgaaagaagtgaagataatcacgaatcgaactggtgtgtccaaaggctatggatttgtttcgtttgttaatgacgtggatgtccagaagatagtaggatcacagatacatttccatggtaaaaagctgaagctgggccctgcaatcaggaaacaaaagttatgtgctcgtcatgtgcagccacgtcctttggtagttaatcctcctcctccaccacagtttcagaacgtctggcggaatccaaacactgaaacctacctgcagccccaaatcacgccgaatcctgtaactcagcacgttcaggcttattctgcttatccacattcaccaggtcaggtcatcactggatgtcagttgcttgtatataattatcaggaatatcctacttatcccgattcagcatttcaggtcaccactggatatcagttgcctgtatataattatcagccatttcctgcttatccaagatcaccatttcaggtcactgctggatatcagttgcctgtatataattatcaggcatttcctgcttatccaaattcaccatttcaagtcgccactggatatcagttccctgtatacaattatcagccatttcctgcttatccaagttcaccatttcaggtcactgctggatatcagttgcctgtatataattatcaggcatttcctgcttatccaaattcaccatttcaagtcgccactggatatcagttccctgtatacaattatcaggcatttcctgcttatccaaattcaccagttcaggtcaccactggatatcagttgcctgtatacaattatcaggcatttcctgcttatccaaattcaccagttcaggtcaccactggatatcagttgcctgtatacaattatcaggcatttcctgcttatccaagttcaccatttcaggtcaccactggatatcagttgcctgtatataattatcaggcatttcctgcttatccaagttcaccatttcaggtcaccactggatatcagttgcctgtatataattatcaggcatttcctgcttatccaagttcaccatttcaggtcaccactggatatcagttgcctgtatataattatcaggcatttcctgcttatccaagttcaccatttcaggtcaccactggatatcagttgcctgtatataattatcaggcatttcctgcttatccaagttcaccatttcaggtcaccactggatatcagttgcctgtatataattatcaggcatttcctgcttatccaagttcaccatttcaggtcaccactggatatcagttgcctgtatataattatcaggcatttcctgcttatccaaattcagcagttcaggtcaccactggatatcagttccatgtatacaattaccagatgccaccgcagtgccctgttggggagcaaaggagaaatctgtggaccgaagcatacaaatggtggtatcttgtctgtttaatccagagaagagactgataaattccgttgttactcaagatgactgcttcaagggtaaaagagtgcatcgctttagaagaagtttggcagtatttaaatctgttggatcctctcagctatctagtttcatgggaagttgctggttttgaatattaagctaaaagttttccactattacagaaattctgaattttggtaaatcacactgaaactttctgtataacttgtattattagactctctagttttatcttaacactgaaactgttcttcattagatgtttatttagaacctggttctgtgtttaatatatagtttaaagtaacaaataatcgagactgaaagaatgttaagatttatctgcaaggatttttaaaaaattgaaacttgcattttaagtgtttaaaagcaaatactgactttcaaaaaagtttttaaaacctgatttgaaagctaacaattttgatagtctgaacacaagcatttcacttctccaagaagtacctgtgaacagtacaatatttcagtattgagctttgcatttatgatttatctagaaatttacctcaaaagcagaatttttaaaactgcatttttaatcagtggaactcaatgtatagttagctttattgaagtcttatccaaacccagtaaaacagattctaagcaaacagtccaatcagtgagtcataatgtttattcaaagtattttatcttttatctagaatccacatatgtatgtccaatttgattgggatagtagttaggataactaaaattctgggcctaattttttaaagaatccaagacaaactaaactttactgggtatataaccttctcaatgagttaccattcttttttataaaaaaaattgttccttgaaatgctaaacttaatggctgtatgtgaaatttgcaaaatactggtattaaagaacgctgcagcttttttatgtcactcaaaggttaatcggagtatctgaaaggaattgtttttataaaaacattgaagtattagttacttgctataaatagatttttatttttgttttttagcctgttatatttccttctgtaaaataaaatatgtccagaagaggcatgttgtttctagattaggtagtgtcctcattttatattgtgaccacacagctagagcaccagagcccttttgctatactcacagtcttgttttcccagcctcttttactagtctttcaggaggtttgctcttagaactggtgatgtaaagaatggaagtagctgtatgagcagttcaaaggccaagccgtggaatggtagcaatgggatataatacctttctaagggaaacatttgtatcagtatcatttgatctgccatggacatgtgtttaaagtggctttctggcccttctttcaatggcttcttccctaaaacgtggagactctaagttaatgtcgttactatgggccatattactaatgcccactggggtctatgatttctcaaaattttcattcggaatccgaaggatacagtctttaaactttagaattcccaagaaggctttattacacctcagaaattgaaagcaccatgactttgtccattaaaaaattatccatagtttttttagtgcttttaacattccgacatacatcattctgtgattaaatctccagatttctgtaaatgatacctacattctaaagagttaattctaattattccgatatgaccttaaggaaaagtaaaggaataaatttttgtctttgttgaagtatttaatagagtaaggtaaagaagatattaagtccctttcaaaatggaaaattaattctaaactgagaaaaatgttcctactacctattgctgatactgtctttgcataaatgaataaaaataaactttttttcttcaaatgtg

SEQ ID NO: 126095 - DNA, 3637 bp, Homo sapiens
  Payload ID: 4725
  Gene Symbol: DAZ2
  Gene Name: deleted in azoospermia 2
  ENST ID: ENST00000382431
  CDS Start-End: 285-1745
attggctcaggccgataccacgcgccccgatacccggcacaggagccacctcccagagccccgcagtccatgcctcagtcggcctgcgctcctcagcctggcggttctacctccgagggttcgcccgcccttggttttccttacaccttagcctttggctcctttgaccactcgaagccccacagcgtgttccagcggacttcaccagcagacccagaagtggtgggtgaaacactgcctctgttcctccttgagcctgtcgggagctgctgcctgccaccaccatgtctgctgcaaatcctgagactccaaactcaaccatctccagagaggccagcacccagtcttcatcagctgcagctagccaaggctgggtgttaccagaaggcaaaatcgtgccaaacactgtttttgttggtggaattgatgctaggatggatgaaactgagattggaagctgctttggtagatacggttcagtgaaagaagtgaagataatcacgaatcgaactggtgtgtccaaaggctatggatttgtttcgtttgttaatgacgtggatgtccagaagatagtaggatcacagatacatttccatggtaaaaagctgaagctgggccctgcaatcaggaaacaaaagttatgtgctcgtcatgtgcagccacgtcctttggtagttaatcctcctcctccaccacagtttcagaacgtctggcggaatccaaacactgaaacctacctgcagccccaaatcacgccgaatcctgtaactcagcacgttcaggcttattctgcttatccacattcaccaggtcaggtcatcactggatgtcagttgcttgtatataattatcaggaatatcctacttatcccgattcagcatttcaggtcaccactggatatcagttgcctgtatataattatcagccatttcctgcttatccaagatcaccatttcaggtcactgctggatatcagttgcctgtatataattatcaggcatttcctgcttatccaaattcaccatttcaagtcgccactggatatcagttccctgtatacaattatcagccatttcctgcttatccaagttcaccatttcaggtcactgctggatatcagttgcctgtatataattatcaggcatttcctgcttatccaaattcaccatttcaagtcgccactggatatcagttccctgtatacaattatcagccatttcctgcttatccaagttcaccatttcaggtcactgctggatatcagttgcctgtatataattatcaggcatttcctgcttatccaaattcaccatttcaagtcgccactggatatcagttccctgtatacaattatcaggcatttcctgcttatccaaattcaccagttcaggtcaccactggatatcagttgcctgtatacaattatcaggcatttcctgcttatccaaattcaccatttcaagtcgccactggatatcagttccctgtatacaattatcaggcatttcctgcttatccaaattcaccagttcaggtcaccactggatatcagttgcctgtatacaattatcaggcatttcctgcttatccaaattcagcagttcaggtcaccactggatatcagttccatgtatacaattaccagatgccaccgcagtgccctgttggggagcaaaggagaaatctgtggaccgaagcatacaaatggtggtatcttgtctgtttaatccagagaagagactgataaattccgttgttactcaagatgactgcttcaagggtaaaagagtgcatcgctttagaagaagtttggcagtatttaaatctgttggatcctctcagctatctagtttcatgggaagttgctggttttgaatattaagctaaaagttttccactattacagaaattctgaattttggtaaatcacactgaaactttctgtataacttgtattattagactctctagttttatcttaacactgaaactgttcttcattagatgtttatttagaacctggttctgtgtttaatatatagtttaaagtaacaaataatcgagactgaaagaatgttaagatttatctgcaaggatttttaaaaaattgaaacttgcattttaagtgtttaaaagcaaatactgactttcaaaaaagtttttaaaacctgatttgaaagctaacaattttgatagtctgaacacaagcatttcacttctccaagaagtacctgtgaacagtacaatatttcagtattgagctttgcatttatgatttatctagaaatttacctcaaaagcagaatttttaaaactgcatttttaatcagtggaactcaatgtatagttagctttattgaagtcttatccaaacccagtaaaacagattctaagcaaacagtccaatcagtgagtcataatgtttattcaaagtattttatcttttatctagaatccacatatgtatgtccaatttgattgggatagtagttaggataactaaaattctgggcctaattttttaaagaatccaagacaaactaaactttactgggtatataaccttctcaatgagttaccattcttttttataaaaaaaattgttccttgaaatgctaaacttaatggctgtatgtgaaatttgcaaaatactggtattaaagaacgctgcagcttttttatgtcactcaaaggttaatcggagtatctgaaaggaattgtttttataaaaacattgaagtattagttacttgctataaatagatttttatttttgttttttagcctgttatatttccttctgtaaaataaaatatgtccagaagaggcatgttgtttctagattaggtagtgtcctcattttatattgtgaccacacagctagagcaccagagcccttttgctatactcacagtcttgttttcccagcctcttttactagtctttcaggaggtttgctcttagaactggtgatgtaaagaatggaagtagctgtatgagcagttcaaaggccaagccgtggaatggtagcaatgggatataatacctttctaagggaaacatttgtatcagtatcatttgatctgccatggacatgtgtttaaagtggctttctggcccttctttcaatggcttcttccctaaaacgtggagactctaagttaatgtcgttactatgggccatattactaatgcccactggggtctatgatttctcaaaattttcattcggaatccgaaggatacagtctttaaactttagaattcccaagaaggctttattacacctcagaaattgaaagcaccatgactttgtccattaaaaaattatccatagtttttttagtgcttttaacattccgacatacatcattctgtgattaaatctccagatttctgtaaatgatacctacattctaaagagttaattctaattattccgatatgaccttaaggaaaagtaaaggaataaatttttgtctttgttgaagtatttaatagagtaaggtaaagaagatattaagtccctttcaaaatggaaaattaattctaaactgagaaaaatgttcctactacctattgctgatactgtctttgcataaatgaataaaaataaactttttttcttcaaatgtg

SEQ ID NO: 126096 - DNA, 2405 bp, Homo sapiens
  Payload ID: 4725
  Gene Symbol: DAZ2
  Gene Name: deleted in azoospermia 2
  Uniprot ID: Q13117
  ENST ID: ENST00000382433
  CDS Start-End: 194-1870
ctcagcctggcggttctacctccgagggttcgcccgcccttggttttccttacaccttagcctttggctcctttgaccactcgaagccccacagcgtgttccagcggacttcaccagcagacccagaagtggtgggtgaaacactgcctctgttcctccttgagcctgtcgggagctgctgcctgccaccaccatgtctgctgcaaatcctgagactccaaactcaaccatctccagagaggccagcacccagtcttcatcagctgcagctagccaaggctgggtgttaccagaaggcaaaatcgtgccaaacactgtttttgttggtggaattgatgctaggatggatgaaactgagattggaagctgctttggtagatacggttcagtgaaagaagtgaagataatcacgaatcgaactggtgtgtccaaaggctatggatttgtttcgtttgttaatgacgtggatgtccagaagatagtaggatcacagatacatttccatggtaaaaagctgaagctgggccctgcaatcaggaaacaaaagttatgtgctcgtcatgtgcagccacgtcctttggtagttaatcctcctcctccaccacagtttcagaacgtctggcggaatccaaacactgaaacctacctgcagccccaaatcacgccgaatcctgtaactcagcacgttcaggcttattctgcttatccacattcaccaggtcaggtcatcactggatgtcagttgcttgtatataattatcaggaatatcctacttatcccgattcagcatttcaggtcaccactggatatcagttgcctgtatataattatcagccatttcctgcttatccaagatcaccatttcaggtcactgctggatatcagttgcctgtatataattatcaggcatttcctgcttatccaaattcaccatttcaagtcgccactggatatcagttccctgtatacaattatcagccatttcctgcttatccaagttcaccatttcaggtcactgctggatatcagttgcctgtatataattatcaggcatttcctgcttatccaaattcaccatttcaagtcgccactggatatcagttccctgtatacaattatcaggcatttcctgcttatccaaattcaccagttcaggtcaccactggatatcagttgcctgtatacaattatcaggcatttcctgcttatccaaattcaccagttcaggtcaccactggatatcagttgcctgtatacaattatcaggcatttcctgcttatccaagttcaccatttcaggtcaccactggatatcagttgcctgtatataattatcaggcatttcctgcttatccaagttcaccatttcaggtcaccactggatatcagttgcctgtatataattatcaggcatttcctgcttatccaagttcaccatttcaggtcaccactggatatcagttgcctgtatataattatcaggcatttcctgcttatccaagttcaccatttcaggtcaccactggatatcagttgcctgtatataattatcaggcatttcctgcttatccaagttcaccatttcaggtcaccactggatatcagttgcctgtatataattatcaggcatttcctgcttatccaagttcaccatttcaggtcaccactggatatcagttgcctgtatataattatcaggcatttcctgcttatccaaattcagcagttcaggtcaccactggatatcagttccatgtatacaattaccagatgccaccgcagtgccctgttggggagcaaaggagaaatctgtggaccgaagcatacaaatggtggtatcttgtctgtttaatccagagaagagactgataaattccgttgttactcaagatgactgcttcaagggtaaaagagtgcatcgctttagaagaagtttggcagtatttaaatctgttggatcctctcagctatctagtttcatgggaagttgctggttttgaatattaagctaaaagttttccactattacagaaattctgaattttggtaaatcacactgaaactttctgtataacttgtattattagactctctagttttatcttaacactgaaactgttcttcattagatgtttatttagaacctggttctgtgtttaatatatagtttaaagtaacaaataatcgagactgaaagaatgttaagatttatctgcaaggatttttaaaaaattgaaacttgcattttaagtgtttaaaagcaaatactgactttcaaaaaagtttttaaaacctgatttgaaagctaacaattttgatagtctgaacacaagcatttcacttctccaagaagtacctgtgaacagtacaatatttcagtattgagctttgcatttatgattta

SEQ ID NO: 126097 - DNA, 4119 bp, Homo sapiens
  Payload ID: 4725
  Gene Symbol: DAZ2
  Gene Name: deleted in azoospermia 2
  ENST ID: ENST00000382440
  CDS Start-End: 267-2231
cacgcgccccgatacccggcacaggagccacctcccagagccccgcagtccatgcctcagtcggcctgcgctcctcagcctggcggttctacctccgagggttcgcccgcccttggttttccttacaccttagcctttggctcctttgaccactcgaagccccacagcgtgttccagcggacttcaccagcagacccagaagtggtgggtgaaacactgcctctgttcctccttgagcctgtcgggagctgctgcctgccaccaccatgtctgctgcaaatcctgagactccaaactcaaccatctccagagaggccagcacccagtcttcatcagctgcagctagccaaggctgggtgttaccagaaggcaaaatcgtgccaaacactgtttttgttggtggaattgatgctaggatggatgaaactgagattggaagctgctttggtagatacggttcagtgaaagaagtgaagataatcacgaatcgaactggtgtgtccaaaggctatggatttgtttcgtttgttaatgacgtggatgtccagaagatagtaggatcacagatacatttccatggtaaaaagctgaagctgggccctgcaatcaggaaacaaaagttatgtgctcgtcatgtgcagccacgtcctttggtagttaatcctcctcctccaccacagtttcagaacgtctggcggaatccaaacactgaaacctacctgcagccccaaatcacgccgaatcctgtaactcagcacgttcaggcttattctgcttatccacattcaccaggtcaggtcatcactggatgtcagttgcttgtatataattatcaggaatatcctacttatcccgattcagcatttcaggtcaccactggatatcagttgcctgtatataattatcagccatttcctgcttatccaagatcaccatttcaggtcactgctggatatcagttgcctgtatataattatcaggcatttcctgcttatccaaattcaccatttcaagtcgccactggatatcagttccctgtatacaattatcagccatttcctgcttatccaagttcaccatttcaggtcactgctggatatcagttgcctgtatataattatcaggcatttcctgcttatccaaattcaccatttcaagtcgccactggatatcagttccctgtatacaattatcagccatttcctgcttatccaagttcaccatttcaggtcactgctggatatcagttgcctgtatataattatcaggcatttcctgcttatccaaattcaccatttcaagtcgccactggatatcagttccctgtatacaattatcaggcatttcctgcttatccaaattcaccagttcaggtcaccactggatatcagttgcctgtatacaattatcagccatttcctgcttatccaagatcaccatttcaggtcactgctggatatcagttgcctgtatataattatcaggcatttcctgcttatccaaattcaccatttcaagtcgccactggatatcagttccctgtatacaattatcaggcatttcctgcttatccaaattcaccagttcaggtcaccactggatatcagttgcctgtatacaattatcaggcatttcctgcttatccaagttcaccatttcaggtcaccactggatatcagttgcctgtatataattatcaggcatttcctgcttatccaagttcaccatttcaggtcaccactggatatcagttgcctgtatataattatcaggcatttcctgcttatccaagttcaccatttcaggtcaccactggatatcagttgcctgtatataattatcaggcatttcctgcttatccaagttcaccatttcaggtcaccactggatatcagttgcctgtatataattatcaggcatttcctgcttatccaagttcaccatttcaggtcaccactggatatcagttgcctgtatataattatcaggcatttcctgcttatccaagttcaccatttcaggtcaccactggatatcagttgcctgtatataattatcaggcatttcctgcttatccaaattcagcagttcaggtcaccactggatatcagttccatgtatacaattaccagatgccaccgcagtgccctgttggggagcaaaggagaaatctgtggaccgaagcatacaaatggtggtatcttgtctgtttaatccagagaagagactgataaattccgttgttactcaagatgactgcttcaagggtaaaagagtgcatcgctttagaagaagtttggcagtatttaaatctgttggatcctctcagctatctagtttcatgggaagttgctggttttgaatattaagctaaaagttttccactattacagaaattctgaattttggtaaatcacactgaaactttctgtataacttgtattattagactctctagttttatcttaacactgaaactgttcttcattagatgtttatttagaacctggttctgtgtttaatatatagtttaaagtaacaaataatcgagactgaaagaatgttaagatttatctgcaaggatttttaaaaaattgaaacttgcattttaagtgtttaaaagcaaatactgactttcaaaaaagtttttaaaacctgatttgaaagctaacaattttgatagtctgaacacaagcatttcacttctccaagaagtacctgtgaacagtacaatatttcagtattgagctttgcatttatgatttatctagaaatttacctcaaaagcagaatttttaaaactgcatttttaatcagtggaactcaatgtatagttagctttattgaagtcttatccaaacccagtaaaacagattctaagcaaacagtccaatcagtgagtcataatgtttattcaaagtattttatcttttatctagaatccacatatgtatgtccaatttgattgggatagtagttaggataactaaaattctgggcctaattttttaaagaatccaagacaaactaaactttactgggtatataaccttctcaatgagttaccattcttttttataaaaaaaattgttccttgaaatgctaaacttaatggctgtatgtgaaatttgcaaaatactggtattaaagaacgctgcagcttttttatgtcactcaaaggttaatcggagtatctgaaaggaattgtttttataaaaacattgaagtattagttacttgctataaatagatttttatttttgttttttagcctgttatatttccttctgtaaaataaaatatgtccagaagaggcatgttgtttctagattaggtagtgtcctcattttatattgtgaccacacagctagagcaccagagcccttttgctatactcacagtcttgttttcccagcctcttttactagtctttcaggaggtttgctcttagaactggtgatgtaaagaatggaagtagctgtatgagcagttcaaaggccaagccgtggaatggtagcaatgggatataatacctttctaagggaaacatttgtatcagtatcatttgatctgccatggacatgtgtttaaagtggctttctggcccttctttcaatggcttcttccctaaaacgtggagactctaagttaatgtcgttactatgggccatattactaatgcccactggggtctatgatttctcaaaattttcattcggaatccgaaggatacagtctttaaactttagaattcccaagaaggctttattacacctcagaaattgaaagcaccatgactttgtccattaaaaaattatccatagtttttttagtgcttttaacattccgacatacatcattctgtgattaaatctccagatttctgtaaatgatacctacattctaaagagttaattctaattattccgatatgaccttaaggaaaagtaaaggaataaatttttgtctttgttgaagtatttaatagagtaaggtaaagaagatattaagtccctttcaaaatggaaaattaattctaaactgagaaaaatgttcctactacctattgctgatactgtctttgcataaatgaataaaaataaactttttttcttcaaa

SEQ ID NO: 126098 - DNA, 3791 bp, Homo sapiens
  Payload ID: 4725
  Gene Symbol: DAZ2
  Gene Name: deleted in azoospermia 2
  Uniprot ID: Q13117
  ENST ID: ENST00000382449
  CDS Start-End: 295-1899
gctgccacccattggctcaggccgataccacgcgccccgatacccggcacaggagccacctcccagagccccgcagtccatgcctcagtcggcctgcgctcctcagcctggcggttctacctccgagggttcgcccgcccttggttttccttacaccttagcctttggctcctttgaccactcgaagccccacagcgtgttccagcggacttcaccagcagacccagaagtggtgggtgaaacactgcctctgttcctccttgagcctgtcgggagctgctgcctgccaccaccatgtctgctgcaaatcctgagactccaaactcaaccatctccagagaggccagcacccagtcttcatcagctgcagctagccaaggctgggtgttaccagaaggcaaaatcgtgccaaacactgtttttgttggtggaattgatgctaggatggatgaaactgagattggaagctgctttggtagatacggttcagtgaaagaagtgaagataatcacgaatcgaactggtgtgtccaaaggctatggatttgtttcgtttgttaatgacgtggatgtccagaagatagtaggatcacagatacatttccatggtaaaaagctgaagctgggccctgcaatcaggaaacaaaagttatgtgctcgtcatgtgcagccacgtcctttggtagttaatcctcctcctccaccacagtttcagaacgtctggcggaatccaaacactgaaacctacctgcagccccaaatcacgccgaatcctgtaactcagcacgttcaggcttattctgcttatccacattcaccaggtcaggtcatcactggatgtcagttgcttgtatataattatcaggaatatcctacttatcccgattcagcatttcaggtcaccactggatatcagttgcctgtatataattatcagccatttcctgcttatccaagatcaccatttcaggtcactgctggatatcagttgcctgtatataattatcaggcatttcctgcttatccaaattcaccatttcaagtcgccactggatatcagttccctgtatacaattatcagccatttcctgcttatccaagttcaccatttcaggtcactgctggatatcagttgcctgtatataattatcaggcatttcctgcttatccaaattcaccatttcaagtcgccactggatatcagttccctgtatacaattatcaggcatttcctgcttatccaaattcaccagttcaggtcaccactggatatcagttgcctgtatacaattatcaggcatttcctgcttatccaagttcaccatttcaggtcaccactggatatcagttgcctgtatataattatcaggcatttcctgcttatccaagttcaccatttcaggtcaccactggatatcagttgcctgtatataattatcaggcatttcctgcttatccaagttcaccatttcaggtcaccactggatatcagttgcctgtatataattatcaggcatttcctgcttatccaagttcaccatttcaggtcaccactggatatcagttgcctgtatataattatcaggcatttcctgcttatccaagttcaccatttcaggtcaccactggatatcagttgcctgtatataattatcaggcatttcctgcttatccaagttcaccatttcaggtcaccactggatatcagttgcctgtatataattatcaggcatttcctgcttatccaaattcagcagttcaggtcaccactggatatcagttccatgtatacaattaccagatgccaccgcagtgccctgttggggagcaaaggagaaatctgtggaccgaagcatacaaatggtggtatcttgtctgtttaatccagagaagagactgataaattccgttgttactcaagatgactgcttcaagggtaaaagagtgcatcgctttagaagaagtttggcagtatttaaatctgttggatcctctcagctatctagtttcatgggaagttgctggttttgaatattaagctaaaagttttccactattacagaaattctgaattttggtaaatcacactgaaactttctgtataacttgtattattagactctctagttttatcttaacactgaaactgttcttcattagatgtttatttagaacctggttctgtgtttaatatatagtttaaagtaacaaataatcgagactgaaagaatgttaagatttatctgcaaggatttttaaaaaattgaaacttgcattttaagtgtttaaaagcaaatactgactttcaaaaaagtttttaaaacctgatttgaaagctaacaattttgatagtctgaacacaagcatttcacttctccaagaagtacctgtgaacagtacaatatttcagtattgagctttgcatttatgatttatctagaaatttacctcaaaagcagaatttttaaaactgcatttttaatcagtggaactcaatgtatagttagctttattgaagtcttatccaaacccagtaaaacagattctaagcaaacagtccaatcagtgagtcataatgtttattcaaagtattttatcttttatctagaatccacatatgtatgtccaatttgattgggatagtagttaggataactaaaattctgggcctaattttttaaagaatccaagacaaactaaactttactgggtatataaccttctcaatgagttaccattcttttttataaaaaaaattgttccttgaaatgctaaacttaatggctgtatgtgaaatttgcaaaatactggtattaaagaacgctgcagcttttttatgtcactcaaaggttaatcggagtatctgaaaggaattgtttttataaaaacattgaagtattagttacttgctataaatagatttttatttttgttttttagcctgttatatttccttctgtaaaataaaatatgtccagaagaggcatgttgtttctagattaggtagtgtcctcattttatattgtgaccacacagctagagcaccagagcccttttgctatactcacagtcttgttttcccagcctcttttactagtctttcaggaggtttgctcttagaactggtgatgtaaagaatggaagtagctgtatgagcagttcaaaggccaagccgtggaatggtagcaatgggatataatacctttctaagggaaacatttgtatcagtatcatttgatctgccatggacatgtgtttaaagtggctttctggcccttctttcaatggcttcttccctaaaacgtggagactctaagttaatgtcgttactatgggccatattactaatgcccactggggtctatgatttctcaaaattttcattcggaatccgaaggatacagtctttaaactttagaattcccaagaaggctttattacacctcagaaattgaaagcaccatgactttgtccattaaaaaattatccatagtttttttagtgcttttaacattccgacatacatcattctgtgattaaatctccagatttctgtaaatgatacctacattctaaagagttaattctaattattccgatatgaccttaaggaaaagtaaaggaataaatttttgtctttgttgaagtatttaatagagtaaggtaaagaagatattaagtccctttcaaaatggaaaattaattctaaactgagaaaaatgttcctactacctattgctgatactgtctttgcataaatgaataaaaataaactttttttcttcaaatgtg

SEQ ID NO: 126099 - DNA, 3516 bp, Homo sapiens
  Payload ID: 4725
  Gene Symbol: DAZ2
  Gene Name: deleted in azoospermia 2
  ENST ID: ENST00000400493
  CDS Start-End: 308-1624
agggggcgggtgtgctgccacccattggctcaggccgataccacgcgccccgatacccggcacaggagccacctcccagagccccgcagtccatgcctcagtcggcctgcgctcctcagcctggcggttctacctccgagggttcgcccgcccttggttttccttacaccttagcctttggctcctttgaccactcgaagccccacagcgtgttccagcggacttcaccagcagacccagaagtggtgggtgaaacactgcctctgttcctccttgagcctgtcgggagctgctgcctgccaccaccatgtctgctgcaaatcctgagactccaaactcaaccatctccagagaggccagcacccagtcttcatcagctgcagctagccaaggctgggtgttaccagaaggcaaaatcgtgccaaacactgtttttgttggtggaattgatgctaggatggatgaaactgagattggaagctgctttggtagatacggttcagtgaaagaagtgaagataatcacgaatcgaactggtgtgtccaaaggctatggatttgtttcgtttgttaatgacgtggatgtccagaagatagtaggatcacagatacatttccatggtaaaaagctgaagctgggccctgcaatcaggaaacaaaagttatgtgctcgtcatgtgcagccacgtcctttggtagttaatcctcctcctccaccacagtttcagaacgtctggcggaatccaaacactgaaacctacctgcagccccaaatcacgccgaatcctgtaactcagcacgttcaggcttattctgcttatccacattcaccaggtcaggtcatcactggatgtcagttgcttgtatataattatcaggaatatcctacttatcccgattcagcatttcaggtcaccactggatatcagttgcctgtatataattatcagccatttcctgcttatccaagatcaccatttcaggtcactgctggatatcagttgcctgtatataattatcaggcatttcctgcttatccaaattcaccatttcaagtcgccactggatatcagttccctgtatacaattatcaggcatttcctgcttatccaaattcaccatttcaagtcgccactggatatcagttccctgtatacaattatcaggcatttcctgcttatccaaattcaccatttcaagtcgccactggatatcagttccctgtatacaattatcaggcatttcctgcttatccaaattcaccagttcaggtcaccactggatatcagttgcctgtatacaattatcaggcatttcctgcttatccaaattcaccatttcaagtcgccactggatatcagttccctgtatacaattatcaggcatttcctgcttatccaaattcaccagttcaggtcaccactggatatcagttgcctgtatacaattatcaggcatttcctgcttatccaaattcagcagttcaggtcaccactggatatcagttccatgtatacaattaccagatgccaccgcagtgccctgttggggagcaaaggagaaatctgtggaccgaagcatacaaatggtggtatcttgtctgtttaatccagagaagagactgataaattccgttgttactcaagatgactgcttcaagggtaaaagagtgcatcgctttagaagaagtttggcagtatttaaatctgttggatcctctcagctatctagtttcatgggaagttgctggttttgaatattaagctaaaagttttccactattacagaaattctgaattttggtaaatcacactgaaactttctgtataacttgtattattagactctctagttttatcttaacactgaaactgttcttcattagatgtttatttagaacctggttctgtgtttaatatatagtttaaagtaacaaataatcgagactgaaagaatgttaagatttatctgcaaggatttttaaaaaattgaaacttgcattttaagtgtttaaaagcaaatactgactttcaaaaaagtttttaaaacctgatttgaaagctaacaattttgatagtctgaacacaagcatttcacttctccaagaagtacctgtgaacagtacaatatttcagtattgagctttgcatttatgatttatctagaaatttacctcaaaagcagaatttttaaaactgcatttttaatcagtggaactcaatgtatagttagctttattgaagtcttatccaaacccagtaaaacagattctaagcaaacagtccaatcagtgagtcataatgtttattcaaagtattttatcttttatctagaatccacatatgtatgtccaatttgattgggatagtagttaggataactaaaattctgggcctaattttttaaagaatccaagacaaactaaactttactgggtatataaccttctcaatgagttaccattcttttttataaaaaaaattgttccttgaaatgctaaacttaatggctgtatgtgaaatttgcaaaatactggtattaaagaacgctgcagcttttttatgtcactcaaaggttaatcggagtatctgaaaggaattgtttttataaaaacattgaagtattagttacttgctataaatagatttttatttttgttttttagcctgttatatttccttctgtaaaataaaatatgtccagaagaggcatgttgtttctagattaggtagtgtcctcattttatattgtgaccacacagctagagcaccagagcccttttgctatactcacagtcttgttttcccagcctcttttactagtctttcaggaggtttgctcttagaactggtgatgtaaagaatggaagtagctgtatgagcagttcaaaggccaagccgtggaatggtagcaatgggatataatacctttctaagggaaacatttgtatcagtatcatttgatctgccatggacatgtgtttaaagtggctttctggcccttctttcaatggcttcttccctaaaacgtggagactctaagttaatgtcgttactatgggccatattactaatgcccactggggtctatgatttctcaaaattttcattcggaatccgaaggatacagtctttaaactttagaattcccaagaaggctttattacacctcagaaattgaaagcaccatgactttgtccattaaaaaattatccatagtttttttagtgcttttaacattccgacatacatcattctgtgattaaatctccagatttctgtaaatgatacctacattctaaagagttaattctaattattccgatatgaccttaaggaaaagtaaaggaataaatttttgtctttgttgaagtatttaatagagtaaggtaaagaagatattaagtccctttcaaaatggaaaattaattctaaactgagaaaaatgttcctactacctattgctgatactgtctttgcataaatgaataaaaataaactttttttcttcaaatgtg

SEQ ID NO: 126100 - DNA, 3372 bp, Homo sapiens
  Payload ID: 4725
  Gene Symbol: DAZ2
  Gene Name: deleted in azoospermia 2
  ENST ID: ENST00000449947
  CDS Start-End: 308-1480
agggggcgggtgtgctgccacccattggctcaggccgataccacgcgccccgatacccggcacaggagccacctcccagagccccgcagtccatgcctcagtcggcctgcgctcctcagcctggcggttctacctccgagggttcgcccgcccttggttttccttacaccttagcctttggctcctttgaccactcgaagccccacagcgtgttccagcggacttcaccagcagacccagaagtggtgggtgaaacactgcctctgttcctccttgagcctgtcgggagctgctgcctgccaccaccatgtctgctgcaaatcctgagactccaaactcaaccatctccagagaggccagcacccagtcttcatcagctgcagctagccaaggctgggtgttaccagaaggcaaaatcgtgccaaacactgtttttgttggtggaattgatgctaggatggatgaaactgagattggaagctgctttggtagatacggttcagtgaaagaagtgaagataatcacgaatcgaactggtgtgtccaaaggctatggatttgtttcgtttgttaatgacgtggatgtccagaagatagtaggatcacagatacatttccatggtaaaaagctgaagctgggccctgcaatcaggaaacaaaagttatgtgctcgtcatgtgcagccacgtcctttggtagttaatcctcctcctccaccacagtttcagaacgtctggcggaatccaaacactgaaacctacctgcagccccaaatcacgccgaatcctgtaactcagcacgttcaggcttattctgcttatccacattcaccaggtcaggtcatcactggatgtcagttgcttgtatataattatcaggaatatcctacttatcccgattcagcatttcaggtcaccactggatatcagttgcctgtatataattatcagccatttcctgcttatccaagatcaccatttcaggtcactgctggatatcagttgcctgtatataattatcaggcatttcctgcttatccaaattcaccatttcaagtcgccactggatatcagttccctgtatacaattatcagccatttcctgcttatccaagttcaccatttcaggtcactgctggatatcagttgcctgtatataattatcaggcatttcctgcttatccaaattcaccatttcaagtcgccactggatatcagttccctgtatacaattatcaggcatttcctgcttatccaaattcaccagttcaggtcaccactggatatcagttgcctgtatacaattatcaggcatttcctgcttatccaaattcagcagttcaggtcaccactggatatcagttccatgtatacaattaccagatgccaccgcagtgccctgttggggagcaaaggagaaatctgtggaccgaagcatacaaatggtggtatcttgtctgtttaatccagagaagagactgataaattccgttgttactcaagatgactgcttcaagggtaaaagagtgcatcgctttagaagaagtttggcagtatttaaatctgttggatcctctcagctatctagtttcatgggaagttgctggttttgaatattaagctaaaagttttccactattacagaaattctgaattttggtaaatcacactgaaactttctgtataacttgtattattagactctctagttttatcttaacactgaaactgttcttcattagatgtttatttagaacctggttctgtgtttaatatatagtttaaagtaacaaataatcgagactgaaagaatgttaagatttatctgcaaggatttttaaaaaattgaaacttgcattttaagtgtttaaaagcaaatactgactttcaaaaaagtttttaaaacctgatttgaaagctaacaattttgatagtctgaacacaagcatttcacttctccaagaagtacctgtgaacagtacaatatttcagtattgagctttgcatttatgatttatctagaaatttacctcaaaagcagaatttttaaaactgcatttttaatcagtggaactcaatgtatagttagctttattgaagtcttatccaaacccagtaaaacagattctaagcaaacagtccaatcagtgagtcataatgtttattcaaagtattttatcttttatctagaatccacatatgtatgtccaatttgattgggatagtagttaggataactaaaattctgggcctaattttttaaagaatccaagacaaactaaactttactgggtatataaccttctcaatgagttaccattcttttttataaaaaaaattgttccttgaaatgctaaacttaatggctgtatgtgaaatttgcaaaatactggtattaaagaacgctgcagcttttttatgtcactcaaaggttaatcggagtatctgaaaggaattgtttttataaaaacattgaagtattagttacttgctataaatagatttttatttttgttttttagcctgttatatttccttctgtaaaataaaatatgtccagaagaggcatgttgtttctagattaggtagtgtcctcattttatattgtgaccacacagctagagcaccagagcccttttgctatactcacagtcttgttttcccagcctcttttactagtctttcaggaggtttgctcttagaactggtgatgtaaagaatggaagtagctgtatgagcagttcaaaggccaagccgtggaatggtagcaatgggatataatacctttctaagggaaacatttgtatcagtatcatttgatctgccatggacatgtgtttaaagtggctttctggcccttctttcaatggcttcttccctaaaacgtggagactctaagttaatgtcgttactatgggccatattactaatgcccactggggtctatgatttctcaaaattttcattcggaatccgaaggatacagtctttaaactttagaattcccaagaaggctttattacacctcagaaattgaaagcaccatgactttgtccattaaaaaattatccatagtttttttagtgcttttaacattccgacatacatcattctgtgattaaatctccagatttctgtaaatgatacctacattctaaagagttaattctaattattccgatatgaccttaaggaaaagtaaaggaataaatttttgtctttgttgaagtatttaatagagtaaggtaaagaagatattaagtccctttcaaaatggaaaattaattctaaactgagaaaaatgttcctactacctattgctgatactgtctttgcataaatgaataaaaataaactttttttcttcaaatgtg

SEQ ID NO: 126101 - DNA, 3277 bp, Homo sapiens
  Payload ID: 4726
  Gene Symbol: DAZ3
  Gene Name: deleted in azoospermia 3
  ENST ID: ENST00000315357
  CDS Start-End: 285-1385
attggctcaggccgataccacgcgccccgatacccggcacaggagccacctcccagagccccgcagtccatgcctcagtcggcctgcgctcctcagcctggcggttctacctccgagggttcgcccgcccttggttttccttacaccttagcctttggctcctttgaccactcgaagccccacagcgtgttccagcggacttcaccagcagacccagaagtggtgggtgaaacactgcctctgttcctccttgagcctgtcgggagctgctgcctgccaccaccatgtctgctgcaaatcctgagactccaaactcaaccatctccagagaggccagcacccagtcttcatcagctgcagctagccaaggctgggtgttaccagaaggcaaaatcgtgccaaacactgtttttgttggtggaattgatgctaggatggatgaaactgagattggaagctgctttggtagatacggttcagtgaaagaagtgaagataatcacgaatcgaactggtgtgtccaaaggctatggatttgtttcgtttgttaatgacgtggatgtccagaagatagtaggatcacagatacatttccatggtaaaaagctgaagctgggccctgcaatcaggaaacaaaagttatgtgctcgtcatgtgcagccacgtcctttggtagttaatcctcctcctccaccacagtttcagaacgtctggcggaatccaaacactgaaacctacctgcagccccaaatcacgccgaatcctgtaactcagcacgttcaggcttactctgcttatccacattcaccaggtcaggtcatcactggatgtcagttgcttgtatataattatcaggaatatcctacttatcccgattcagcatttcaggtcaccactggatatcagttgcctgtatataattatcagccatttcctgcttatccaagatcaccatttcaggtcactgctggatatcagttgcctgtatataattatcaggcatttcctgcttatccaaattcaccagttcaggtcaccactggatatcagttgcctgtatacaattatcaggcatttcctgcttatccaaattcaccagttcaggtcaccactggatatcagttgcctgtatacaattatcaggcatttcctgcttatccaaattcaccagttcaggtcaccactggatatcagttgcctgtatacaattatcaggcatttcctgcttatccaaattcagcagttcaggtcaccactggatatcagttccatgtatacaattaccagatgccaccgcagtgccctgttggggagcaaaggagaaatctgtggaccgaagcatacaaatggtggtatcttgtctgtttaatccagagaagagactgataaattccgttgttactcaagatgactgcttcaagggtaaaagagtgcatcgctttagaagaagtttggcagtatttaaatctgttggatcctctcagctatctagtttcatgggaagttgctggttttgaatattaagctaaaagttttccactattacagaaattctgaattttggtaaatcacactgaaactttctgtataacttgtattattagactctctagttttatcttaacactgaaactgttcttcattagatgtttatttagaacctggttctgtgtttaatatatagtttaaagtaacaaataatcgagactgaaagaatgttaagatttatctgcaaggatttttaaaaaattgaaacttgcattttaagtgtttaaaagcaaatactgactttcaaaaaagtttttaaaacctgatttgaaagctaacaattttgatagtctgaacacaagcatttcacttctccaagaagtacctgtgaacagtacaatatttcagtattgagctttgcatttatgatttatctagaaatttacctcaaaagcagaatttttaaaactgcatttttaatcagtggaactcaatgtatagttagctttattgaagtcttatccaaacccagtaaaacagattctaagcaaacagtccaatcagtgagtcataatgtttattcaaagtattttatcttttatctagaatccacatatgtatgtccaatttgattgggatagtagttaggataactaaaattctgggcctaattttttaaagaatccaagacaaactaaactttactgggtatataaccttctcaatgagttaccattcttttttataaaaaaaattgttccttgaaatgctaaacttaatggctgtatgtgaaatttgcaaaatactggtattaaagaacgctgcagcttttttatgtcactcaaaggttaatcggagtatctgaaaggaattgtttttataaaaacattgaagtattagttacttgctataaatagatttttatttttgttttttagcctgttatatttccttctgtaaaataaaatatgtccagaagaggcatgttgtttctagattaggtagtgtcctcattttatattgtgaccacacagctagagcaccagagcccttttgctatactcacagtcttgttttcccagcctcttttactagtctttcaggaggtttgctcttagaactggtgatgtaaagaatggaagtagctgtatgagcagttcaaaggccaagccgtggaatggtagcaatgggatataatacctttctaagggaaacatttgtatcagtatcatttgatctgccatggacatgtgtttaaagtggctttctggcccttctttcaatggcttcttccctaaaacgtggagactctaagttaatgtcgttactatgggccatattactaatgcccactggggtctatgatttctcaaaattttcattcggaatccgaaggatacagtctttaaactttagaattcccaagaaggctttattacacctcagaaattgaaagcaccatgactttgtccattaaaaaattatccatagtttttttagtgcttttaacattccgacatacatcattctgtgattaaatctccagatttctgtaaatgatacctacattctaaagagttaattctaattattccgatatgaccttaaggaaaagtaaaggaataaatttttgtctttgttgaagtatttaatagagtaaggtaaagaagatattaagtccctttcaaaatggaaaattaattctaaactgagaaaaatgttcctactacctattgctgatactgtctttgcataaatgaataaaaataaactttttttcttcaaatgtg

SEQ ID NO: 126102 - DNA, 3503 bp, Homo sapiens
  Payload ID: 4726
  Gene Symbol: DAZ3
  Gene Name: deleted in azoospermia 3
  Uniprot ID: Q9NR90
  ENST ID: ENST00000382365
  CDS Start-End: 295-1611
gctgccacccattggctcaggccgataccacgcgccccgatacccggcacaggagccacctcccagagccccgcagtccatgcctcagtcggcctgcgctcctcagcctggcggttctacctccgagggttcgcccgcccttggttttccttacaccttagcctttggctcctttgaccactcgaagccccacagcgtgttccagcggacttcaccagcagacccagaagtggtgggtgaaacactgcctctgttcctccttgagcctgtcgggagctgctgcctgccaccaccatgtctgctgcaaatcctgagactccaaactcaaccatctccagagaggccagcacccagtcttcatcagctgcagctagccaaggctgggtgttaccagaaggcaaaatcgtgccaaacactgtttttgttggtggaattgatgctaggatggatgaaactgagattggaagctgctttggtagatacggttcagtgaaagaagtgaagataatcacgaatcgaactggtgtgtccaaaggctatggatttgtttcgtttgttaatgacgtggatgtccagaagatagtaggatcacagatacatttccatggtaaaaagctgaagctgggccctgcaatcaggaaacaaaagttatgtgctcgtcatgtgcagccacgtcctttggtagttaatcctcctcctccaccacagtttcagaacgtctggcggaatccaaacactgaaacctacctgcagccccaaatcacgccgaatcctgtaactcagcacgttcaggcttactctgcttatccacattcaccaggtcaggtcatcactggatgtcagttgcttgtatataattatcaggaatatcctacttatcccgattcagcatttcaggtcaccactggatatcagttgcctgtatataattatcagccatttcctgcttatccaagatcaccatttcaggtcactgctggatatcagttgcctgtatataattatcaggcatttcctgcttatccaaattcaccatttcaagtcgccactggatatcagttccctgtatacaattatcaggcatttcctgcttatccaaattcaccagttcaggtcaccactggatatcagttgcctgtatacaattatcaggcatttcctgcttatccaaattcaccatttcaagtcgccactggatatcagttccctgtatacaattatcaggcatttcctgcttatccaaattcaccagttcaggtcaccactggatatcagttgcctgtatacaattatcaggcatttcctgcttatccaaattcaccatttcaagtcgccactggatatcagttccctgtatacaattatcaggcatttcctgcttatccaaattcaccagttcaggtcaccactggatatcagttgcctgtatacaattatcaggcatttcctgcttatccaaattcagcagttcaggtcaccactggatatcagttccatgtatacaattaccagatgccaccgcagtgccctgttggggagcaaaggagaaatctgtggaccgaagcatacaaatggtggtatcttgtctgtttaatccagagaagagactgataaattccgttgttactcaagatgactgcttcaagggtaaaagagtgcatcgctttagaagaagtttggcagtatttaaatctgttggatcctctcagctatctagtttcatgggaagttgctggttttgaatattaagctaaaagttttccactattacagaaattctgaattttggtaaatcacactgaaactttctgtataacttgtattattagactctctagttttatcttaacactgaaactgttcttcattagatgtttatttagaacctggttctgtgtttaatatatagtttaaagtaacaaataatcgagactgaaagaatgttaagatttatctgcaaggatttttaaaaaattgaaacttgcattttaagtgtttaaaagcaaatactgactttcaaaaaagtttttaaaacctgatttgaaagctaacaattttgatagtctgaacacaagcatttcacttctccaagaagtacctgtgaacagtacaatatttcagtattgagctttgcatttatgatttatctagaaatttacctcaaaagcagaatttttaaaactgcatttttaatcagtggaactcaatgtatagttagctttattgaagtcttatccaaacccagtaaaacagattctaagcaaacagtccaatcagtgagtcataatgtttattcaaagtattttatcttttatctagaatccacatatgtatgtccaatttgattgggatagtagttaggataactaaaattctgggcctaattttttaaagaatccaagacaaactaaactttactgggtatataaccttctcaatgagttaccattcttttttataaaaaaaattgttccttgaaatgctaaacttaatggctgtatgtgaaatttgcaaaatactggtattaaagaacgctgcagcttttttatgtcactcaaaggttaatcggagtatctgaaaggaattgtttttataaaaacattgaagtattagttacttgctataaatagatttttatttttgttttttagcctgttatatttccttctgtaaaataaaatatgtccagaagaggcatgttgtttctagattaggtagtgtcctcattttatattgtgaccacacagctagagcaccagagcccttttgctatactcacagtcttgttttcccagcctcttttactagtctttcaggaggtttgctcttagaactggtgatgtaaagaatggaagtagctgtatgagcagttcaaaggccaagccgtggaatggtagcaatgggatataatacctttctaagggaaacatttgtatcagtatcatttgatctgccatggacatgtgtttaaagtggctttctggcccttctttcaatggcttcttccctaaaacgtggagactctaagttaatgtcgttactatgggccatattactaatgcccactggggtctatgatttctcaaaattttcattcggaatccgaaggatacagtctttaaactttagaattcccaagaaggctttattacacctcagaaattgaaagcaccatgactttgtccattaaaaaattatccatagtttttttagtgcttttaacattccgacatacatcattctgtgattaaatctccagatttctgtaaatgatacctacattctaaagagttaattctaattattccgatatgaccttaaggaaaagtaaaggaataaatttttgtctttgttgaagtatttaatagagtaaggtaaagaagatattaagtccctttcaaaatggaaaattaattctaaactgagaaaaatgttcctactacctattgctgatactgtctttgcataaatgaataaaaataaactttttttcttcaaatgtg

SEQ ID NO: 126103 - DNA, 3372 bp, Homo sapiens
  Payload ID: 4726
  Gene Symbol: DAZ3
  Gene Name: deleted in azoospermia 3
  ENST ID: ENST00000446723
  CDS Start-End: 308-1480
agggggcgggtgtgctgccacccattggctcaggccgataccacgcgccccgatacccggcacaggagccacctcccagagccccgcagtccatgcctcagtcggcctgcgctcctcagcctggcggttctacctccgagggttcgcccgcccttggttttccttacaccttagcctttggctcctttgaccactcgaagccccacagcgtgttccagcggacttcaccagcagacccagaagtggtgggtgaaacactgcctctgttcctccttgagcctgtcgggagctgctgcctgccaccaccatgtctgctgcaaatcctgagactccaaactcaaccatctccagagaggccagcacccagtcttcatcagctgcagctagccaaggctgggtgttaccagaaggcaaaatcgtgccaaacactgtttttgttggtggaattgatgctaggatggatgaaactgagattggaagctgctttggtagatacggttcagtgaaagaagtgaagataatcacgaatcgaactggtgtgtccaaaggctatggatttgtttcgtttgttaatgacgtggatgtccagaagatagtaggatcacagatacatttccatggtaaaaagctgaagctgggccctgcaatcaggaaacaaaagttatgtgctcgtcatgtgcagccacgtcctttggtagttaatcctcctcctccaccacagtttcagaacgtctggcggaatccaaacactgaaacctacctgcagccccaaatcacgccgaatcctgtaactcagcacgttcaggcttactctgcttatccacattcaccaggtcaggtcatcactggatgtcagttgcttgtatataattatcaggaatatcctacttatcccgattcagcatttcaggtcaccactggatatcagttgcctgtatataattatcagccatttcctgcttatccaagatcaccatttcaggtcactgctggatatcagttgcctgtatataattatcaggcatttcctgcttatccaaattcaccatttcaagtcgccactggatatcagttccctgtatacaattatcaggcatttcctgcttatccaaattcaccagttcaggtcaccactggatatcagttgcctgtatacaattatcaggcatttcctgcttatccaaattcaccatttcaagtcgccactggatatcagttccctgtatacaattatcaggcatttcctgcttatccaaattcaccagttcaggtcaccactggatatcagttgcctgtatacaattatcaggcatttcctgcttatccaaattcagcagttcaggtcaccactggatatcagttccatgtatacaattaccagatgccaccgcagtgccctgttggggagcaaaggagaaatctgtggaccgaagcatacaaatggtggtatcttgtctgtttaatccagagaagagactgataaattccgttgttactcaagatgactgcttcaagggtaaaagagtgcatcgctttagaagaagtttggcagtatttaaatctgttggatcctctcagctatctagtttcatgggaagttgctggttttgaatattaagctaaaagttttccactattacagaaattctgaattttggtaaatcacactgaaactttctgtataacttgtattattagactctctagttttatcttaacactgaaactgttcttcattagatgtttatttagaacctggttctgtgtttaatatatagtttaaagtaacaaataatcgagactgaaagaatgttaagatttatctgcaaggatttttaaaaaattgaaacttgcattttaagtgtttaaaagcaaatactgactttcaaaaaagtttttaaaacctgatttgaaagctaacaattttgatagtctgaacacaagcatttcacttctccaagaagtacctgtgaacagtacaatatttcagtattgagctttgcatttatgatttatctagaaatttacctcaaaagcagaatttttaaaactgcatttttaatcagtggaactcaatgtatagttagctttattgaagtcttatccaaacccagtaaaacagattctaagcaaacagtccaatcagtgagtcataatgtttattcaaagtattttatcttttatctagaatccacatatgtatgtccaatttgattgggatagtagttaggataactaaaattctgggcctaattttttaaagaatccaagacaaactaaactttactgggtatataaccttctcaatgagttaccattcttttttataaaaaaaattgttccttgaaatgctaaacttaatggctgtatgtgaaatttgcaaaatactggtattaaagaacgctgcagcttttttatgtcactcaaaggttaatcggagtatctgaaaggaattgtttttataaaaacattgaagtattagttacttgctataaatagatttttatttttgttttttagcctgttatatttccttctgtaaaataaaatatgtccagaagaggcatgttgtttctagattaggtagtgtcctcattttatattgtgaccacacagctagagcaccagagcccttttgctatactcacagtcttgttttcccagcctcttttactagtctttcaggaggtttgctcttagaactggtgatgtaaagaatggaagtagctgtatgagcagttcaaaggccaagccgtggaatggtagcaatgggatataatacctttctaagggaaacatttgtatcagtatcatttgatctgccatggacatgtgtttaaagtggctttctggcccttctttcaatggcttcttccctaaaacgtggagactctaagttaatgtcgttactatgggccatattactaatgcccactggggtctatgatttctcaaaattttcattcggaatccgaaggatacagtctttaaactttagaattcccaagaaggctttattacacctcagaaattgaaagcaccatgactttgtccattaaaaaattatccatagtttttttagtgcttttaacattccgacatacatcattctgtgattaaatctccagatttctgtaaatgatacctacattctaaagagttaattctaattattccgatatgaccttaaggaaaagtaaaggaataaatttttgtctttgttgaagtatttaatagagtaaggtaaagaagatattaagtccctttcaaaatggaaaattaattctaaactgagaaaaatgttcctactacctattgctgatactgtctttgcataaatgaataaaaataaactttttttcttcaaatgtg

SEQ ID NO: 126104 - DNA, 2048 bp, Homo sapiens
  Payload ID: 4727
  Gene Symbol: DAZ4
  Gene Name: deleted in azoospermia 4
  ENST ID: ENST00000382296
  CDS Start-End: 1-1956
atgtctgctgcaaatcctgagactccaaactcaaccatctccagagaggccagcacccagtcttcatcagctgcagctagccaaggctgggtgttaccagaaggcaaaatcgtgccaaacactgtttttgttggtggaattgatgctaggatggatgaaactgagattggaagctgctttggtagatacggttcagtgaaagaagtgaagataatcacgaatcgaactggtgtgtccaaaggctatggatttgtttcgtttgttaatgacgtggatgtccagaagatagtaggatcacagatacatttccatggtaaaaagctgaagctgggccctgcaatcaggaaacaaaagttatgtgctcgtcatgtgcagccacgtcctttggtagttaatcctcctcctccaccacagtttcagaacgtctggcggaatccaaacactgaaacctacctgcagccccaaatcacgccgaatcctgtaactcagcacgttcagtctgctgcaaatcctgagactccaaactcaaccatctccagagaggccagcacccagtcttcatcagctgcagctagccaaggctgggtgttaccagaaggcaaaatcgtgccaaacactgtttttgttggtggaattgatgctaggatggatgaaactgagattggaagctgctttggtagatacggttcagtgaaagaagtgaagataatcacgaatcgaactggtgtgtccaaaggctatggatttgtttcgtttgttaatgacgtggatgtccagaagatagtaggatcacagatacatttccatggtaaaaagctgaagctgggccctgcaatcaggaaacaaaagttatgtgctcgtcatgtgcagccacgtcctttggtagttaatcctcctcctccaccacagtttcagaacgtctggcggaatccaaacactgaaacctacctgcagccccaaatcacgccgaatcctgtaactcagcacgttcaggcttactctgcttatccacattcaccaggtcaggtcatcactggatgtcagttgcttgtatataattatcaggaatatcctacttatcccgattcagcatttcaggtcaccactggatatcagttgcctgtatataattatcagccatttcctgcttatccaagatcaccatttcaggtcactgctggatatcagttgcctgtatataattatcaggcatttcctgcttatccaaattcaccatttcaagtcgccactggatatcagttccctgtatacaattatcagccatttcctgcttatccaagttcaccatttcaggtcactgctggatatcagttgcctgtatataattatcaggcatttcctgcttatccaaattcaccatttcaagtcgccactggatatcagttccctgtatacaattatcaggcatttcctgcttatccaaattcaccagttcaggtcaccactggatatcagttgcctgtatacaattatcaggcatttcctgcttatccaaattcaccatttcaagtcgccactggatatcagttccctgtatacaattatcaggcatttcctgcttatccaaattcaccagttcaggtcaccactggatatcagttgcctgtatacaattatcaggcatttcctgcttatccaagttcaccatttcaggtcaccactggatatcagttgcctgtatataattatcaggcatttcctgcttatccaagttcaccatttcaggtcaccactggatatcagttgcctgtatataattatcaggcatttcctgcttatccaaattcagcagttcaggtcaccactggatatcagttccatgtatacaattaccagatgccaccgcagtgccctgttggggagcaaaggagaaatctgtggaccgaagcatacaaatggtggtatcttgtctgtttaatccagagaagagactgataaattccgttgttactcaagatgactgcttcaagggtaaaagagtgcatcgctttagaagaagtttggcagtatttaaatctgttggatcc

SEQ ID NO: 126105 - DNA, 3910 bp, Homo sapiens
  Payload ID: 4727
  Gene Symbol: DAZ4
  Gene Name: deleted in azoospermia 4
  ENST ID: ENST00000382314
  CDS Start-End: 211-2022
tcagtcggcctgcgctcctcagcctggcggttctacctccgagggttcgcccgcccttggttttccttacaccttagcctttggctcctttgaccactcgaagccccacagcgtgttccagcggacttcaccagcagacccagaagtggtgggtgaaacactgcctctgttcctccttgagcctgtcgggagctgctgcctgccaccaccatgtctgctgcaaatcctgagactccaaactcaaccatctccagagaggccagcacccagtcttcatcagctgcagctagccaaggctgggtgttaccagaaggcaaaatcgtgccaaacactgtttttgttggtggaattgatgctaggatggatgaaactgagattggaagctgctttggtagatacggttcagtgaaagaagtgaagataatcacgaatcgaactggtgtgtccaaaggctatggatttgtttcgtttgttaatgacgtggatgtccagaagatagtaggatcacagatacatttccatggtaaaaagctgaagctgggccctgcaatcaggaaacaaaagttatgtgctcgtcatgtgcagccacgtcctttggtagttaatcctcctcctccaccacagtttcagaacgtctggcggaatccaaacactgaaacctacctgcagccccaaatcacgccgaatcctgtaactcagcacgttcagtctgctgcaaatcctgagactccaaactcaaccatctccagagaggccagcacccagtcttcatcagctgcagctagccaaggctgggtgttaccagaaggcaaaatcgtgccaaacactgtttttgttggtggaattgatgctaggatggatgaaactgagattggaagctgctttggtagatacggttcagtgaaagaagtgaagataatcacgaatcgaactggtgtgtccaaaggctatggatttgtttcgtttgttaatgacgtggatgtccagaagatagtaggatcacagatacatttccatggtaaaaagctgaagctgggccctgcaatcaggaaacaaaagttatgtgctcgtcatgtgcagccacgtcctttggtagttaatcctcctcctccaccacagtttcagaacgtctggcggaatccaaacactgaaacctacctgcagccccaaatcacgccgaatcctgtaactcagcacgttcaggcttactctgcttatccacattcaccaggtcaggtcatcactggatgtcagttgcttgtatataattatcaggaatatcctacttatcccgattcagcatttcaggtcaccactggatatcagttgcctgtatataattatcagccatttcctgcttatccaagatcaccatttcaggtcactgctggatatcagttgcctgtatataattatcaggcatttcctgcttatccaaattcaccatttcaagtcgccactggatatcagttccctgtatacaattatcagccatttcctgcttatccaagttcaccatttcaggtcactgctggatatcagttgcctgtatataattatcaggcatttcctgcttatccaaattcaccatttcaagtcgccactggatatcagttccctgtatacaattatcaggcatttcctgcttatccaaattcaccagttcaggtcaccactggatatcagttgcctgtatacaattatcaggcatttcctgcttatccaaattcaccatttcaagtcgccactggatatcagttccctgtatacaattatcaggcatttcctgcttatccaaattcaccagttcaggtcaccactggatatcagttgcctgtatacaattatcaggcatttcctgcttatccaaattcagcagttcaggtcaccactggatatcagttccatgtatacaattaccagatgccaccgcagtgccctgttggggagcaaaggagaaatctgtggaccgaagcatacaaatggtggtatcttgtctgtttaatccagagaagagactgataaattccgttgttactcaagatgactgcttcaagggtaaaagagtgcatcgctttagaagaagtttggcagtatttaaatctgttggatcctctcagctatctagtttcatgggaagttgctggttttgaatattaagctaaaagttttccactattacagaaattctgaattttggtaaatcacactgaaactttctgtataacttgtattattagactctctagttttatcttaacactgaaactgttcttcattagatgtttatttagaacctggttctgtgtttaatatatagtttaaagtaacaaataatcgagactgaaagaatgttaagatttatctgcaaggatttttaaaaaattgaaacttgcattttaagtgtttaaaagcaaatactgactttcaaaaaagtttttaaaacctgatttgaaagctaacaattttgatagtctgaacacaagcatttcacttctccaagaagtacctgtgaacagtacaatatttcagtattgagctttgcatttatgatttatctagaaatttacctcaaaagcagaatttttaaaactgcatttttaatcagtggaactcaatgtatagttagctttattgaagtcttatccaaacccagtaaaacagattctaagcaaacagtccaatcagtgagtcataatgtttattcaaagtattttatcttttatctagaatccacatatgtatgtccaatttgattgggatagtagttaggataactaaaattctgggcctaattttttaaagaatccaagacaaactaaactttactgggtatataaccttctcaatgagttaccattcttttttataaaaaaaattgttccttgaaatgctaaacttaatggctgtatgtgaaatttgcaaaatactggtattaaagaacgctgcagcttttttatgtcactcaaaggttaatcggagtatctgaaaggaattgtttttataaaaacattgaagtattagttacttgctataaatagatttttatttttgttttttagcctgttatatttccttctgtaaaataaaatatgtccagaagaggcatgttgtttctagattaggtagtgtcctcattttatattgtgaccacacagctagagcaccagagcccttttgctatactcacagtcttgttttcccagcctcttttactagtctttcaggaggtttgctcttagaactggtgatgtaaagaatggaagtagctgtatgagcagttcaaaggccaagccgtggaatggtagcaatgggatataatacctttctaagggaaacatttgtatcagtatcatttgatctgccatggacatgtgtttaaagtggctttctggcccttctttcaatggcttcttccctaaaacgtggagactctaagttaatgtcgttactatgggccatattactaatgcccactggggtctatgatttctcaaaattttcattcggaatccgaaggatacagtctttaaactttagaattcccaagaaggctttattacacctcagaaattgaaagcaccatgactttgtccattaaaaaattatccatagtttttttagtgcttttaacattccgacatacatcattctgtgattaaatctccagatttctgtaaatgatacctacattctaaagagttaattctaattattccgatatgaccttaaggaaaagtaaaggaataaatttttgtctttgttgaagtatttaatagagtaaggtaaagaagatattaagtccctttcaaaatggaaaattaattctaaactgagaaaaatgttcctactacctattgctgatactgtctttgcataaatgaataaaaataaactttttttcttcaaa

SEQ ID NO: 126106 - DNA, 2405 bp, Homo sapiens
  Payload ID: 4727
  Gene Symbol: DAZ4
  Gene Name: deleted in azoospermia 4
  ENST ID: ENST00000382432
  CDS Start-End: 194-1870
ctcagcctggcggttctacctccgagggttcgcccgcccttggttttccttacaccttagcctttggctcctttgaccactcgaagccccacagcgtgttccagcggacttcaccagcagacccagaagtggtgggtgaaacactgcctctgttcctccttgagcctgtcgggagctgctgcctgccaccaccatgtctgctgcaaatcctgagactccaaactcaaccatctccagagaggccagcacccagtcttcatcagctgcagctagccaaggctgggtgttaccagaaggcaaaatcgtgccaaacactgtttttgttggtggaattgatgctaggatggatgaaactgagattggaagctgctttggtagatacggttcagtgaaagaagtgaagataatcacgaatcgaactggtgtgtccaaaggctatggatttgtttcgtttgttaatgacgtggatgtccagaagatagtaggatcacagatacatttccatggtaaaaagctgaagctgggccctgcaatcaggaaacaaaagttatgtgctcgtcatgtgcagccacgtcctttggtagttaatcctcctcctccaccacagtttcagaacgtctggcggaatccaaacactgaaacctacctgcagccccaaatcacgccgaatcctgtaactcagcacgttcaggcttactctgcttatccacattcaccaggtcaggtcatcactggatgtcagttgcttgtatataattatcaggaatatcctacttatcccgattcagcatttcaggtcaccactggatatcagttgcctgtatataattatcagccatttcctgcttatccaagatcaccatttcaggtcactgctggatatcagttgcctgtatataattatcaggcatttcctgcttatccaaattcaccatttcaagtcgccactggatatcagttccctgtatacaattatcagccatttcctgcttatccaagttcaccatttcaggtcactgctggatatcagttgcctgtatataattatcaggcatttcctgcttatccaaattcaccatttcaagtcgccactggatatcagttccctgtatacaattatcaggcatttcctgcttatccaaattcaccagttcaggtcaccactggatatcagttgcctgtatacaattatcaggcatttcctgcttatccaaattcaccatttcaagtcgccactggatatcagttccctgtatacaattatcaggcatttcctgcttatccaaattcaccagttcaggtcaccactggatatcagttgcctgtatacaattatcaggcatttcctgcttatccaagttcaccatttcaggtcaccactggatatcagttgcctgtatataattatcaggcatttcctgcttatccaagttcaccatttcaggtcaccactggatatcagttgcctgtatataattatcaggcatttcctgcttatccaagttcaccatttcaggtcaccactggatatcagttgcctgtatataattatcaggcatttcctgcttatccaagttcaccatttcaggtcaccactggatatcagttgcctgtatataattatcaggcatttcctgcttatccaagttcaccatttcaggtcaccactggatatcagttgcctgtatataattatcaggcatttcctgcttatccaaattcagcagttcaggtcaccactggatatcagttccatgtatacaattaccagatgccaccgcagtgccctgttggggagcaaaggagaaatctgtggaccgaagcatacaaatggtggtatcttgtctgtttaatccagagaagagactgataaattccgttgttactcaagatgactgcttcaagggtaaaagagtgcatcgctttagaagaagtttggcagtatttaaatctgttggatcctctcagctatctagtttcatgggaagttgctggttttgaatattaagctaaaagttttccactattacagaaattctgaattttggtaaatcacactgaaactttctgtataacttgtattattagactctctagttttatcttaacactgaaactgttcttcattagatgtttatttagaacctggttctgtgtttaatatatagtttaaagtaacaaataatcgagactgaaagaatgttaagatttatctgcaaggatttttaaaaaattgaaacttgcattttaagtgtttaaaagcaaatactgactttcaaaaaagtttttaaaacctgatttgaaagctaacaattttgatagtctgaacacaagcatttcacttctccaagaagtacctgtgaacagtacaatatttcagtattgagctttgcatttatgattta

SEQ ID NO: 126107 - DNA, 3271 bp, Homo sapiens
  Payload ID: 4727
  Gene Symbol: DAZ4
  Gene Name: deleted in azoospermia 4
  Uniprot ID: Q86SG3
  ENST ID: ENST00000449750
  CDS Start-End: 211-1383
tcagtcggcctgcgctcctcagcctggcggttctacctccgagggttcgcccgcccttggttttccttacaccttagcctttggctcctttgaccactcgaagccccacagcgtgttccagcggacttcaccagcagacccagaagtggtgggtgaaacactgcctctgttcctccttgagcctgtcgggagctgctgcctgccaccaccatgtctgctgcaaatcctgagactccaaactcaaccatctccagagaggccagcacccagtcttcatcagctgcagctagccaaggctgggtgttaccagaaggcaaaatcgtgccaaacactgtttttgttggtggaattgatgctaggatggatgaaactgagattggaagctgctttggtagatacggttcagtgaaagaagtgaagataatcacgaatcgaactggtgtgtccaaaggctatggatttgtttcgtttgttaatgacgtggatgtccagaagatagtaggatcacagatacatttccatggtaaaaagctgaagctgggccctgcaatcaggaaacaaaagttatgtgctcgtcatgtgcagccacgtcctttggtagttaatcctcctcctccaccacagtttcagaacgtctggcggaatccaaacactgaaacctacctgcagccccaaatcacgccgaatcctgtaactcagcacgttcaggcttactctgcttatccacattcaccaggtcaggtcatcactggatgtcagttgcttgtatataattatcaggaatatcctacttatcccgattcagcatttcaggtcaccactggatatcagttgcctgtatataattatcagccatttcctgcttatccaagatcaccatttcaggtcactgctggatatcagttgcctgtatataattatcaggcatttcctgcttatccaaattcaccatttcaagtcgccactggatatcagttccctgtatacaattatcagccatttcctgcttatccaagttcaccatttcaggtcactgctggatatcagttgcctgtatataattatcaggcatttcctgcttatccaaattcaccatttcaagtcgccactggatatcagttccctgtatacaattatcaggcatttcctgcttatccaaattcaccagttcaggtcaccactggatatcagttgcctgtatacaattatcaggcatttcctgcttatccaaattcagcagttcaggtcaccactggatatcagttccatgtatacaattaccagatgccaccgcagtgccctgttggggagcaaaggagaaatctgtggaccgaagcatacaaatggtggtatcttgtctgtttaatccagagaagagactgataaattccgttgttactcaagatgactgcttcaagggtaaaagagtgcatcgctttagaagaagtttggcagtatttaaatctgttggatcctctcagctatctagtttcatgggaagttgctggttttgaatattaagctaaaagttttccactattacagaaattctgaattttggtaaatcacactgaaactttctgtataacttgtattattagactctctagttttatcttaacactgaaactgttcttcattagatgtttatttagaacctggttctgtgtttaatatatagtttaaagtaacaaataatcgagactgaaagaatgttaagatttatctgcaaggatttttaaaaaattgaaacttgcattttaagtgtttaaaagcaaatactgactttcaaaaaagtttttaaaacctgatttgaaagctaacaattttgatagtctgaacacaagcatttcacttctccaagaagtacctgtgaacagtacaatatttcagtattgagctttgcatttatgatttatctagaaatttacctcaaaagcagaatttttaaaactgcatttttaatcagtggaactcaatgtatagttagctttattgaagtcttatccaaacccagtaaaacagattctaagcaaacagtccaatcagtgagtcataatgtttattcaaagtattttatcttttatctagaatccacatatgtatgtccaatttgattgggatagtagttaggataactaaaattctgggcctaattttttaaagaatccaagacaaactaaactttactgggtatataaccttctcaatgagttaccattcttttttataaaaaaaattgttccttgaaatgctaaacttaatggctgtatgtgaaatttgcaaaatactggtattaaagaacgctgcagcttttttatgtcactcaaaggttaatcggagtatctgaaaggaattgtttttataaaaacattgaagtattagttacttgctataaatagatttttatttttgttttttagcctgttatatttccttctgtaaaataaaatatgtccagaagaggcatgttgtttctagattaggtagtgtcctcattttatattgtgaccacacagctagagcaccagagcccttttgctatactcacagtcttgttttcccagcctcttttactagtctttcaggaggtttgctcttagaactggtgatgtaaagaatggaagtagctgtatgagcagttcaaaggccaagccgtggaatggtagcaatgggatataatacctttctaagggaaacatttgtatcagtatcatttgatctgccatggacatgtgtttaaagtggctttctggcccttctttcaatggcttcttccctaaaacgtggagactctaagttaatgtcgttactatgggccatattactaatgcccactggggtctatgatttctcaaaattttcattcggaatccgaaggatacagtctttaaactttagaattcccaagaaggctttattacacctcagaaattgaaagcaccatgactttgtccattaaaaaattatccatagtttttttagtgcttttaacattccgacatacatcattctgtgattaaatctccagatttctgtaaatgatacctacattctaaagagttaattctaattattccgatatgaccttaaggaaaagtaaaggaataaatttttgtctttgttgaagtatttaatagagtaaggtaaagaagatattaagtccctttcaaaatggaaaattaattctaaactgagaaaaatgttcctactacctattgctgatactgtctttgcataaatgaataaaaataaactttttttcttcaaa

SEQ ID NO: 126108 - DNA, 3277 bp, Homo sapiens
  Payload ID: 4727
  Gene Symbol: DAZ4
  Gene Name: deleted in azoospermia 4
  ENST ID: ENST00000415508
  CDS Start-End: 285-1385
attggctcaggccgataccacgcgccccgatacccggcacaggagccacctcccagagccccgcagtccatgcctcagtcggcctgcgctcctcagcctggcggttctacctccgagggttcgcccgcccttggttttccttacaccttagcctttggctcctttgaccactcgaagccccacagcgtgttccagcggacttcaccagcagacccagaagtggtgggtgaaacactgcctctgttcctccttgagcctgtcgggagctgctgcctgccaccaccatgtctgctgcaaatcctgagactccaaactcaaccatctccagagaggccagcacccagtcttcatcagctgcagctagccaaggctgggtgttaccagaaggcaaaatcgtgccaaacactgtttttgttggtggaattgatgctaggatggatgaaactgagattggaagctgctttggtagatacggttcagtgaaagaagtgaagataatcacgaatcgaactggtgtgtccaaaggctatggatttgtttcgtttgttaatgacgtggatgtccagaagatagtaggatcacagatacatttccatggtaaaaagctgaagctgggccctgcaatcaggaaacaaaagttatgtgctcgtcatgtgcagccacgtcctttggtagttaatcctcctcctccaccacagtttcagaacgtctggcggaatccaaacactgaaacctacctgcagccccaaatcacgccgaatcctgtaactcagcacgttcaggcttactctgcttatccacattcaccaggtcaggtcatcactggatgtcagttgcttgtatataattatcaggaatatcctacttatcccgattcagcatttcaggtcaccactggatatcagttgcctgtatataattatcagccatttcctgcttatccaagttcaccatttcaggtcactgctggatatcagttgcctgtatataattatcaggcatttcctgcttatccaagttcaccatttcaggtcaccactggatatcagttgcctgtatataattatcaggcatttcctgcttatccaagttcaccatttcaggtcaccactggatatcagttgcctgtatataattatcaggcatttcctgcttatccaagttcaccatttcaggtcaccactggatatcagttgcctgtatataattatcaggcatttcctgcttatccaaattcagcagttcaggtcaccactggatatcagttccatgtatacaattaccagatgccaccgcagtgccctgttggggagcaaaggagaaatctgtggaccgaagcatacaaatggtggtatcttgtctgtttaatccagagaagagactgataaattccgttgttactcaagatgactgcttcaagggtaaaagagtgcatcgctttagaagaagtttggcagtatttaaatctgttggatcctctcagctatctagtttcatgggaagttgctggttttgaatattaagctaaaagttttccactattacagaaattctgaattttggtaaatcacactgaaactttctgtataacttgtattattagactctctagttttatcttaacactgaaactgttcttcattagatgtttatttagaacctggttctgtgtttaatatatagtttaaagtaacaaataatcgagactgaaagaatgttaagatttatctgcaaggatttttaaaaaattgaaacttgcattttaagtgtttaaaagcaaatactgactttcaaaaaagtttttaaaacctgatttgaaagctaacaattttgatagtctgaacacaagcatttcacttctccaagaagtacctgtgaacagtacaatatttcagtattgagctttgcatttatgatttatctagaaatttacctcaaaagcagaatttttaaaactgcatttttaatcagtggaactcaatgtatagttagctttattgaagtcttatccaaacccagtaaaacagattctaagcaaacagtccaatcagtgagtcataatgtttattcaaagtattttatcttttatctagaatccacatatgtatgtccaatttgattgggatagtagttaggataactaaaattctgggcctaattttttaaagaatccaagacaaactaaactttactgggtatataaccttctcaatgagttaccattcttttttataaaaaaaattgttccttgaaatgctaaacttaatggctgtatgtgaaatttgcaaaatactggtattaaagaacgctgcagcttttttatgtcactcaaaggttaatcggagtatctgaaaggaattgtttttataaaaacattgaagtattagttacttgctataaatagatttttatttttgttttttagcctgttatatttccttctgtaaaataaaatatgtccagaagaggcatgttgtttctagattaggtagtgtcctcattttatattgtgaccacacagctagagcaccagagcccttttgctatactcacagtcttgttttcccagcctcttttactagtctttcaggaggtttgctcttagaactggtgatgtaaagaatggaagtagctgtatgagcagttcaaaggccaagccgtggaatggtagcaatgggatataatacctttctaagggaaacatttgtatcagtatcatttgatctgccatggacatgtgtttaaagtggctttctggcccttctttcaatggcttcttccctaaaacgtggagactctaagttaatgtcgttactatgggccatattactaatgcccactggggtctatgatttctcaaaattttcattcggaatccgaaggatacagtctttaaactttagaattcccaagaaggctttattacacctcagaaattgaaagcaccatgactttgtccattaaaaaattatccatagtttttttagtgcttttaacattccgacatacatcattctgtgattaaatctccagatttctgtaaatgatacctacattctaaagagttaattctaattattccgatatgaccttaaggaaaagtaaaggaataaatttttgtctttgttgaagtatttaatagagtaaggtaaagaagatattaagtccctttcaaaatggaaaattaattctaaactgagaaaaatgttcctactacctattgctgatactgtctttgcataaatgaataaaaataaactttttttcttcaaatgtg

SEQ ID NO: 126109 - DNA, 1891 bp, Homo sapiens
  Payload ID: 4727
  Gene Symbol: DAZ4
  Gene Name: deleted in azoospermia 4
  ENST ID: ENST00000440066
  CDS Start-End: 188-1648
ctggcggttctacctccgagggttcgcccgcccttggttttccttacaccttagcctttggctcctttgaccactcgaagccccacagcgtgttccagcggacttcaccagcagacccagaagtggtgggtgaaacactgcctctgttcctccttgagcctgtcgggagctgctgcctgccaccaccatgtctgctgcaaatcctgagactccaaactcaaccatctccagagaggccagcacccagtcttcatcagctgcagctagccaaggctgggtgttaccagaaggcaaaatcgtgccaaacactgtttttgttggtggaattgatgctaggatggatgaaactgagattggaagctgctttggtagatacggttcagtgaaagaagtgaagataatcacgaatcgaactggtgtgtccaaaggctatggatttgtttcgtttgttaatgacgtggatgtccagaagatagtaggatcacagatacatttccatggtaaaaagctgaagctgggccctgcaatcaggaaacaaaagttatgtgctcgtcatgtgcagccacgtcctttggtagttaatcctcctcctccaccacagtttcagaacgtctggcggaatccaaacactgaaacctacctgcagccccaaatcacgccgaatcctgtaactcagcacgttcaggcttactctgcttatccacattcaccaggtcaggtcatcactggatgtcagttgcttgtatataattatcaggaatatcctacttatcccgattcagcatttcaggtcaccactggatatcagttgcctgtatataattatcagccatttcctgcttatccaagatcaccatttcaggtcactgctggatatcagttgcctgtatataattatcaggcatttcctgcttatccaaattcaccatttcaagtcgccactggatatcagttccctgtatacaattatcagccatttcctgcttatccaagttcaccatttcaggtcactgctggatatcagttgcctgtatataattatcaggcatttcctgcttatccaaattcaccatttcaagtcgccactggatatcagttccctgtatacaattatcaggcatttcctgcttatccaaattcaccagttcaggtcaccactggatatcagttgcctgtatacaattatcaggcatttcctgcttatccaaattcaccatttcaagtcgccactggatatcagttccctgtatacaattatcaggcatttcctgcttatccaaattcaccagttcaggtcaccactggatatcagttgcctgtatacaattatcaggcatttcctgcttatccaagttcaccatttcaggtcaccactggatatcagttgcctgtatataattatcaggcatttcctgcttatccaagttcaccatttcaggtcaccactggatatcagttgcctgtatataattatcaggcatttcctgcttatccaaattcagcagttcaggtcaccactggatatcagttccatgtatacaattaccagatgccaccgcagtgccctgttggggagcaaaggagaaatctgtggaccgaagcatacaaatggtggtatcttgtctgtttaatccagagaagagactgataaattccgttgttactcaagatgactgcttcaagggtaaaagagtgcatcgctttagaagaagtttggcagtatttaaatctgttggatcctctcagctatctagtttcatgggaagttgctggttttgaatattaagctaaaagttttccactattacagaaattctgaattttggtaaatcacactgaaactttctgtataacttgtattattagactctctagttttatcttaacactg

SEQ ID NO: 126110 - DNA, 1832 bp, Homo sapiens
  Payload ID: 4727
  Gene Symbol: DAZ4
  Gene Name: deleted in azoospermia 4
  ENST ID: ENST00000634662
  CDS Start-End: 1-1740
atgtctgctgcaaatcctgagactccaaactcaaccatctccagagaggccagcacccagtcttcatcagctgcagctagccaaggctgggtgttaccagaaggcaaaatcgtgccaaacactgtttttgttggtggaattgatgctaggatggatgaaactgagattggaagctgctttggtagatacggttcagtgaaagaagtgaagataatcacgaatcgaactggtgtgtccaaaggctatggatttgtttcgtttgttaatgacgtggatgtccagaagatagtaggatcacagatacatttccatggtaaaaagctgaagctgggccctgcaatcaggaaacaaaagttatgtgctcgtcatgtgcagccacgtcctttggtagttaatcctcctcctccaccacagtttcagaacgtctggcggaatccaaacactgaaacctacctgcagccccaaatcacgccgaatcctgtaactcagcacgttcagtctgctgcaaatcctgagactccaaactcaaccatctccagagaggccagcacccagtcttcatcagctgcagctagccaaggctgggtgttaccagaaggcaaaatcgtgccaaacactgtttttgttggtggaattgatgctaggatggatgaaactgagattggaagctgctttggtagatacggttcagtgaaagaagtgaagataatcacgaatcgaactggtgtgtccaaaggctatggatttgtttcgtttgttaatgacgtggatgtccagaagatagtaggatcacagatacatttccatggtaaaaagctgaagctgggccctgcaatcaggaaacaaaagttatgtgctcgtcatgtgcagccacgtcctttggtagttaatcctcctcctccaccacagtttcagaacgtctggcggaatccaaacactgaaacctacctgcagccccaaatcacgccgaatcctgtaactcagcacgttcaggcttactctgcttatccacattcaccaggtcaggtcatcactggatgtcagttgcttgtatataattatcaggaatatcctacttatcccgattcagcatttcaggtcaccactggatatcagttgcctgtatataattatcagccatttcctgcttatccaagatcaccatttcaggtcactgctggatatcagttgcctgtatataattatcaggcatttcctgcttatccaaattcaccatttcaagtcgccactggatatcagttccctgtatacaattatcagccatttcctgcttatccaagttcaccatttcaggtcactgctggatatcagttgcctgtatataattatcaggcatttcctgcttatccaaattcaccatttcaagtcgccactggatatcagttccctgtatacaattatcaggcatttcctgcttatccaaattcaccagttcaggtcaccactggatatcagttgcctgtatacaattatcaggcatttcctgcttatccaagttcaccatttcaggtcaccactggatatcagttgcctgtatataattatcaggcatttcctgcttatccaaattcagcagttcaggtcaccactggatatcagttccatgtatacaattaccagatgccaccgcagtgccctgttggggagcaaaggagaaatctgtggaccgaagcatacaaatggtggtatcttgtctgtttaatccagagaagagactgataaattccgttgttactcaagatgactgcttcaagggtaaaagagtgcatcgctttagaagaagtttggcagtatttaaatctgttggatcc

SEQ ID NO: 126111 - DNA, 3104 bp, Homo sapiens
  Payload ID: 4728
  Gene Symbol: DAZL
  Gene Name: deleted in azoospermia-like
  Uniprot ID: Q92904
  ENST ID: ENST00000250863
  CDS Start-End: 289-1236
actcccacgcgcctccgccccgccagcctcatttctggcgcgctctccccgtggctccgcaagatggcggcgggcctgctgagggacttgccttcttaaacttcgagggccggagcttccttaggaagtggttccctcctggtccctgtacttggtggggtgggcggggttcgtgggggcctcagcgtggggtgtggggcgtcctgaaggcatggccctgtagctgagggggctgggccggaagtgcctctggtcccctcgcgcctgtcagctgcgggggacttgctgatggcggctccctcgtgtggcggcgacagaaaagctcgcctgacgccatctttgccgcacgagtctactgcaaatcctgaaactccaaactcaaccatctccagagaggccagcacccagtcctcatcagctgcaaccagccaaggctatattttaccagaaggcaaaatcatgccaaacactgtttttgttggaggaattgatgttaggatggatgaaactgagattagaagcttctttgctagatatggttcagtgaaagaagtgaagataatcactgatcgaactggtgtgtccaaaggctatggatttgtttcattttttaatgacgtggatgtgcagaagatagtagaatcacagataaatttccatggtaaaaagctgaagctgggccctgcaatcaggaaacaaaatttatgtgcttatcatgtgcagccacgtcctttggtttttaatcatcctcctccaccacagtttcagaatgtctggactaatccaaacactgaaacttatatgcagcccacaaccacgatgaatcctataactcagtatgttcaggcatatcctacttacccaaattcaccagttcaggtcatcactggatatcagttgcctgtatataattatcagatgccaccacagtggcctgttggggagcaaaggagctatgttgtacctccggcttattcagctgttaactaccactgtaatgaagttgatccaggagctgaagttgtgccaaatgaatgttcagttcatgaagctactccaccctctggaaatggcccacaaaagaaatctgtggaccgaagcatacaaacggtggtatcttgtctgtttaatccagagaacagactgagaaactctgttgttactcaagatgactacttcaaggataaaagagtgcatcactttagaagaagtcgggcaatgcttaaatctgtttgatcctcctggcttatctagttacatgggaagttgctggttttgaatattaagctaaaaggtttccactattatagaaattctgaattttggtaaatcacactcaaactttgtgtataagttgtattattagactctctagttttatcttaaactgttcttcattagatgtttatttagaaactggttctgtgttgaaatatagttgaaagtaaaaaaataattgagactgaaagaaactaagatttatctgcaaggattttttaaaaattggcattttaagtgtttaaaagcaaatactgattttcaaaaaaatgtttttaaaaacctattttgaaaggtcagaattttgttggtctgaatacaaacatttcacttctccaacaagtacctgtgaacagtacagtatttacagtattgagctttgcatttatgatttctccagaaatttaccacaaaagcaaaatttttaaaactgcatttttaatcagtggaactcaatatatagttagctttattgaagtcttcttatctaaacccagcaaaacagattcaaagcgaacagtccaatcagtgggtcatatgtttattcaaaatattttatcttttagctagaatccacacatatatatcctatttgattagggtagtaattaggataactaaaattctgggcctaattttttaaagaatccaagacaaactaaactttactaggtacataagcttctcaatgagtcaccattcttcttttttgtaaaaacttttttctttgaaatgctaaacttggctgtatgtcaaattgtgcaaaatattggtattaaagaatgctgcaacttttttatgtctcttagaggttaatcagagtatctgaagggaattgtttttataaaaacattgaaatattagttacttgctataaatagatttagtctgttatatttccttttgtaaagtaaaatatgtccagaagagtcaaagtagttagttttggttatttctaaaccacaaaagttgtttaataagtatatcttaagaatgtgctagagttaaaagttagcattgtttctagattagctggtgtcttcattttacattgtgacaaacagctagagcatcagagcccttttgctataccacagtctttcgtttccagcctttgtcactagtctttgaggaggtttgctcctagaactggtgatataaagaatgaaagtagctgtatgagcagagcagttcaagggccaaaccctggaacggtagcaatgggatataatacctttctaagggaaaaagttgtatcagtaccatttgatctgccatggacatgagtttaaagcggctttctggcccttctttcagtgacttcttccctaaaatgtagaaattctaacttaatgtagttactgtgagccatattactagtgccccctagggtctataattccttaaaattttcattctgaatctgaaggagagagtcttttaactttagaattcccaagagggctttattacacctcagaaattgaaagcactatgaatttgtccatttaaaaatgatctgtagtttttttggtgctataacattctgacacatatcattctgtgattaaatctccagcttactataaatgatatctatattctaaagagctacttctaattattccaatatgaccttaaggaaaagtaagggaataaatttttgtctttgttggagtgaagcatttaaaagagtaagggtaaaaaagataaagtcctgaacctttcaaaatggaaaattaattctaaacttagaaatatgcttctgcctattgctgatactgtctttgcatacatgaataaaaataaagtttttttcttcaaaa

SEQ ID NO: 126112 - DNA, 3050 bp, Homo sapiens
  Payload ID: 4728
  Gene Symbol: DAZL
  Gene Name: deleted in azoospermia-like
  Uniprot ID: Q92904
  ENST ID: ENST00000399444
  CDS Start-End: 295-1182
attggctgaggccgataccacgcgccccgatacccggcgcaggagccacctccctgagccccgcggaccacgcctcagtccgcctgcgctcctcagcctgacggtccgcctttcggggctcctcagccttgtcacccgctcttggttttccttttctcttcatctttggctcctttgaccactcgaagccgcgcagcgggttccagcggacctcacagcagccccagaagtggtgcgccaagcacagcctctgctcctcctggagccggtcgggaactgctgcctgccgccatcatgtctactgcaaatcctgaaactccaaactcaaccatctccagagaggccagcacccagtcctcatcagctgcaaccagccaaggctatattttaccagaaggcaaaatcatgccaaacactgtttttgttggaggaattgatgttaggatggatgaaactgagattagaagcttctttgctagatatggttcagtgaaagaagtgaagataatcactgatcgaactggtgtgtccaaaggctatggatttgtttcattttttaatgacgtggatgtgcagaagatagtagaatcacagataaatttccatggtaaaaagctgaagctgggccctgcaatcaggaaacaaaatttatgtgcttatcatgtgcagccacgtcctttggtttttaatcatcctcctccaccacagtttcagaatgtctggactaatccaaacactgaaacttatatgcagcccacaaccacgatgaatcctataactcagtatgttcaggcatatcctacttacccaaattcaccagttcaggtcatcactggatatcagttgcctgtatataattatcagatgccaccacagtggcctgttggggagcaaaggagctatgttgtacctccggcttattcagctgttaactaccactgtaatgaagttgatccaggagctgaagttgtgccaaatgaatgttcagttcatgaagctactccaccctctggaaatggcccacaaaagaaatctgtggaccgaagcatacaaacggtggtatcttgtctgtttaatccagagaacagactgagaaactctgttgttactcaagatgactacttcaaggataaaagagtgcatcactttagaagaagtcgggcaatgcttaaatctgtttgatcctcctggcttatctagttacatgggaagttgctggttttgaatattaagctaaaaggtttccactattatagaaattctgaattttggtaaatcacactcaaactttgtgtataagttgtattattagactctctagttttatcttaaactgttcttcattagatgtttatttagaaactggttctgtgttgaaatatagttgaaagtaaaaaaataattgagactgaaagaaactaagatttatctgcaaggattttttaaaaattggcattttaagtgtttaaaagcaaatactgattttcaaaaaaatgtttttaaaaacctattttgaaaggtcagaattttgttggtctgaatacaaacatttcacttctccaacaagtacctgtgaacagtacagtatttacagtattgagctttgcatttatgatttctccagaaatttaccacaaaagcaaaatttttaaaactgcatttttaatcagtggaactcaatatatagttagctttattgaagtcttcttatctaaacccagcaaaacagattcaaagcgaacagtccaatcagtgggtcatatgtttattcaaaatattttatcttttagctagaatccacacatatatatcctatttgattagggtagtaattaggataactaaaattctgggcctaattttttaaagaatccaagacaaactaaactttactaggtacataagcttctcaatgagtcaccattcttcttttttgtaaaaacttttttctttgaaatgctaaacttggctgtatgtcaaattgtgcaaaatattggtattaaagaatgctgcaacttttttatgtctcttagaggttaatcagagtatctgaagggaattgtttttataaaaacattgaaatattagttacttgctataaatagatttagtctgttatatttccttttgtaaagtaaaatatgtccagaagagtcaaagtagttagttttggttatttctaaaccacaaaagttgtttaataagtatatcttaagaatgtgctagagttaaaagttagcattgtttctagattagctggtgtcttcattttacattgtgacaaacagctagagcatcagagcccttttgctataccacagtctttcgtttccagcctttgtcactagtctttgaggaggtttgctcctagaactggtgatataaagaatgaaagtagctgtatgagcagagcagttcaagggccaaaccctggaacggtagcaatgggatataatacctttctaagggaaaaagttgtatcagtaccatttgatctgccatggacatgagtttaaagcggctttctggcccttctttcagtgacttcttccctaaaatgtagaaattctaacttaatgtagttactgtgagccatattactagtgccccctagggtctataattccttaaaattttcattctgaatctgaaggagagagtcttttaactttagaattcccaagagggctttattacacctcagaaattgaaagcactatgaatttgtccatttaaaaatgatctgtagtttttttggtgctataacattctgacacatatcattctgtgattaaatctccagcttactataaatgatatctatattctaaagagctacttctaattattccaatatgaccttaaggaaaagtaagggaataaatttttgtctttgttggagtgaagcatttaaaagagtaagggtaaaaaagataaagtcctgaacctttcaaaatggaaaattaattctaaacttagaaatatgcttctgcctattgctgatactgtctttgcatacatgaataaaaataaagtttttttcttcaaaa

SEQ ID NO: 126113 - DNA, 725 bp, Homo sapiens
  Payload ID: 4728
  Gene Symbol: DAZL
  Gene Name: deleted in azoospermia-like
  ENST ID: ENST00000454457
  CDS Start-End: 114-725
cctgagacaaaggccaggcctctcctcagggtacgttgcgctggttcatagctcatttatcaagcccatccacttctgcctgatcatcaaggccgccttcaacctgtccacccatgggagcagacccttaccactcatcagcacagtgcctcagcattctcttctccttgtctttgcactctccaggtctcccagtgctgatgtcttcctctctgctacttctgccaaagtctactgcaaatcctgaaactccaaactcaaccatctccagagaggccagcacccagtcctcatcagctgcaaccagccaaggctatattttaccagaaggcaaaatcatgccaaacactgtttttgttggaggaattgatgttaggatggatgaaactgagattagaagcttctttgctagatatggttcagtgaaagaagtgaagataatcactgatcgaactggtgtgtccaaaggctatggatttgtttcattttttaatgacgtggatgtgcagaagatagtagaatcacagataaatttccatggtaaaaagctgaagctgggccctgcaatcaggaaacaaaatttatgtgcttatcatgtgcagccacgtcctttggtttttaatcatcctcctccaccacagtttcagaatgtctggactaatccaaacactgaaacttatatgcagcccacaaccacgatgaatcctataactcagtatgttcag

SEQ ID NO: 126114 - DNA, 1251 bp, Homo sapiens
  Payload ID: 4729
  Gene Symbol: DEC1
  Gene Name: deleted in esophageal cancer 1
  Uniprot ID: Q9P2X7
  ENST ID: ENST00000374016
  CDS Start-End: 520-732
ctattgtttctacctcaccctggcccaggaagacagatctactgaggaaagccctgaacactctgcggcttctctgagaaaccctatcgaaggggatgtggaatcccagagctactcttgctatcaactcgccgcatgaccttgggaaaatcatttcacctggttcagcaatgatttactgagctattgaaggccttactttccagatccagatccttgtgcatacaactgacttgtgtgggtgaggcttgcagaaaaaatcagctagaacagccttgggggtagtggcaaggtggccagagcaattgactgggagctgggaacaggaatgaagaggaagagctgataagaaacatgcccagagcagatttgatgctactgccaatgtacctgaataagaagacaactctttctggaaaaagggaaaacttgaagggctattgaaggccgctagaaagtacagaaggaactttggatgtgggagagaaagacaaggagaaacctgaaagcagcccagttatgacaatgaatgttctggaggctgggaagtggaagagcattgtgccagcacctggtgagggccttcttgccgtgttacacatgatggtttttactgatgccctgcacagagagaggtctgtaaagtggcaagcaggagtctgctacaatggaggaaaggattttgctgtatctcttgccaggcccaaggctgcagagggaattgcagattgaatgtaagtgacttggaaaaggaagaggagttgccagaaacagctaaaatgtcagtagaagacttgacagcttgagaatagaggaaaaaataaaagcgaagcagacaaaaagaaccttacctcccccacaatacaacattgggctgctgaacccacaaaaatctaaatccgtttagaatcatctatttaactcctcagagacatgcacaaactattctagagaggcttgtgcctacgaagattacttaagaatgtgttgacacatttggagggggttaatttaccagttatcatttactagaaaggctttttctataagaatatatgaaagagtttcctcggagcattcaaccgggcttctttgtagggtatgtgtactgcttggagctacggaagaccacgtcctagaagtgctgtgtccctgaggcacacctatgtgtgttatctctctggcatactttccaacaaggattcttttctagtctatacattctgattaatttgcagtcagaggcaatgc

SEQ ID NO: 126115 - DNA, 210 bp, Homo sapiens
  Payload ID: 4729
  Gene Symbol: DEC1
  Gene Name: deleted in esophageal cancer 1
  ENST ID: ENST00000614246
  CDS Start-End: 1-210
ttatttcttccagttctggaggctgggaagtggaagagcattgtgccagcacctggtgagggccttcttgccgtgttacacatgatggtttttactgatgccctgcacagagagaggtctgtaaagtggcaagcaggagtctgctacaatggaggaaaggattttgctgtatctcttgccaggcccaaggctgcagagggaattggtaat

SEQ ID NO: 126116 - DNA, 6426 bp, Homo sapiens
  Payload ID: 4730
  Gene Symbol: DLEC1
  Gene Name: deleted in lung and esophageal cancer 1
  Uniprot ID: Q9Y238
  ENST ID: ENST00000308059
  CDS Start-End: 22-5289
gttagcggcgtctcggttgccatggagaccaggagctccaaaacgcggaggtctttagcgtcccggaccaacgagtgccaggggacaatgtgggcgccaacttcgccaccagccgggtccagcagccccagccagcccacctggaagtcctccttgtattcctccctcgcctactctgaggccttccactacagcttcgcagcccggccccgccgcctcacgcagcttgcgctggcgcagcgtcccgagcctcagctgcttcgtctgcgcccctcctcgctgcgcacccaagatatctcgcacttgctcaccggcgtcttccgcaacttgtactcagccgaggtcatcggcgacgaagtgagcgcaagcttgatcaaggcccgcggcagcgagaatgagcgccacgaggagttcgtggaccagctgcagcagattcgggagctctataagcagcggctggatgagtttgaaatgttggagagacatatcactcaggcccaagcacgggctattgcggaaaatgagcgggtcatgagccaggctggagtacaggacctcgagagccttgtcaggttgcctccagtgaagagtgtctccagatggtgtatagacagcgagttgctacggaaacatcatttgatctccccagaagattactacaccgatacagtgccgtttcactctgcacctaaaggcatctccctacctggatgttcaaaactgacatttagctgtgagaagcgttccgtccagaagaaagagctgaacaagaagcttgaagattcatgcaggaagaagcttgctgagttcgaagatgagttagaccacactgtggacagcctgacatggaatttaactcctaaggccaaagaaaggaccagagaacctctcaagaaagcaagtcaaccaaggaataaaaactggatgaaccacttacgtgtgccacagagagagctagacagacttctgcttgccagaatggagagtcggaaccacttcctaaaaaatccccgtttttttcctcctaacactcgatatggaggcaagtctcttgtttttcctccaaagaagccagcaccgataggagaattccagagtacagagccagaacagagttgtgctgatactccagtgtttctagctaagccaccaattgggtttttcacagattatgaaattggtccagtttatgagatggtaattgcgctgcagaacaccaccacgaccagccgctacctgcgagtcctcccgccttccacgccatacttcgctctgggactggggatgttcccaggaaaaggtggaatggtggctcctggaatgacctgccagtacattgtccagttttttcccgactgccttggggattttgatgattttattttagtggagacccagtcagcccacacacttctgatccccctgcaggcccggaggccgccccccgtgctgacattgtcaccggtgttggactgtggttactgcctcattgggggagtcaagatgaccagattcatctgcaaaaatgtgggtttcagtgttggcaggttctgcattatgcccaaaacaagctggccaccactaagtttcaaggccattgcaaccgtcggctttgttgaacaacctccttttggaatcctgccttcggtgtttgagctggccccgggacatgctatattagtggaggtcttgttttccccaaagagcctaggaaaggcagagcagaccttcatcatcatgtgcgacaactgccagataaaggagctggtgaccataggaattgggcagctgattgctttggatctgatctatatttctggtgaaaaaagccagccagaccctggagagctcacagacttaacagcccagcacttcatacgatttgagcctgaaaaccttcggtccacggctaggaagcagctgattattagaaatgctacgcacgtggagctggccttctactggcagatcatgaagcccaacctgcagcccctcatgcctggagaaaccttcagcatggacagcatcaagtgctaccccgacaaggagactgccttctccatcatgcccagaaagggggttctaagcccccacacagaccacgagttcatcctgagcttttctcctcatgagctgagggattttcacagtgtgctccagatggtgctagaggaagtcccagagcctgtaagttcagaagcggagagcctggggcactcctcctactctgtggatgatgtgattgtcctggaaatcgaggtgaaaggctcagtagaacctttccaggttctcttagagccatatgccctcatcatcccaggggagaactacattgggataaatgtgaagaaggcttttaagatgtggaacaacagcaagtcacccatcagatacctgtgggggaagatcagcgactgccacatcattgaagtggagcccggcacaggggtcatagagcccagtgaggtcggggattttgagttgaactttactgggggtgtccctggccccacaagccaggacctgctgtgtgaaatcgaagactcgccctcgccagtggtgttacacattgaggctgtctttaaggggcctgccctcatcatcaacgtctcagcccttcagtttggtctgctccgcctggggcagaaagccacaaactccatccagatccggaacgtcagccagctcccagccacatggcgcatgaaggagagcccagtctccctccaggaaaggcctgaggatgtgtctcccttcgacattgagccttcgagtggccagcttcactctctgggggagtgcagggtggacatcaccttggaggccctgcactgccagcatctggagaccgtcctggagctggaggtggaaaatggtgcctggagctaccttcctgtgtatgctgaggtacagaagccccatgtgtacctacagagcagccaggtggaggttagaaatctctacctgggtgtgcccacgaagacaaccatcacacttatcaatggcacgctcctgcctacccagttccactggggcaagctcctcggacaccaagcagaattctgcatggtgacagtctcccccaaacatggcctgctgggcccaagtgaggagtgccagctcaagttggagttgactgctcatacccaggaagagctgacccatctggccctcccttgtcacgtgtcaggcatgaagaagccactggttctaggcatttctgggaagccccagggactgcaagtggccattaccatctctaaggagagctctgattgcagcacagagcagtggccaggccacccaaaggagctccgcctggactttggctcagcggtgccactgaggacccgtgtgactcgccagctcattctcaccaatcgctccccaatacggacccgtttctccctcaagtttgagtatttcgggagcccccaaaacagcctgagcaaaaagaccagccttcccaacatgcctcctgccctgctaaagacagtgcggatgcaagagcacctggccaagcgagagcagctggattttatggagagcatgctatcccacgggaaaggagctgctttcttccctcacttttcccagggcatgctggggccctaccagcagctgtgcattgacatcacaggctgtgccaacatgtggggcgagtactgggacaacctcatctgcacggtgggagacctgctgccggaagtcatcccagtgcacatggcagcggtgggctgccccatcagctccctgaggaccacctcctacactattgaccaggcccagaaggaaccagccatgaggttcggcacccaggtctccggaggagacacagttacccgaacccttcgcctgaataactccagcccctgtgacatccgcctggattgggagacctatgttccagaagacaaggaagaccggctggtggagctgctggtgttttatgggccacctttcccgctgcgggaccaagccgggaatgagcttgtgtgccctgatacccctgagggtggctgcctcctctggtccccaggcccctccagttcatcggaattcagccatgaaactgactcatcagttgagggcagctccagtgccagcaatagggtggcacagaagctcatctcagtcatcctgcaggcacatgagggggtgccctccggccacctgtactgtatcagccccaagcaggtggtggtccctgctgggggcagcagtaccatctacatctccttcacccctatggtgctcagccctgagatcctgcacaaggtggagtgtactggctacgccctgggtttcatgagcttggacagcaaggtggaaagggagattccagggaagaggcatcgcctgcaggactttgcggtgggacccctgaaactggacctgcatagctacgtgaggcctgcacagctaagtgtggagctggactacggcggcagtatggaattccagtgccaggccagtgacctcattcccgagcagccctgctctggggtgctgagtgagctggtgaccacccaccacctgaagctgaccaacactacagagatcccacactacttccggcttatggtctccaggcccttctccgtttctcaagatggggcgagccaggaccacagagctcctggccctggccagaagcaggagtgtgaggaggagacagcctcagcggacaagcagctggtgctccaagcacaggagaacatgctggtgaacgtgtccttctcactctccctggagctgctctcctatcagaagctcccagctgaccagacactgcctggggtggacattcagcagagtgcgagtggagagagagagatggtgtttactcagaacctgctcctggagtacaccaaccagaccactcaggtggtgcccctgcgggctgtggtggccgtgcctgagctgcagctctccaccagctgggtggactttgggacctgctttgtgagccagcagcgagtccgggaggtctacctgatgaacctgagcgggtgccgaagctactggactatgctgatgggccagcaggagccagccaaggccgctgtggccttcagggtctccccaaacagtgggctgctagaagcacgatccgccaatgcacccccaacctccatcgccttgcaggttttcttcactgccaggagtagtgagctgtacgagtccacgatggtggtggaaggtgtgctcggtgagaagtcctgcaccctgcggctccggggccaaggctcctatgatgagagatacatgttgcctcaccagccctgaggctccgccccagccctcagccccaggccccagctggagaaaaaacattgcccagggattaggagcagctcttcagcacaaagacacagacttggggacctggggacctctgggcagctcctggaatggaagaacccccttccacaatggtctcagcctaggccctcatgatatgtcctcagagctaacataaaggacaggccacaccacagcagagaccaccacattgagatcactactcagtgcatagcgaagaccagtatggcaaaattagtcttggaaaaaaaccacagccactaagataaattcatgcacttttactatgcccattgcacttctcatccatggatttgccttgccttaagaattaaccatggccttgtggcctgggtgacccaggctgcttttatcttgcacagctaaagagggtctgatgggtggctcaacaccccacccactcctataccatgtcatcagtgttcacattttccaaatgagttgaagtgccttgatctgtccactgccaccaccaccagtgctgagttttcccatgtggttttgcttttgtggtgttactgccttgctgctagagcagcaggactgtctgcgtagcgcctccagcctgggacctcactcagttcccagggtattcaaagacggcagcggctcccattccagtcccgatgcacatggacaccactccgtatgccctgtgaaaacaaaacttaattggctgggcaaaggcacccaccaaattacctccagaccaggctgacccagaaggacgtcatggacaagtaggatgcaaaaccatcagaccagatctgtgggcaagcggtaccctggcctcccacttgggcacacacacggtgacagatgcccactgcaggctagtatccctttcaaggctggcccttaaggaaaacagggatcatgcccctacatcctaagttcagggtgtttctgtgtgcatgttcccctccccagggatcgatcataatcccaaaagacacaatcccaaacacaatcatcccaaatgttgaaatcctggaagaacaaaatccctaaagtctaaaatcctgaaaatcacaatcctaaaagatcaaaatcctgaaaatataattctggaaaaaataa

SEQ ID NO: 126117 - DNA, 5490 bp, Homo sapiens
  Payload ID: 4730
  Gene Symbol: DLEC1
  Gene Name: deleted in lung and esophageal cancer 1
  Uniprot ID: Q9Y238
  ENST ID: ENST00000346219
  CDS Start-End: 22-5358
gttagcggcgtctcggttgccatggagaccaggagctccaaaacgcggaggtctttagcgtcccggaccaacgagtgccaggggacaatgtgggcgccaacttcgccaccagccgggtccagcagccccagccagcccacctggaagtcctccttgtattcctccctcgcctactctgaggccttccactacagcttcgcagcccggccccgccgcctcacgcagcttgcgctggcgcagcgtcccgagcctcagctgcttcgtctgcgcccctcctcgctgcgcacccaagatatctcgcacttgctcaccggcgtcttccgcaacttgtactcagccgaggtcatcggcgacgaagtgagcgcaagcttgatcaaggcccgcggcagcgagaatgagcgccacgaggagttcgtggaccagctgcagcagattcgggagctctataagcagcggctggatgagtttgaaatgttggagagacatatcactcaggcccaagcacgggctattgcggaaaatgagcgggtcatgagccaggctggagtacaggacctcgagagccttgtcaggttgcctccagtgaagagtgtctccagatggtgtatagacagcgagttgctacggaaacatcatttgatctccccagaagattactacaccgatacagtgccgtttcactctgcacctaaaggcatctccctacctggatgttcaaaactgacatttagctgtgagaagcgttccgtccagaagaaagagctgaacaagaagcttgaagattcatgcaggaagaagcttgctgagttcgaagatgagttagaccacactgtggacagcctgacatggaatttaactcctaaggccaaagaaaggaccagagaacctctcaagaaagcaagtcaaccaaggaataaaaactggatgaaccacttacgtgtgccacagagagagctagacagacttctgcttgccagaatggagagtcggaaccacttcctaaaaaatccccgtttttttcctcctaacactcgatatggaggcaagtctcttgtttttcctccaaagaagccagcaccgataggagaattccagagtacagagccagaacagagttgtgctgatactccagtgtttctagctaagccaccaattgggtttttcacagattatgaaattggtccagtttatgagatggtaattgcgctgcagaacaccaccacgaccagccgctacctgcgagtcctcccgccttccacgccatacttcgctctgggactggggatgttcccaggaaaaggtggaatggtggctcctggaatgacctgccagtacattgtccagttttttcccgactgccttggggattttgatgattttattttagtggagacccagtcagcccacacacttctgatccccctgcaggcccggaggccgccccccgtgctgacattgtcaccggtgttggactgtggttactgcctcattgggggagtcaagatgaccagattcatctgcaaaaatgtgggtttcagtgttggcaggttctgcattatgcccaaaacaagctggccaccactaagtttcaaggccattgcaaccgtcggctttgttgaacaacctccttttggaatcctgccttcggtgtttgagctggccccgggacatgctatattagtggaggtcttgttttccccaaagagcctaggaaaggcagagcagaccttcatcatcatgtgcgacaactgccagataaaggagctggtgaccataggaattgggcagctgattgctttggatctgatctatatttctggtgaaaaaagccagccagaccctggagagctcacagacttaacagcccagcacttcatacgatttgagcctgaaaaccttcggtccacggctaggaagcagctgattattagaaatgctacgcacgtggagctggccttctactggcagatcatgaagcccaacctgcagcccctcatgcctggagaaaccttcagcatggacagcatcaagtgctaccccgacaaggagactgccttctccatcatgcccagaaagggggttctaagcccccacacagaccacgagttcatcctgagcttttctcctcatgagctgagggattttcacagtgtgctccagatggtgctagaggaagtcccagagcctgtaagttcagaagcggagagcctggggcactcctcctactctgtggatgatgtgattgtcctggaaatcgaggtgaaaggctcagtagaacctttccaggttctcttagagccatatgccctcatcatcccaggggagaactacattgggataaatgtgaagaaggcttttaagatgtggaacaacagcaagtcacccatcagatacctgtgggggaagatcagcgactgccacatcattgaagtggagcccggcacaggggtcatagagcccagtgaggtcggggattttgagttgaactttactgggggtgtccctggccccacaagccaggacctgctgtgtgaaatcgaagactcgccctcgccagtggtgttacacattgaggctgtctttaaggggcctgccctcatcatcaacgtctcagcccttcagtttggtctgctccgcctggggcagaaagccacaaactccatccagatccggaacgtcagccagctcccagccacatggcgcatgaaggagagcccagtctccctccaggaaaggcctgaggatgtgtctcccttcgacattgagccttcgagtggccagcttcactctctgggggagtgcagggtggacatcaccttggaggccctgcactgccagcatctggagaccgtcctggagctggaggtggaaaatggtgcctggagctaccttcctgtgtatgctgaggtacagaagccccatgtgtacctacagagcagccaggtggaggttagaaatctctacctgggtgtgcccacgaagacaaccatcacacttatcaatggcacgctcctgcctacccagttccactggggcaagctcctcggacaccaagcagaattctgcatggtgacagtctcccccaaacatggcctgctgggcccaagtgaggagtgccagctcaagttggagttgactgctcatacccaggaagagctgacccatctggccctcccttgtcacgtgtcaggcatgaagaagccactggttctaggcatttctgggaagccccagggactgcaagtggccattaccatctctaaggagagctctgattgcagcacagagcagtggccaggccacccaaaggagctccgcctggactttggctcagcggtgccactgaggacccgtgtgactcgccagctcattctcaccaatcgctccccaatacggacccgtttctccctcaagtttgagtatttcgggagcccccaaaacagcctgagcaaaaagaccagccttcccaacatgcctcctgccctgctaaagacagtgcggatgcaagagcacctggccaagcgagagcagctggattttatggagagcatgctatcccacgggaaaggagctgctttcttccctcacttttcccagggcatgctggggccctaccagcagctgtgcattgacatcacaggctgtgccaacatgtggggcgagtactgggacaacctcatctgcacggtgggagacctgctgccggaagtcatcccagtgcacatggcagcggtgggctgccccatcagctccctgaggaccacctcctacactattgaccaggcccagaaggaaccagccatgaggttcggcacccaggtctccggaggagacacagttacccgaacccttcgcctgaataactccagcccctgtgacatccgcctggattgggagacctatgttccagaagacaaggaagaccggctggtggagctgctggtgttttatgggccacctttcccgctgcgggaccaagccgggaatgagcttgtgtgccctgatacccctgagggtggctgcctcctctggtccccaggcccctccagttcatcggaattcagccatgaaactgactcatcagttgagggcagctccagtgccagcaatagggtggcacagaagctcatctcagtcatcctgcaggcacatgagggggtgccctccggccacctgtactgtatcagccccaagcaggtggtggtccctgctgggggcagcagtaccatctacatctccttcacccctatggtgctcagccctgagatcctgcacaaggtggagtgtactggctacgccctgggtttcatgagcttggacagcaaggtggaaagggagattccagggaagaggcatcgcctgcaggactttgcggtgggacccctgaaactggacctgcatagctacgtgaggcctgcacagctaagtgtggagctggactacggcggcagtatggaattccagtgccaggccagtgacctcattcccgagcagccctgctctggggtgctgagtgagctggtgaccacccaccacctgaagctgaccaacactacagagatcccacactacttccggcttatggtctccaggcccttctccgtttctcaagatggggcgagccaggaccacagagctcctggccctggccagaagcaggagtgtgaggaggagacagcctcagcggacaagcagctggtgctccaagcacaggagaacatgctggtgaacgtgtccttctcactctccctggagctgctctcctatcagaagctcccagctgaccagacactgcctggggtggacattcagcagagtgcgagtggagagagagagatggtgtttactcagaacctgctcctggagtacaccaaccagaccactcaggtggtgcccctgcgggctgtggtggccgtgcctgagctgcagctctccaccagctgggtggactttgggacctgctttgtgagccagcagcgagtccgggaggtctacctgatgaacctgagcgggtgccgaagctactggactatgctgatgggagtagtgagctgtacgagtccacgatggtggtggaaggtgtgctcggtgagaagtcctgcaccctgcggctccggggccaaggctcctatgatgagagatacatgttgcctcaccagccctgaggctccgccccagccctcagccccaggccccagctggagaaaaaacattgcccagggattaggagcagctcttcagcacaaagacacagacttggggacctggggacctctgggcagctcctggaatggaagaacccccttccacaatggtctcagcctaggccctcatgatatgtcctcagagctaacataaaggacaggccacaccacagcagagaccaccacattgagatcactactcagtgcatagcgaagaccagtatggcaaaattagtcttggaaaaaaaccacagccactaagataaattcatgcacttttactatg

SEQ ID NO: 126118 - DNA, 533 bp, Homo sapiens
  Payload ID: 4730
  Gene Symbol: DLEC1
  Gene Name: deleted in lung and esophageal cancer 1
  ENST ID: ENST00000447130
  CDS Start-End: 1-249
cctccaaagaagccagcaccgataggagaattccagagtacagagccagaacagagttgtgctgatactccagtgtttctagctaagccaccaattgggtttttcacagattatgaaattggtccagtttatgagatggtaattgcgctgcagaacaccaccacgaccagccgctacctgcgagtcctcccgccttccacgccatacttcgctctgggactgggccattgcaaccgtcggctttgttgaacaacctccttttggaatcctgccttcggtgtttgagctggccccgggacatgctatattagtggaggaattgggcagctgattgctttggatctgatctatatttctggtgaaaaaagccagccagaccctggagagctcacagacttaacagcccagcacttcatacgatttgagcctgaaaaccttcggtccacggctaggaagcagctgattattagaaatgctacctgagggattttcacagtgtgctccagatggtgctagaggaagtcccagagcct

SEQ ID NO: 126119 - DNA, 981 bp, Homo sapiens
  Payload ID: 4731
  Gene Symbol: DLEU1
  Gene Name: deleted in lymphocytic leukemia 1 (non-protein coding)
  Uniprot ID: O43261
  ENST ID: ENST00000378180
  CDS Start-End: 267-503
gcacatgcgcagaatcatcgtggtgcacggctctccctttgcttcttcggttgcagtcctcttgcttcttgcgcgtgcgtgtagcgcttttgcaaagccgcggaggtgaagtgaacttagaggttgtggggccgaggggtcgtcttatagctaccagcccacaggcatttagtctacgttggaggtaaacaaatacgggtcctgcttaggagaaaagaaaaacgtcttacagccagtgtctaaactccaaacaacggaatgtatcaatgagaccttgtatatggatacacgtgcatttaaaaccgccctgccggcttgtagagcttttgccgttctccagcgctttacaggggttatcgcacttaagcctcggaacaactttaccagtgattctaccagaaaggaatgaagaacagaaccttcaggaattgagtcacaatgcagacaaatatcaaatgggagattgttgcaaggaagagattgatgatagtattttctactagccattgggaagataaaaggagacagaagattgaagcctttgccagccattctttccctttttgcttccaaactcctcaactgggaaccttcatatgtgcagtatttatattggatcatactggtgattataaaagttcctaggaggctagaagagccaaccaacagagaagggaaagcagtctgttctgaacatagggacataagttcattcatgccaagtatctttccagcatgtttctcccatttagaatatctagcatgtaaggcctttcaatattaatataagcccaatatcagctctttctctttgtatttcatctctttctactctcctatttgtattttgtgttcctatcaaagtgtcgtatctgggagatgacctgccttatcctgttctataacagttttgtttgctgctgtgtctttagaacagtgcctggcacacagtaagcactcaataaatctttgatgaatgaa

SEQ ID NO: 126120 - DNA, 2955 bp, Homo sapiens
  Payload ID: 4731
  Gene Symbol: DLEU1
  Gene Name: deleted in lymphocytic leukemia 1 (non-protein coding)
  ENST ID: ENST00000469754
  CDS Start-End: 267-401
gcacatgcgcagaatcatcgtggtgcacggctctccctttgcttcttcggttgcagtcctcttgcttcttgcgcgtgcgtgtagcgcttttgcaaagccgcggaggtgaagtgaacttagaggttgtggggccgaggggtcgtcttatagctaccagcccacaggcatttagtctacgttggaggtaaacaaatacgggtcctgcttaggagaaaagaaaaacgtcttacagccagtgtctaaactccaaacaacggaatgtatcaatgagaccttgtatatggatacacgtgcatttaaaaccgccctgccggcttgtagagcttttgccgttctccagcgctttacaggggttatcgcacttaagcctcggaacaactttaccagatgaggacacctgaggttcagattaagaaatctgccccaaagtcttagaactgtgattctaccagaaaggaatgaagaacagaaccttcaggaattgagtcacaatgcagacaaatatcaaatgggagattgttgcaaggaagagattgatgatagtattttctactagccattgggaagataaaaggagacagaagattgaagcctttgccagccattctttccctttttgcttccaaactcctcaactgggaaccttcatatgtgcagtatttatattggatcatactggtgattataaaagttcctaggaggctagaagagccaaccaacagagaagggaaagcagtctgttctgaacatagggacataagttcattcatgccaagtatctttccagcatgtttctcccatttagaatatctagcatgtaaggcctttcaatattaatataagcccaatatcagctctttctctttgtatttcatctctttctactctcctatttgtattttgtgttcctatcaaagtgtcgtatctgggagatgacctgccttatcctgttctataacagttttgtttgctgctgtgtctttagaacagtgcctggcacacagtaagcactcaataaatctttgatgaatgaatgaatggttatcttttctctctggcaatccaaattcaccactccttaaaaattctacataagatttgctggctgggcgcagtgactcacgcctgtaatcccagcactttgggagactgagacaggtggatcacctgaggtcaggagtttgagaccagtctcaacatagcgaaaccccatctctactaaaagtacaaaaattagccgggcgtggtggcaggcgcctgtaatcccagctacttgggagactgaggcaggagaatcacttgagcccaggggggcagaggttgcagtgagctgagatcacgccacttcactccagcctgggcaaaagagcaaaactccgtctccaaaaaaaaaaaaaaaagatttgcctattccagcagacttctacccaatatcaatctagatttaaatcacttgattttccacatccctttagcaattatgtatagtttgcacttcattaacctacccttatttatgttacttctcacatacacccatatctcttctgtattttcaatcaaaagataatgcctcaaatgttatatatattgtatgtgccactcaacagtgcctcatatgctgcaaaaaaaaaagacagtaaacaatcggggtacctttttgtcttttaagccatattttctgggtcagtgtggtctttcaagggagtttagacaggctctattttttgttacttcactcctatagtatgtgactgtaaattgttccttcagtgttcaatttaagtacaaactaaagagaaacagtttcctaaagaaaaacattttaaagttacagagacacctatgtgttcgtaacatttctccagaaatatttgaagtaacgtaaaacttctggactggtcagtttaaatattttcttggaatttctatagaaatttctgtggaatggtgttatattggaaatattaattaactataagaagactcctacttcttcacagagaacaagcagggatatcctggattttcacagtatttaggccactccttaattgtctcatgaaggaattaaggtagtggaacacattcaagaattgcttaggtgtcaaaataagacaaagtgtaacagtttttttctgtagtagatttttaaatagttaaaagactctgccctctttatctatactgtattctggcaataataaagttgggcagcctatacataaaagcaatttctaacaatgccaaattaacagcagtttcttggccctttcctttccctccatgaaagttacaatattaggttatttcacaggtttcctccatgccccccatacccaacctaaaactgtgttaggctgtcaaagaaaacaaatcaggtaagattagtgtttgcctttacgcagtcattctaagtacacataaaatcatacataatatgaaaatacagcaggaagagaaacatcaaaccatagaactgagttttagttttactgacatttatatggcatacttcctgtttttgatttcagaagtgcaaccatgcagtgcttctatgaaaaactgaatagttgagtacagtttgaggattataacaacttatccaaaggaaacaaacagacctaacttactgctgttttcatttgtggaactgctatctttgttgtaaaaagttgagtatttttcaaacatcatttaataatagggtagcccctaaaacaagtaaggagctataagtctgagttgtgaatttgactagtaatggaataagaaaaccaagccaaactccatctaaatatgtatgtaaaggtaatgcttgtaaaaatttgctttttcctcattttgagatttcagttgccagttgactattggtatgcaaaattaacaattctgcctaaaggaggtaaacgatagaggttaattcttaaataaaagtccctttgtttcactatt

SEQ ID NO: 126121 - DNA, 2092 bp, Homo sapiens
  Payload ID: 4732
  Gene Symbol: DLEU7
  Gene Name: deleted in lymphocytic leukemia, 7
  Uniprot ID: Q6UYE1
  ENST ID: ENST00000400393
  CDS Start-End: 294-776
ctggagagagggaagaagcaacgctcagcatttcgctgattttcaagtgcacaccgagcagcgcttcaggcagctttgggtcagaacacgcctgattcggacttcaggcgaaggcagaggccagcacgggtcaccgattcagagccgggggcggggccgaccacacacgctgtgagacccagaggccgaggagccgcgggttagaaaatgtgaccttggcgaccccaacgcccccgcctccctcgctgctgctccacctgcacgcggagcgcgccgggccgccagcggaggcgatggccagccctgcgcccttagtggcctccatcagccaccaaatggtggctctgcagaccttgcagctgctgcagcaggagtggggctggggggacggtccagtcgcccccgggaacccgcgggacccagaccacgtgtccaccgctccagcccgtcgctcaggcccgccgcgggcccggccggggcccgggcgcgaggagcggggcgggggcgtggggaccaggagtcggcggaccgcggcgcgggcgaactccccagaggaggaggtagtgcgaggcgctgaggggggcgccgagttgctgcccttcccccgggaccgcgggccctgcaccctggcccagatggcgatgcgcagcgcgctggcccgcgtggtggactcgacttcggagctggtcagcgtggagcagacgctgctggggcccctccagcaggagcggtcctttcccattcacctgaagcttcaactcctggctaatgagtgaagaaggtcactgtaggagtgtgaggaccatcaggagcttcatatttcaataaccagtgccaaattctgaatgccagatgggatgagatgggatgttaaaccacttcttattaccacgttgttggcctccattgccttcgtattggtctccaattgcatggtctctgtggatctctgacttcttattacctccgattggaacgcgccacaaatcatcctgctttctttatcctctctcacctccaagtaatcctgtcatcttgctccaattagagccgcttccattaagaagatcgtgacaaattccctacccctgtttgctcttcaggaaaattatcccctggaaaagtggatgttatagtcgcttttcagaatgtattgtctgaatttcttgtcttccaacattctcctaagccagttacctttgcactgaagtagaattcaaaaggagatagaggttctgaatttcttcctttgaccagatggaagtcgttacatcagaatgctgatgactgcaaaatcttggacatattgttttcacaattaggaaatggcaaacacaaagttcttcagtgcaaagccagcatgcgagttcagcttccatttgctgctataaattttgttcttgttgctgccagtaaacaccaactgttcaagtgaaatagtaaatccaaatgtgcctgttggatgagagtaaaaaaattatatgctgcataaatgctgatgcaaaaggatttttcaacacactaaaccagggtagggaaaggaaccgagaaagaaagttgaactgaatgcagctctcactaacaacttcttggtaaaagcactaaaaaagctcttgatagaatgttgattcaacatactgtttaaacctcaaggaaaaaaacaaacgcagaattgggatattggccttaggatatctgcttaaagtcctactttgagctctcatcagggttaccaaagaaggcgtacatagattgttacaaatcaaagcaaagaaaaatcccaaagttccctcaaaactgatgtgggcacttggcccagaagttgtttgctaatgatcagtctaacagctgaaagtcaaagtcagtggctagtaccatctgcaataggatttaggaagttttgatctcacaaatttactgtaaggctaatcaatgaatgtttgtactcaggtctccctacagttaaatttaatgtgtaactggaattacgattcaaagagatagtttcataaatggtccctgaaatttaattttggattacctaagtttacaatggatttctcttctcctttccccaatatttttcttacgc

SEQ ID NO: 126122 - DNA, 1122 bp, Homo sapiens
  Payload ID: 4732
  Gene Symbol: DLEU7
  Gene Name: deleted in lymphocytic leukemia, 7
  Uniprot ID: Q6UYE1
  ENST ID: ENST00000504404
  CDS Start-End: 51-716
cgctgctgctccacctgcacgcggagcgcgccgggccgccagcggaggcgatggccagccctgcgcccttagtggcctccatcagccaccaaatggtggctctgcagaccttgcagctgctgcagcaggagtggggctggggggacggtccagtcgcccccgggaacccgcgggacccagaccacgtgtccaccgctccagcccgtcgctcaggcccgccgcgggcccggccggggcccgggcgcgaggagcggggcgggggcgtggggaccaggagtcggcggaccgcggcgcgggcgaactccccagaggaggaggtagtgcgaggcgctgaggggggcgccgagttgctgcccttcccccgggaccgcgggccctgcaccctggcccagatggcgatgcgcagcgcgctggcccgcgtggtggactcgacttcggagctggtcagcgtggagcagacgctgctggggcccctccagcaggagcggtcctttcccattcacctgaaggatagtgttgagtttagaaacatctgcagtcatttggctctacagattgaaggacagcagtttgacagagacttgaatgctgcccaccagtgtttgaagacaatagtcaagaagctgattcagtcacttgctaattttccttcagatgcccacatggtagcctgtgcttccttgagacagatcttacagaatctcccagacatatgagtgttaaaggcatcgggagtaaaaccacagccagcactgttaagagaaccagataccttaccttcctaattgagtcagcagacaatggatatttttatatccaaaggggaaagacttgatggtacgtggagcagtctgaccagtggcatctgtagccttcgggattatagcatgttaatgaaatttttttaaagcagtagttcatatttttaagtatattgacctatttgctgactttctgattgaaatacattctactttgtgaagctgatttgattatgtatgtatatatttattcatattattagtttttattgaatgataccttaatttgtattcatattaatgtaggtctaaagggtttaatgtggttatttatataattaaagttccatggttcttaaaa

SEQ ID NO: 126123 - DNA, 5802 bp, Homo sapiens
  Payload ID: 4733
  Gene Symbol: DMBT1
  Gene Name: deleted in malignant brain tumors 1
  Uniprot ID: Q9UGM3
  ENST ID: ENST00000330163
  CDS Start-End: 107-5464
tttatagcagcagtagaaatataccaccctagaggacacacctccttttagctaggtacctataaatgtccaggattttctattcaattgagaagaacccagcaaaatggggatctccacagtcatccttgaaatgtgtcttttatggggacaagttctatctacaggtgggtggatcccaaggactacagactacgcttcactgattccctcggaggtgcccttggatccaactgtagcagaaggttctccatttccctcggagtcgaccctggagtcaactgtagcagaaggttctccgatttccttggagtcaaccctggagtcaaccgtagcagaaggttctctgattccctcagagtcaaccctggagtcaactgtagcagaaggatctgattctggtttggccctgaggctggtgaatggagatggcaggtgtcagggccgagtggagatcctataccgaggctcctggggcaccgtgtgtgatgacagctgggacaccaatgatgccaacgtggtctgtaggcagctgggttgtggctgggccatgtcagctccaggaaatgcctggtttggccagggctcaggacccattgccctggatgatgtgcgctgctcaggacacgaatcctacctgtggagctgcccccacaatggctggctctcccataactgtggccatggtgaagatgctggtgttatctgctcagctgcccagcctcagtcaacactcaggccagaaagttggcctgtcaggatatcaccacctgtacccacagaaggatctgaatccagtttggccctgaggctggtgaatggaggcgacaggtgtcgaggccgagtggaggtcctataccgaggctcctggggcaccgtgtgtgatgactactgggacaccaatgatgccaatgtggtctgcaggcagctgggctgtggctgggccatgtcagccccaggaaatgcccagtttggccagggctcaggacccattgtcctggatgatgtgcgctgctcaggacatgagtcctacctgtggagctgcccccacaatggctggctcacccacaactgtggccatagtgaagacgctggtgtcatctgctcagctccccagtcccggccgacacccagcccagatacttggccgacctcacatgcatcaacagcaggacctgaatccagtttggccctgaggctggtgaatggaggtgacaggtgtcagggccgagtggaggtcctataccgaggctcctggggcaccgtgtgtgatgatagctgggacaccagtgacgccaatgtggtctgccggcagctgggctgtggctgggccacgtcagccccaggaaatgcccggtttggccagggttcaggacccattgtcctggatgacgtgcgctgctcaggctatgagtcctacctgtggagctgcccccacaatggctggctctcccataactgtcagcacagtgaagacgctggtgtcatctgctcagctgcccactcctggtcgacgcccagtccagacacattgccgaccatcaccttgcctgcatcgacagtaggatctgaatccagtttggccctgaggctggtgaatggaggtgacaggtgtcagggccgagtggaggtcctataccaaggctcctggggcaccgtgtgcgatgacagctgggacaccaatgatgccaatgtcgtctgcaggcaactgggctgtggctgggccatgtcagccccaggaaatgcccggtttggtcagggctcaggacccattgtcctggatgatgtgcgctgctcaggacacgagtcttacctgtggagctgcccccacaatggctggctctcccacaactgtggccatagtgaagacgctggtgtcatctgctcagcttcccagtcccggccaacacctagtccagacacttggccaacctcacatgcatcaacagcaggatctgaatccagtttggccctgaggctggtgaatggaggtgacaggtgtcagggccgagtggaggtcctataccgaggctcctggggcaccgtgtgtgatgactactgggacaccaatgatgccaatgtggtttgcaggcagctgggctgtggctgggccatgtcagccccaggaaatgcccggtttggccagggttcaggacccattgtcctggatgatgtgcgctgctcaggacatgagtcctatctgtggagctgcccccacaatggctggctctcccacaactgtggccatcatgaagacgctggtgtcatctgctcagcttcccagtcccagccgacacccagcccagacacttggccaacctcacatgcatcaacagcaggatctgaatccagtttggccctgaggctggtgaatggaggtgacaggtgtcagggccgagtggaggtcctataccgaggctcctggggcaccgtgtgtgatgactactgggacaccaatgatgccaatgtggtttgcaggcagctgggctgtggctgggccacgtcagccccaggaaatgcccggtttggccagggttcaggacccattgtcctggatgatgtgcgctgctcaggacatgagtcctatctgtggagctgcccccacaatggctggctctcccacaactgtggccatcatgaagacgctggtgtcatctgctcagcttcccagtcccagccgacacccagcccagacacttggccaacctctcgtgcatcaacagcaggatctgaatccactttggccctgagactggtgaatggaggtgacaggtgtcgaggccgagtggaggtcctataccaaggctcctggggcaccgtgtgtgatgactactgggacaccaatgatgccaacgtggtctgcaggcagctgggctgtggctgggccatgtcagccccaggaaatgcccagtttggccagggctcaggacccattgtcctggatgatgtgcgctgctcaggacacgagtcttacctgtggagctgcccccacaatggctggctctcccacaactgtggccatcatgaagatgctggtgtcatctgctcagctgctcagtcccagtcaacgcccaggccagatacttggctgaccaccaacttaccggcattgacagtaggatctgaatccagtttggctctgaggctggtgaatggaggtgacaggtgtcgaggccgagtggaggtcctgtatcgaggctcctggggaaccgtgtgtgatgacagctgggacaccaatgatgccaatgtggtctgcaggcagctgggctgtggctgggccatgtcggccccaggaaatgcccggtttggccagggctcaggacccattgtcctggatgatgtgcgctgctcagggaatgagtcctacctgtggagctgcccccacaaaggctggctcacccacaactgtggccatcacgaagacgctggtgtcatctgctcagccacccaaataaattctactacgacagattggtggcatccaacaactacaaccactgcaagaccctcttcaaattgtggtggcttcttattctatgccagtgggacattctccagcccatcctaccctgcatactaccccaacaatgctaagtgtgtttgggaaatagaagtgaattctggttatcgcataaacctgggcttcagtaatctgaaattggaggcacaccataactgcagttttgattatgttgaaatctttgatggatcattgaatagcagtctcctgctggggaaaatctgtaatgataccaggcaaatatttacatcttcttacaaccgaatgaccattcactttcgaagtgacatcagtttccaaaacactggctttttggcttggtataactccttcccaagcgatgccaccttgaggttggtcaatttaaattcatcctatggtctatgtgccgggcgtgtagaaatttaccatggtggcacctgggggacagtttgtgatgactcctggaccattcaggaagctgaggtggtctgcagacagctagggtgtggacgtgcagtttcagcccttggaaatgcatattttggctctggctctggccccatcaccctggacgatgtagagtgctcagggacggaatccactctctggcagtgccggaaccgaggctggttctcccacaactgtaatcatcgtgaagatgctggtgtcatctgctcaggaaaccatctatcgacacctgctccttttctcaacatcacccgtccaaacacagattattcctgcggaggcttcctatcccaaccatcaggggacttttccagcccattctatcccgggaactatccaaacaatgccaagtgtgtgtgggacattgaggtgcaaaacaactaccgtgtgactgtgatcttcagagatgtccagcttgaaggtggctgcaactatgattatattgaagttttcgatggcccctaccgcagttcccctctcattgctcgagtttgtgatggggccagaggctccttcacttcttcctccaacttcatgtccattcgcttcatcagtgaccacagcatcacaaggagagggttccgggctgagtactactccagtccctccaatgacagcaccaacctgctctgtctgccaaatcacatgcaagccagtgtgagcaggagctatctccaatccttgggcttttctgccagtgaccttgtcatttccacctggaatggatactacgagtgtcggccccagataacgccgaacctggtgatattcacaattccctactcaggctgcggcaccttcaagcaggcagacaatgacaccatcgactattccaacttcctcacagcagctgtctcaggtggcatcatcaagaggaggacagacctccgtattcacgtcagctgcagaatgcttcagaacacctgggtcgacaccatgtacattgctaatgacaccatccacgttgctaataacaccatccaggtcgaggaagtccagtatggcaattttgacgtgaacatttccttttatacttcctcatctttcttgtatcctgtgaccagccgcccttactacgtggacctgaaccaggacttgtacgttcaggctgaaatcctccattctgatgctgtactgaccttgtttgtggacacctgcgtggcatcaccatactccaatgacttcacgtctttgacttatgatctaatccggagtggatgcgtgagggatgacacctacggaccctactcctcgccatctcttcgcattgcccgcttccggttcagggccttccacttcctgaaccgcttcccctccgtgtacctgcgttgtaaaatggtggtgtgcagagcgtatgacccctcttcccgctgctaccgaggctgtgtgttgaggtcgaagagggatgtgggctcctaccaggaaaaggtggacgtcgtcctgggtcccatccagctgcagacccccccacgccgagaagaggagcctcggtaggtggtcgctctcagaccccactgtccaccggggcgcagacccctgactcggggacttgggatgttcctcttggtgtcatattccaactcagattgagccctacattgtgctgcacctggtcatacggagttgaatcagacctggttcccgcctcccccaaggctcatggtccttggaggacccgttgcagggtgaggtcaagagagttctgacctggatggcccatagacctgacgtcccagaatccatgcttctcatctgcaaaatgaaaatgtcaatacttacttcttagcactgttgagagggttacttacataaaggaattttggtgaaactgc

SEQ ID NO: 126124 - DNA, 7686 bp, Homo sapiens
  Payload ID: 4733
  Gene Symbol: DMBT1
  Gene Name: deleted in malignant brain tumors 1
  Uniprot ID: Q9UGM3
  ENST ID: ENST00000338354
  CDS Start-End: 107-7348
tttatagcagcagtagaaatataccaccctagaggacacacctccttttagctaggtacctataaatgtccaggattttctattcaattgagaagaacccagcaaaatggggatctccacagtcatccttgaaatgtgtcttttatggggacaagttctatctacaggtgggtggatcccaaggactacagactacgcttcactgattccctcggaggtgcccttggatccaactgtagcagaaggttctccatttccctcggagtcgaccctggagtcaactgtagcagaaggttctccgatttccttggagtcaaccctggagtcaaccgtagcagaaggttctctgattccctcagagtcaaccctggagtcaactgtagcagaaggatctgattctggtttggccctgaggctggtgaatggagatggcaggtgtcagggccgagtggagatcctataccgaggctcctggggcaccgtgtgtgatgacagctgggacaccaatgatgccaacgtggtctgtaggcagctgggttgtggctgggccatgtcagctccaggaaatgcctggtttggccagggctcaggacccattgccctggatgatgtgcgctgctcaggacacgaatcctacctgtggagctgcccccacaatggctggctctcccataactgtggccatggtgaagatgctggtgttatctgctcagctgcccagcctcagtcaacactcaggccagaaagttggcctgtcaggatatcaccacctgtacccacagaaggatctgaatccagtttggccctgaggctggtgaatggaggcgacaggtgtcgaggccgagtggaggtcctataccgaggctcctggggcaccgtgtgtgatgactactgggacaccaatgatgccaatgtggtctgcaggcagctgggctgtggctgggccatgtcagccccaggaaatgcccagtttggccagggctcaggacccattgtcctggatgatgtgcgctgctcaggacatgagtcctacctgtggagctgcccccacaatggctggctcacccacaactgtggccatagtgaagacgctggtgtcatctgctcagctccccagtcccggccgacacccagcccagatacttggccgacctcacatgcatcaacagcaggacctgaatccagtttggccctgaggctggtgaatggaggtgacaggtgtcagggccgagtggaggtcctataccgaggctcctggggcaccgtgtgtgatgatagctgggacaccagtgacgccaatgtggtctgccggcagctgggctgtggctgggccacgtcagccccaggaaatgcccggtttggccagggttcaggacccattgtcctggatgacgtgcgctgctcaggctatgagtcctacctgtggagctgcccccacaatggctggctctcccataactgtcagcacagtgaagacgctggtgtcatctgctcagctgcccactcctggtcgacgcccagtccagacacgttgccgaccatcaccttacctgcatcgacagtaggatctgaatccagtttggccctgaggctggtgaatggaggtgacaggtgtcagggccgagtggaggtcctataccgaggctcctggggcaccgtgtgtgatgacagctgggacaccaatgatgccaatgtggtctgcaggcagctgggctgtggctgggccatgttggccccaggaaatgcccggtttggtcagggctcaggacccattgtcctggatgacgtgcgctgctcagggaatgagtcctacttgtggagctgcccccacaatggctggctctcccataactgtggccatagtgaagacgctggtgtcatctgctcaggacctgaatccagtttggccctgaggctggtgaatggaggtgacaggtgtcagggccgagtggaggtcctataccgaggctcttggggcaccgtgtgtgatgacagctgggacaccaatgatgccaatgtggtctgcaggcagctgggctgtggctgggccacgtcagccccaggaaatgcccggtttggtcagggctcaggacccattgtcctggatgatgtgcgctgctcaggacatgagtcctacctgtggagctgccccaacaatggctggctctcccacaactgtggccatcatgaagatgctggtgtcatctgctcagctgcccagtcccggtcgacgcccaggccagacacgttgtcgaccatcacgttacctccatcgacagtaggatctgaatccagtttgaccctgaggctggtgaatggaagtgacaggtgtcagggccgagtagaggtcctataccgaggctcctggggcaccgtgtgtgatgacagctgggataccaatgatgccaatgtggtctgcaggcagctgggctgtggctgggccacgtcggccccaggaaatgcccggtttggccagggctcaggacccattgttctggatgatgtgcgctgctcaggacacgagtcctacctgtggagctgcccccacaatggctggctctcccacaactgtggccatcatgaagatgctggtgtcatctgctcagtttcccagtcccggccgacacccagtccagatacttggccgacctcacatgcatcaacagcaggacctgaatccagtttggccctgaggctggtgaatggaggtgacaggtgtcagggccgagtggaggtcctataccgaggctcctggggcaccgtgtgtgatgatagctgggacaccagtgacgccaatgtggtctgccggcagctgggctgtggctgggccacgtcagccccaggaaatgcccggtttggccagggttcaggacccattgtcctggatgacgtgcgctgctcaggctatgagtcctacctgtggagctgcccccacaatggctggctctcccataactgtcagcacagtgaagacgctggtgtcatctgctcagctgcccactcctggtcgacgcccagtccagacacattgccgaccatcaccttgcctgcatcgacagtaggatctgaatccagtttggccctgaggctggtgaatggaggtgacaggtgtcagggccgagtggaggtcctataccaaggctcctggggcaccgtgtgcgatgacagctgggacaccaatgatgccaatgtcgtctgcaggcaactgggctgtggctgggccatgtcagccccaggaaatgcccggtttggtcagggctcaggacccattgtcctggatgatgtgcgctgctcaggacacgagtcttacctgtggagctgcccccacaatggctggctctcccacaactgtggccatagtgaagacgctggtgtcatctgctcagcttcccagtcccggccaacacctagtccagacacttggccaacctcacatgcatcaacagcaggatctgaatccagtttggccctgaggctggtgaatggaggtgacaggtgtcagggccgagtggaggtcctataccgaggctcctggggcaccgtgtgtgatgactactgggacaccaatgatgccaatgtggtttgcaggcagctgggctgtggctgggccatgtcagccccaggaaatgcccggtttggccagggttcaggacccattgtcctggatgatgtgcgctgctcaggacatgagtcctatctgtggagctgcccccacaatggctggctctcccacaactgtggccatcatgaagacgctggtgtcatctgctcagcttcccagtcccagccgacacccagcccagacacttggccaacctcacatgcatcaacagcaggatctgaatccagtttggccctgaggctggtgaatggaggtgacaggtgtcagggccgagtggaggtcctataccgaggctcctggggcaccgtgtgtgatgactactgggacaccaatgatgccaatgtggtttgcaggcagctgggctgtggctgggccacgtcagccccaggaaatgcccggtttggccagggttcaggacccattgtcctggatgatgtgcgctgctcaggacatgagtcctatctgtggagctgcccccacaatggctggctctcccacaactgtggccatcatgaagacgctggtgtcatctgctcagcttcccagtcccagccgacacccagcccagacacttggccaacctcacatgcatcaacagcaggatctgaatccagtttggccctgaggctggtgaatggaggtgacaggtgtcagggccgagtggaggtcctataccgaggctcctggggcaccgtgtgtgatgactactgggacaccaatgatgccaatgtggtttgcaggcagctgggctgtggctgggccacgtcagccccaggaaatgcccggtttggccagggttcaggacccattgtcctggatgatgtgcgctgctcaggacatgagtcctatctgtggagctgcccccacaatggctggctctcccacaactgtggccatcatgaagacgctggtgtcatctgctcagcttcccagtcccagccgacacccagcccagacacttggccaacctctcgtgcatcaacagcaggatctgaatccactttggccctgagactggtgaatggaggtgacaggtgtcgaggccgagtggaggtcctataccaaggctcctggggcaccgtgtgtgatgactactgggacaccaatgatgccaacgtggtctgcaggcagctgggctgtggctgggccatgtcagccccaggaaatgcccagtttggccagggctcaggacccattgtcctggatgatgtgcgctgctcaggacacgagtcttacctgtggagctgcccccacaatggctggctctcccacaactgtggccatcatgaagatgctggtgtcatctgctcagctgctcagtcccagtcaacgcccaggccagatacttggctgaccaccaacttaccggcattgacagtaggatctgaatccagtttggctctgaggctggtgaatggaggtgacaggtgtcgaggccgagtggaggtcctgtatcgaggctcctggggaaccgtgtgtgatgacagctgggacaccaatgatgccaatgtggtctgcaggcagctgggctgtggctgggccatgtcggccccaggaaatgcccggtttggccagggctcaggacccattgtcctggatgatgtgcgctgctcagggaatgagtcctacctgtggagctgcccccacaaaggctggctcacccacaactgtggccatcacgaagacgctggtgtcatctgctcagccacccaaataaattctactacgacagattggtggcatccaacaactacaaccactgcaagaccctcttcaaattgtggtggcttcttattctatgccagtgggacattctccagcccatcctaccctgcatactaccccaacaatgctaagtgtgtttgggaaatagaagtgaattctggttatcgcataaacctgggcttcagtaatctgaaattggaggcacaccataactgcagttttgattatgttgaaatctttgatggatcattgaatagcagtctcctgctggggaaaatctgtaatgataccaggcaaatatttacatcttcttacaaccgaatgaccattcactttcgaagtgacatcagtttccaaaacactggctttttggcttggtataactccttcccaagcgatgccaccttgaggttggtcaatttaaattcatcctatggtctatgtgccgggcgtgtagaaatttaccatggtggcacctgggggacagtttgtgatgactcctggaccattcaggaagctgaggtggtctgcagacagctagggtgtggacgtgcagtttcagcccttggaaatgcatattttggctctggctctggccccatcaccctggacgatgtagagtgctcagggacggaatccactctctggcagtgccggaaccgaggctggttctcccacaactgtaatcatcgtgaagatgctggtgtcatctgctcaggaaaccatctatcgacacctgctccttttctcaacatcacccgtccaaacacagattattcctgcggaggcttcctatcccaaccatcaggggacttttccagcccattctatcccgggaactatccaaacaatgccaagtgtgtgtgggacattgaggtgcaaaacaactaccgtgtgactgtgatcttcagagatgtccagcttgaaggtggctgcaactatgattatattgaagttttcgatggcccctaccgcagttcccctctcattgctcgagtttgtgatggggccagaggctccttcacttcttcctccaacttcatgtccattcgcttcatcagtgaccacagcatcacaaggagagggttccgggctgagtactactccagtccctccaatgacagcaccaacctgctctgtctgccaaatcacatgcaagccagtgtgagcaggagctatctccaatccttgggcttttctgccagtgaccttgtcatttccacctggaatggatactacgagtgtcggccccagataacgccgaacctggtgatattcacaattccctactcaggctgcggcaccttcaagcaggcagacaatgacaccatcgactattccaacttcctcacagcagctgtctcaggtggcatcatcaagaggaggacagacctccgtattcacgtcagctgcagaatgcttcagaacacctgggtcgacaccatgtacattgctaatgacaccatccacgttgctaataacaccatccaggtcgaggaagtccagtatggcaattttgacgtgaacatttccttttatacttcctcatctttcttgtatcctgtgaccagccgcccttactacgtggacctgaaccaggacttgtacgttcaggctgaaatcctccattctgatgctgtactgaccttgtttgtggacacctgcgtggcatcaccatactccaatgacttcacgtctttgacttatgatctaatccggagtggatgcgtgagggatgacacctacggaccctactcctcgccatctcttcgcattgcccgcttccggttcagggccttccacttcctgaaccgcttcccctccgtgtacctgcgttgtaaaatggtggtgtgcagagcgtatgacccctcttcccgctgctaccgaggctgtgtgttgaggtcgaagagggatgtgggctcctaccaggaaaaggtggacgtcgtcctgggtcccatccagctgcagacccccccacgccgagaagaggagcctcggtaggtggtcgctctcagaccccactgtccaccggggcgcagacccctgactcggggacttgggatgttcctcttggtgtcatattccaactcagattgagccctacattgtgctgcacctggtcatacggagttgaatcagacctggttcccgcctcccccaaggctcatggtccttggaggacccgttgcagggtgaggtcaagagagttctgacctggatggcccatagacctgacgtcccagaatccatgcttctcatctgcaaaatgaaaatgtcaatacttacttcttagcactgttgagagggttacttacataaaggaattttggtgaaactgc

SEQ ID NO: 126125 - DNA, 7656 bp, Homo sapiens
  Payload ID: 4733
  Gene Symbol: DMBT1
  Gene Name: deleted in malignant brain tumors 1
  Uniprot ID: Q9UGM3
  ENST ID: ENST00000344338
  CDS Start-End: 107-7318
tttatagcagcagtagaaatataccaccctagaggacacacctccttttagctaggtacctataaatgtccaggattttctattcaattgagaagaacccagcaaaatggggatctccacagtcatccttgaaatgtgtcttttatggggacaagttctatctacaggtgggtggatcccaaggactacagactacgcttcactgattccctcggaggtgcccttggatccaactgtagcagaaggttctccatttccctcggagtcgaccctggagtcaactgtagcagaaggttctccgatttccttggagtcaaccctggagtcaaccgtagcagaaggttctctgattccctcagagtcaaccctggagtcaactgtagcagaaggatctgattctggtttggccctgaggctggtgaatggagatggcaggtgtcagggccgagtggagatcctataccgaggctcctggggcaccgtgtgtgatgacagctgggacaccaatgatgccaacgtggtctgtaggcagctgggttgtggctgggccatgtcagctccaggaaatgcctggtttggccagggctcaggacccattgccctggatgatgtgcgctgctcaggacacgaatcctacctgtggagctgcccccacaatggctggctctcccataactgtggccatggtgaagatgctggtgttatctgctcagctgcccagcctcagtcaacactcaggccagaaagttggcctgtcaggatatcaccacctgtacccacagaaggatctgaatccagtttggccctgaggctggtgaatggaggcgacaggtgtcgaggccgagtggaggtcctataccgaggctcctggggcaccgtgtgtgatgactactgggacaccaatgatgccaatgtggtctgcaggcagctgggctgtggctgggccatgtcagccccaggaaatgcccagtttggccagggctcaggacccattgtcctggatgatgtgcgctgctcaggacatgagtcctacctgtggagctgcccccacaatggctggctcacccacaactgtggccatagtgaagacgctggtgtcatctgctcagctccccagtcccggccgacacccagcccagatacttggccgacctcacatgcatcaacagcaggacctgaatccagtttggccctgaggctggtgaatggaggtgacaggtgtcagggccgagtggaggtcctataccgaggctcctggggcaccgtgtgtgatgatagctgggacaccagtgacgccaatgtggtctgccggcagctgggctgtggctgggccacgtcagccccaggaaatgcccggtttggccagggttcaggacccattgtcctggatgacgtgcgctgctcaggctatgagtcctacctgtggagctgcccccacaatggctggctctcccataactgtcagcacagtgaagacgctggtgtcatctgctcagacacgttgccgaccatcaccttacctgcatcgacagtaggatctgaatccagtttggccctgaggctggtgaatggaggtgacaggtgtcagggccgagtggaggtcctataccgaggctcctggggcaccgtgtgtgatgacagctgggacaccaatgatgccaatgtggtctgcaggcagctgggctgtggctgggccatgttggccccaggaaatgcccggtttggtcagggctcaggacccattgtcctggatgacgtgcgctgctcagggaatgagtcctacttgtggagctgcccccacaatggctggctctcccataactgtggccatagtgaagacgctggtgtcatctgctcaggacctgaatccagtttggccctgaggctggtgaatggaggtgacaggtgtcagggccgagtggaggtcctataccgaggctcttggggcaccgtgtgtgatgacagctgggacaccaatgatgccaatgtggtctgcaggcagctgggctgtggctgggccacgtcagccccaggaaatgcccggtttggtcagggctcaggacccattgtcctggatgatgtgcgctgctcaggacatgagtcctacctgtggagctgccccaacaatggctggctctcccacaactgtggccatcatgaagatgctggtgtcatctgctcagctgcccagtcccggtcgacgcccaggccagacacgttgtcgaccatcacgttacctccatcgacagtaggatctgaatccagtttgaccctgaggctggtgaatggaagtgacaggtgtcagggccgagtagaggtcctataccgaggctcctggggcaccgtgtgtgatgacagctgggataccaatgatgccaatgtggtctgcaggcagctgggctgtggctgggccacgtcggccccaggaaatgcccggtttggccagggctcaggacccattgttctggatgatgtgcgctgctcaggacacgagtcctacctgtggagctgcccccacaatggctggctctcccacaactgtggccatcatgaagatgctggtgtcatctgctcagtttcccagtcccggccgacacccagtccagatacttggccgacctcacatgcatcaacagcaggacctgaatccagtttggccctgaggctggtgaatggaggtgacaggtgtcagggccgagtggaggtcctataccgaggctcctggggcaccgtgtgtgatgatagctgggacaccagtgacgccaatgtggtctgccggcagctgggctgtggctgggccacgtcagccccaggaaatgcccggtttggccagggttcaggacccattgtcctggatgacgtgcgctgctcaggctatgagtcctacctgtggagctgcccccacaatggctggctctcccataactgtcagcacagtgaagacgctggtgtcatctgctcagctgcccactcctggtcgacgcccagtccagacacattgccgaccatcaccttgcctgcatcgacagtaggatctgaatccagtttggccctgaggctggtgaatggaggtgacaggtgtcagggccgagtggaggtcctataccaaggctcctggggcaccgtgtgcgatgacagctgggacaccaatgatgccaatgtcgtctgcaggcaactgggctgtggctgggccatgtcagccccaggaaatgcccggtttggtcagggctcaggacccattgtcctggatgatgtgcgctgctcaggacacgagtcttacctgtggagctgcccccacaatggctggctctcccacaactgtggccatagtgaagacgctggtgtcatctgctcagcttcccagtcccggccaacacctagtccagacacttggccaacctcacatgcatcaacagcaggatctgaatccagtttggccctgaggctggtgaatggaggtgacaggtgtcagggccgagtggaggtcctataccgaggctcctggggcaccgtgtgtgatgactactgggacaccaatgatgccaatgtggtttgcaggcagctgggctgtggctgggccatgtcagccccaggaaatgcccggtttggccagggttcaggacccattgtcctggatgatgtgcgctgctcaggacatgagtcctatctgtggagctgcccccacaatggctggctctcccacaactgtggccatcatgaagacgctggtgtcatctgctcagcttcccagtcccagccgacacccagcccagacacttggccaacctcacatgcatcaacagcaggatctgaatccagtttggccctgaggctggtgaatggaggtgacaggtgtcagggccgagtggaggtcctataccgaggctcctggggcaccgtgtgtgatgactactgggacaccaatgatgccaatgtggtttgcaggcagctgggctgtggctgggccacgtcagccccaggaaatgcccggtttggccagggttcaggacccattgtcctggatgatgtgcgctgctcaggacatgagtcctatctgtggagctgcccccacaatggctggctctcccacaactgtggccatcatgaagacgctggtgtcatctgctcagcttcccagtcccagccgacacccagcccagacacttggccaacctcacatgcatcaacagcaggatctgaatccagtttggccctgaggctggtgaatggaggtgacaggtgtcagggccgagtggaggtcctataccgaggctcctggggcaccgtgtgtgatgactactgggacaccaatgatgccaatgtggtttgcaggcagctgggctgtggctgggccacgtcagccccaggaaatgcccggtttggccagggttcaggacccattgtcctggatgatgtgcgctgctcaggacatgagtcctatctgtggagctgcccccacaatggctggctctcccacaactgtggccatcatgaagacgctggtgtcatctgctcagcttcccagtcccagccgacacccagcccagacacttggccaacctctcgtgcatcaacagcaggatctgaatccactttggccctgagactggtgaatggaggtgacaggtgtcgaggccgagtggaggtcctataccaaggctcctggggcaccgtgtgtgatgactactgggacaccaatgatgccaacgtggtctgcaggcagctgggctgtggctgggccatgtcagccccaggaaatgcccagtttggccagggctcaggacccattgtcctggatgatgtgcgctgctcaggacacgagtcttacctgtggagctgcccccacaatggctggctctcccacaactgtggccatcatgaagatgctggtgtcatctgctcagctgctcagtcccagtcaacgcccaggccagatacttggctgaccaccaacttaccggcattgacagtaggatctgaatccagtttggctctgaggctggtgaatggaggtgacaggtgtcgaggccgagtggaggtcctgtatcgaggctcctggggaaccgtgtgtgatgacagctgggacaccaatgatgccaatgtggtctgcaggcagctgggctgtggctgggccatgtcggccccaggaaatgcccggtttggccagggctcaggacccattgtcctggatgatgtgcgctgctcagggaatgagtcctacctgtggagctgcccccacaaaggctggctcacccacaactgtggccatcacgaagacgctggtgtcatctgctcagccacccaaataaattctactacgacagattggtggcatccaacaactacaaccactgcaagaccctcttcaaattgtggtggcttcttattctatgccagtgggacattctccagcccatcctaccctgcatactaccccaacaatgctaagtgtgtttgggaaatagaagtgaattctggttatcgcataaacctgggcttcagtaatctgaaattggaggcacaccataactgcagttttgattatgttgaaatctttgatggatcattgaatagcagtctcctgctggggaaaatctgtaatgataccaggcaaatatttacatcttcttacaaccgaatgaccattcactttcgaagtgacatcagtttccaaaacactggctttttggcttggtataactccttcccaagcgatgccaccttgaggttggtcaatttaaattcatcctatggtctatgtgccgggcgtgtagaaatttaccatggtggcacctgggggacagtttgtgatgactcctggaccattcaggaagctgaggtggtctgcagacagctagggtgtggacgtgcagtttcagcccttggaaatgcatattttggctctggctctggccccatcaccctggacgatgtagagtgctcagggacggaatccactctctggcagtgccggaaccgaggctggttctcccacaactgtaatcatcgtgaagatgctggtgtcatctgctcaggaaaccatctatcgacacctgctccttttctcaacatcacccgtccaaacacagattattcctgcggaggcttcctatcccaaccatcaggggacttttccagcccattctatcccgggaactatccaaacaatgccaagtgtgtgtgggacattgaggtgcaaaacaactaccgtgtgactgtgatcttcagagatgtccagcttgaaggtggctgcaactatgattatattgaagttttcgatggcccctaccgcagttcccctctcattgctcgagtttgtgatggggccagaggctccttcacttcttcctccaacttcatgtccattcgcttcatcagtgaccacagcatcacaaggagagggttccgggctgagtactactccagtccctccaatgacagcaccaacctgctctgtctgccaaatcacatgcaagccagtgtgagcaggagctatctccaatccttgggcttttctgccagtgaccttgtcatttccacctggaatggatactacgagtgtcggccccagataacgccgaacctggtgatattcacaattccctactcaggctgcggcaccttcaagcaggcagacaatgacaccatcgactattccaacttcctcacagcagctgtctcaggtggcatcatcaagaggaggacagacctccgtattcacgtcagctgcagaatgcttcagaacacctgggtcgacaccatgtacattgctaatgacaccatccacgttgctaataacaccatccaggtcgaggaagtccagtatggcaattttgacgtgaacatttccttttatacttcctcatctttcttgtatcctgtgaccagccgcccttactacgtggacctgaaccaggacttgtacgttcaggctgaaatcctccattctgatgctgtactgaccttgtttgtggacacctgcgtggcatcaccatactccaatgacttcacgtctttgacttatgatctaatccggagtggatgcgtgagggatgacacctacggaccctactcctcgccatctcttcgcattgcccgcttccggttcagggccttccacttcctgaaccgcttcccctccgtgtacctgcgttgtaaaatggtggtgtgcagagcgtatgacccctcttcccgctgctaccgaggctgtgtgttgaggtcgaagagggatgtgggctcctaccaggaaaaggtggacgtcgtcctgggtcccatccagctgcagacccccccacgccgagaagaggagcctcggtaggtggtcgctctcagaccccactgtccaccggggcgcagacccctgactcggggacttgggatgttcctcttggtgtcatattccaactcagattgagccctacattgtgctgcacctggtcatacggagttgaatcagacctggttcccgcctcccccaaggctcatggtccttggaggacccgttgcagggtgaggtcaagagagttctgacctggatggcccatagacctgacgtcccagaatccatgcttctcatctgcaaaatgaaaatgtcaatacttacttcttagcactgttgagagggttacttacataaaggaattttggtgaaactgc

SEQ ID NO: 126126 - DNA, 3846 bp, Homo sapiens
  Payload ID: 4733
  Gene Symbol: DMBT1
  Gene Name: deleted in malignant brain tumors 1
  Uniprot ID: Q9UGM3
  ENST ID: ENST00000359586
  CDS Start-End: 107-3508
tttatagcagcagtagaaatataccaccctagaggacacacctccttttagctaggtacctataaatgtccaggattttctattcaattgagaagaacccagcaaaatggggatctccacagtcatccttgaaatgtgtcttttatggggacaagttctatctacaggtgggtggatcccaaggactacagactacgcttcactgattccctcggaggtgcccttggatccaactgtagcagaaggttctccatttccctcggagtcgaccctggagtcaactgtagcagaaggttctccgatttccttggagtcaaccctggagtcaaccgtagcagaaggttctctgattccctcagagtcaaccctggagtcaactgtagcagaaggatctgattctggtttggccctgaggctggtgaatggagatggcaggtgtcagggccgagtggagatcctataccgaggctcctggggcaccgtgtgtgatgacagctgggacaccaatgatgccaacgtggtctgtaggcagctgggttgtggctgggccatgtcagctccaggaaatgcctggtttggccagggctcaggacccattgccctggatgatgtgcgctgctcaggacacgaatcctacctgtggagctgcccccacaatggctggctctcccataactgtggccatggtgaagatgctggtgttatctgctcagctccccagtcccggccgacacccagcccagatacttggccgacctcacatgcatcaacagcaggatctgaatccagtttggccctgaggctggtgaatggaggtgacaggtgtcagggccgagtggaggtcctataccgaggctcctggggcaccgtgtgtgatgactactgggacaccaatgatgccaatgtggtttgcaggcagctgggctgtggctgggccacgtcagccccaggaaatgcccggtttggccagggttcaggacccattgtcctggatgatgtgcgctgctcaggacatgagtcctatctgtggagctgcccccacaatggctggctctcccacaactgtggccatcatgaagacgctggtgtcatctgctcagcttcccagtcccagccgacacccagcccagacacttggccaacctctcgtgcatcaacagcaggatctgaatccactttggccctgagactggtgaatggaggtgacaggtgtcgaggccgagtggaggtcctataccaaggctcctggggcaccgtgtgtgatgactactgggacaccaatgatgccaacgtggtctgcaggcagctgggctgtggctgggccatgtcagccccaggaaatgcccagtttggccagggctcaggacccattgtcctggatgatgtgcgctgctcaggacacgagtcttacctgtggagctgcccccacaatggctggctctcccacaactgtggccatcatgaagatgctggtgtcatctgctcagccacccaaataaattctactacgacagattggtggcatccaacaactacaaccactgcaagaccctcttcaaattgtggtggcttcttattctatgccagtgggacattctccagcccatcctaccctgcatactaccccaacaatgctaagtgtgtttgggaaatagaagtgaattctggttatcgcataaacctgggcttcagtaatctgaaattggaggcacaccataactgcagttttgattatgttgaaatctttgatggatcattgaatagcagtctcctgctggggaaaatctgtaatgataccaggcaaatatttacatcttcttacaaccgaatgaccattcactttcgaagtgacatcagtttccaaaacactggctttttggcttggtataactccttcccaagcgatgccaccttgaggttggtcaatttaaattcatcctatggtctatgtgccgggcgtgtagaaatttaccatggtggcacctgggggacagtttgtgatgactcctggaccattcaggaagctgaggtggtctgcagacagctagggtgtggacgtgcagtttcagcccttggaaatgcatattttggctctggctctggccccatcaccctggacgatgtagagtgctcagggacggaatccactctctggcagtgccggaaccgaggctggttctcccacaactgtaatcatcgtgaagatgctggtgtcatctgctcaggaaaccatctatcgacacctgctccttttctcaacatcacccgtccaaacacagattattcctgcggaggcttcctatcccaaccatcaggggacttttccagcccattctatcccgggaactatccaaacaatgccaagtgtgtgtgggacattgaggtgcaaaacaactaccgtgtgactgtgatcttcagagatgtccagcttgaaggtggctgcaactatgattatattgaagttttcgatggcccctaccgcagttcccctctcattgctcgagtttgtgatggggccagaggctccttcacttcttcctccaacttcatgtccattcgcttcatcagtgaccacagcatcacaaggagagggttccgggctgagtactactccagtccctccaatgacagcaccaacctgctctgtctgccaaatcacatgcaagccagtgtgagcaggagctatctccaatccttgggcttttctgccagtgaccttgtcatttccacctggaatggatactacgagtgtcggccccagataacgccgaacctggtgatattcacaattccctactcaggctgcggcaccttcaagcaggcagacaatgacaccatcgactattccaacttcctcacagcagctgtctcaggtggcatcatcaagaggaggacagacctccgtattcacgtcagctgcagaatgcttcagaacacctgggtcgacaccatgtacattgctaatgacaccatccacgttgctaataacaccatccaggtcgaggaagtccagtatggcaattttgacgtgaacatttccttttatacttcctcatctttcttgtatcctgtgaccagccgcccttactacgtggacctgaaccaggacttgtacgttcaggctgaaatcctccattctgatgctgtactgaccttgtttgtggacacctgcgtggcatcaccatactccaatgacttcacgtctttgacttatgatctaatccggagtggatgcgtgagggatgacacctacggaccctactcctcgccatctcttcgcattgcccgcttccggttcagggccttccacttcctgaaccgcttcccctccgtgtacctgcgttgtaaaatggtggtgtgcagagcgtatgacccctcttcccgctgctaccgaggctgtgtgttgaggtcgaagagggatgtgggctcctaccaggaaaaggtggacgtcgtcctgggtcccatccagctgcagacccccccacgccgagaagaggagcctcggtaggtggtcgctctcagaccccactgtccaccggggcgcagacccctgactcggggacttgggatgttcctcttggtgtcatattccaactcagattgagccctacattgtgctgcacctggtcatacggagttgaatcagacctggttcccgcctcccccaaggctcatggtccttggaggacccgttgcagggtgaggtcaagagagttctgacctggatggcccatagacctgacgtcccagaatccatgcttctcatctgcaaaatgaaaatgtcaatacttacttcttagcactgttgagagggttacttacataaaggaattttggtgaaactgc

SEQ ID NO: 126127 - DNA, 7686 bp, Homo sapiens; identical to SEQ ID NO: 126124
  Payload ID: 4733
  Gene Symbol: DMBT1
  Gene Name: deleted in malignant brain tumors 1
  Uniprot ID: Q9UGM3
  ENST ID: ENST00000368909
  CDS Start-End: 107-7348

SEQ ID NO: 126128 - DNA, 7656 bp, Homo sapiens; identical to SEQ ID NO: 126125
  Payload ID: 4733
  Gene Symbol: DMBT1
  Gene Name: deleted in malignant brain tumors 1
  Uniprot ID: Q9UGM3
  ENST ID: ENST00000368955
  CDS Start-End: 107-7318

SEQ ID NO: 126129 - DNA, 5802 bp, Homo sapiens; identical to SEQ ID NO: 126123
  Payload ID: 4733
  Gene Symbol: DMBT1
  Gene Name: deleted in malignant brain tumors 1
  Uniprot ID: Q9UGM3
  ENST ID: ENST00000368956
  CDS Start-End: 107-5464

SEQ ID NO: 126130 - DNA, 7686 bp, Homo sapiens; identical to SEQ ID NO: 126124
  Payload ID: 4733
  Gene Symbol: DMBT1
  Gene Name: deleted in malignant brain tumors 1
  Uniprot ID: Q9UGM3
  ENST ID: ENST00000619379
  CDS Start-End: 107-7348

SEQ ID NO: 126131 - DNA, 641 bp, Homo sapiens
  Payload ID: 4734
  Gene Symbol: DPCD
  Gene Name: deleted in primary ciliary dyskinesia homolog (mouse)
  ENST ID: ENST00000370147
  CDS Start-End: 13-525
agcaggggaaagatggcggtgacgggctggttggagagtctgcggacagcccagaagactgcgctgctgcaggacgggagaaggaaggttcactatttattcccagacggcaaggaaatggctgaagaatatgacgagaagacgagtgaactacttgtgagaaagtggcgtgtgaaaagtgccctgggagccatgggccagtggcagcttgaagtaggagacccagcgcccctaggagcagggaacctggggcctgaactcatcaaggaaagcaatgccaatcctatcttcatgcgcaaggacaccaagatgagtttccagtggcggattcgaaacctcccctatcctaaggatgtctatagtgtctctgtggaccagaaggagcgctgcatcattgtcagaacaaccaacaagaagcggactggttggaggcttctctggacccctctggccatgcggtgtgcaggtgtgcatggcaccccctctgagatagacaccagctacctctggatgacgccttgctgagctttgcccacgccaactgcaccctgatcatctcttaccagaagccaaaggaggttgtggtggccgagtctgagctacagaaggaactaaagaaggtgaagacagcccacagcaac

SEQ ID NO: 126132 - DNA, 858 bp, Homo sapiens
  Payload ID: 4734
  Gene Symbol: DPCD
  Gene Name: deleted in primary ciliary dyskinesia homolog (mouse)
  Uniprot ID: Q9BVM2
  ENST ID: ENST00000370151
  CDS Start-End: 50-661
ggaacggttgccatggcagcggctgggcgtgctgcttagcaggggaaagatggcggtgacgggctggttggagagtctgcggacagcccagaagactgcgctgctgcaggacgggagaaggaaggttcactatttattcccagacggcaaggaaatggctgaagaatatgacgagaagacgagtgaactacttgtgagaaagtggcgtgtgaaaagtgccctgggagccatgggccagtggcagcttgaagtaggagacccagcgcccctaggagcagggaacctggggcctgaactcatcaaggaaagcaatgccaatcctatcttcatgcgcaaggacaccaagatgagtttccagtggcggattcgaaacctcccctatcctaaggatgtctatagtgtctctgtggaccagaaggagcgctgcatcattgtcagaacaaccaacaagaagtactacaagaagttctccattcctgatctagatagacaccagctacctctggatgacgccttgctgagctttgcccacgccaactgcaccctgatcatctcttaccagaagccaaaggaggttgtggtggccgagtctgagctacagaaggaactaaagaaggtgaagacagcccacagcaacgatggggactgcaagacccagtagttggcccctgagccttatacctccaccacagggggtgccgtgagacttcaaggcttggcccttcttgaccacggcagcctcctgtcttctaggagctatcaagggtctctaagaactgggcatggggcactcctagccagtgagtcatggtcatatttcctgagtaaagtcattctgagttacttactgcacaggga

SEQ ID NO: 126133 - DNA, 369 bp, Homo sapiens
  Payload ID: 4734
  Gene Symbol: DPCD
  Gene Name: deleted in primary ciliary dyskinesia homolog (mouse)
  ENST ID: ENST00000434727
  CDS Start-End: 1-351
gctgaagaatatgacgagaagacgagtgaactacttgtgagaaagtggcgtgtgaaaagtgccctgggagccatgggccagtggcagcttgaagtaggagacccagcgcccctaggagcagggaacctggggcctgaactcatcaaggaaagcaatgccaatcctatcttcatgcgcaaggacaccaagatgagtttccagtggcggattcgaaacctcccctatcctaaggatgtctatagtgtctctgtggaccagaaggagcgctgcatcattgtcagaacaaccaacaagaataccagaagccaaaggaggttgtggtggccgagtctgagctacagaaggaactaaagaaggtgaagacagccc

SEQ ID NO: 126134 - DNA, 541 bp, Homo sapiens
  Payload ID: 4734
  Gene Symbol: DPCD
  Gene Name: deleted in primary ciliary dyskinesia homolog (mouse)
  ENST ID: ENST00000626968
  CDS Start-End: 29-541
gctgggcgtgctgcttagcaggggaaagatggcggtgacgggctggttggagagtctgcggacagcccagaagactgcgctgctgcaggacgggagaaggaaggttcactatttattcccagacggcaaggaaatggctgaagaatatgacgagaagacgagtgaactacttgtgagaaagtggcgtgtgaaaagtgccctgggagccatgggccagtggcagcttgaagtaggagacccagcgcccctaggagcagggaacctggggcctgaactcatcaaggaaagcaatgccaatcctatcttcatgcgcaaggacaccaagatgagtttccagtggcggattcgaaacctcccctatcctaaggatgtctatagtgtctctgtggaccagaaggagcgctgcatcattgtcagaacaaccaacaagaagcggactggttggaggcttctctggacccctctggccatgcggtgtgcaggtgtgcatggcaccccctctgagatagacaccagctacctctggatgacgccttgctga

SEQ ID NO: 126135 - DNA, 2101 bp, Homo sapiens
  Payload ID: 4735
  Gene Symbol: DEGS1
  Gene Name: delta(4)-desaturase, sphingolipid 1
  Uniprot ID: O15121
  ENST ID: ENST00000323699
  CDS Start-End: 167-1138
ggggggggcggggcctcgggactccgcccacgcctccgtctcctccgcgctccgccacagccggccgacaccacaccagccggggagccgccgccgccgccgccacctctgagcagccggctgggagcgagagccgacagctagtctgcaagccaccgctgtcgccatggggagccgcgtctcgcgggaagacttcgagtgggtctacaccgaccagccgcacgccgaccggcgccgggagatcctggcaaagtatccagagataaagtccttgatgaaacctgatcccaatttgatatggattataattatgatggttctcacccagttgggtgcattttacatagtaaaagacttggactggaaatgggtcatatttggggcctatgcgtttggcagttgcattaaccactcaatgactctggctattcatgagattgcccacaatgctgcctttggcaactgcaaagcaatgtggaatcgctggtttggaatgtttgctaatcttcctattgggattccatattcaatttcctttaagaggtatcacatggatcatcatcggtaccttggagctgatggcgtcgatgtagatattcctaccgattttgagggctggttcttctgtaccgctttcagaaagtttatatgggttattcttcagcctctcttttatgcctttcgacctctgttcatcaaccccaaaccaattacgtatctggaagttatcaataccgtggcacaggtcacttttgacattttaatttattactttttgggaattaaatccttagtctacatgttggcagcatctttacttggcctgggtttgcacccaatttctggacattttatagctgagcattacatgttcttaaagggtcatgaaacttactcatattatgggcctctgaatttacttaccttcaatgtgggttatcataatgaacatcatgatttccccaacattcctggaaaaagtcttccactggtgaggaaaatagcagctgaatactatgacaacctccctcactacaattcctggataaaagtactgtatgattttgtgatggatgatacaataagtccctactcaagaatgaagaggcaccaaaaaggagagatggtgctggagtaaatatcattagtgccaaagggattcttctccaaaactttagatgataaaatggaatttttgcattattaaacttgagaccagtgatgctcagaagctcccctggcacaatttcagagtaagagctcggtgataccaagaagtgaatctggcttttaaacagtcagcctgactctgtactgctcagtttcactcacaggaaacttgtgacttgtgtattatcgtcattgaggatgtttcactcatgtctgtcattttataagcatatcatttaaaaagcttctaaaaagctatttcgccaggcacggtggctcatgcctataatcccagcactttgggaggccaaggtgggtggatcacctgaggtcaggagttcgagaccagcctggccaacacggtgaaaccccatctctactaaaaatgcaaaaattagccgggcgtggcggcacatgcctgtaatcccagctacatgggaggctgaggtgggagaattgcttgaacccaggaggcggaggcagaggctgcagtgacccaagattgtgccactgcactccaccctgggcaacagagcaagaccccatctcaaaaataaataaatatatataaaaaataaaaagctatttctagtttatttcactataaagttttgctttattaaaaagctaataaacagctattaatcacagtgtattagtatttgttacatttttgtatttcactatctttatactatataatatggtaacttgggtaccgggggaactttaaaatttcatctcaaaaataatttttaaaaagcctgaggtatgatatagcataaaagattgagatgaaaatatatttccctgtaagctgaattactcatttaaaaattttaacttctatatgggacccgaattagacactgctgaatcctgtacagccttactcataaataaagtacttactgaatttccaccattcaaa

SEQ ID NO: 126136 - DNA, 1345 bp, Homo sapiens
  Payload ID: 4735
  Gene Symbol: DEGS1
  Gene Name: delta(4)-desaturase, sphingolipid 1
  Uniprot ID: O15121
  ENST ID: ENST00000391877
  CDS Start-End: 72-1043
gccgccgccacctctgagcagccggctgggagcgagagccgacagctagtctgcaagccaccgctgtcgccatggggagccgcgtctcgcgggaagacttcgagtgggtctacaccgaccagccgcacgccgaccggcgccgggagatcctggcaaagtatccagagataaagtccttgatgaaacctgatcccaatttgatatggattataattatgatggttctcacccagttgggtgcattttacatagtaaaagacttggactggaaatgggtcatatttggggcctatgcgtttggcagttgcattaaccactcaatgactctggctattcatgagattgcccacaatgctgcctttggcaactgcaaagcaatgtggaatcgctggtttggaatgtttgctaatcttcctattgggattccatattcaatttcctttaagaggtatcacatggatcatcatcggtaccttggagctgatggcgtcgatgtagatattcctaccgattttgagggctggttcttctgtaccgctttcagaaagtttatatgggttattcttcagcctctcttttatgcctttcgacctctgttcatcaaccccaaaccaattacgtatctggaagttatcaataccgtggcacaggtcacttttgacattttaatttattactttttgggaattaaatccttagtctacatgttggcagcatctttacttggcctgggtttgcacccaatttctggacattttatagctgagcattacatgttcttaaagggtcatgaaacttactcatattatgggcctctgaatttacttaccttcaatgtgggttatcataatgaacatcatgatttccccaacattcctggaaaaagtcttccactggtgaggaaaatagcagctgaatactatgacaacctccctcactacaattcctggataaaagtactgtatgattttgtgatggatgatacaataagtccctactcaagaatgaagaggcaccaaaaaggagagatggtgctggagtaaatatcattagtgccaaagggattcttctccaaaactttagatgcaaaaattagccgggcgtggcggcacatgcctgtaatcccagctacatgggaggctgaggtgggagaattgcttgaacccaggaggcggaggcagaggctgcagtgacccaagattgtgccactgcactccaccctgggcaacagagcaagaccccatctcaaaaataaataaatatatataaaaaataaaaagctatttctagtttatttcactataaagttttgctttattaaaaagctaataaacagctattaatc

SEQ ID NO: 126137 - DNA, 957 bp, Homo sapiens
  Payload ID: 4735
  Gene Symbol: DEGS1
  Gene Name: delta(4)-desaturase, sphingolipid 1
  ENST ID: ENST00000415210
  CDS Start-End: 174-957
gccgggagaggacgccggagggaaaggaagggggagcgcgcccagcatcgcttgggcctcctccacccgctcaggaggggaaacaggagagccgggagcacaacagcctcgcgcgcccgccgccgcctcagccttaggggaggccactacgcctctggttacatttcttgatcatggtatctccccagctagcaaagtatccagagataaagtccttgatgaaacctgatcccaatttgatatggattataattatgatggttctcacccagttgggtgcattttacatagtaaaagacttggactggaaatgggtcatatttggggcctatgcgtttggcagttgcattaaccactcaatgactctggctattcatgagattgcccacaatgctgcctttggcaactgcaaagcaatgtggaatcgctggtttggaatgtttgctaatcttcctattgggattccatattcaatttcctttaagaggtatcacatggatcatcatcggtaccttggagctgatggcgtcgatgtagatattcctaccgattttgagggctggttcttctgtaccgctttcagaaagtttatatgggttattcttcagcctctcttttatgcctttcgacctctgttcatcaaccccaaaccaattacgtatctggaagttatcaataccgtggcacaggtcacttttgacattttaatttattactttttgggaattaaatccttagtctacatgttggcagcatctttacttggcctgggtttgcacccaatttctggacattttatagctgagcattacatgttcttaaagggtcatgaaacttactcatattatgggcctctgaatttacttaccttcaatgtgggttatcataatgaacatcatgatttccccaacattcctggaaaaagtcttccactggtgaggaaaatagcagctgaat

SEQ ID NO: 126138 - DNA, 4352 bp, Homo sapiens
  Payload ID: 4736
  Gene Symbol: DEGS2
  Gene Name: delta(4)-desaturase, sphingolipid 2
  Uniprot ID: Q6QHC5
  ENST ID: ENST00000305631
  CDS Start-End: 577-1548
cgggtggaggaagggaggattgctgcaccaacctttcctcggcgcctgtttactggcaccgtcgcatccattccacgccgatcctccgcagtccccctatcctgccagccgctcctccttggggcaggggcggcgcgagccacaggggcgtgcccgcgagcgggtcggggctgcggagagaacgggccggggtaaaaacccgacggctgcccgcgggtgggcggggcgcgcagagccggtgggaggccgcggtggcagcagtcgcccccgcgcatcgagggacccagggactcgcgcagatggcacgcggccacctcggtcctgccggggagccccatttccaaccgaggcaactgaggttcccaaagcgccagctacccgccggggtctggagagcgccggggcccggccgccccgcccagccagaggtgccccgccccaagcctggcgcacctggccccgccccgccgggaccccgcccccgccctaatcagagctggttccgcgccgcggccgccgcgacaggtgcagcagagccgagccggccgcgctccgaacggcgcctcccgccccaccatgggcaacagcgcgagccgcagcgacttcgagtgggtctacaccgaccagccgcacacgcagcggcgcaaggagatactggccaagtacccggccatcaaggccctgatgcggccagacccgcgcctcaagtgggcggtgctggtgctggtgctggtgcagatgctggcctgctggctggtgcgcgggctggcctggcgctggctgctgttctgggcctacgcctttggtggctgcgtgaaccactcgctgacgctggccatccacgacatctcgcacaacgcggccttcggcacgggccgtgcggcacgcaaccgctggctggccgtgttcgccaacctgcccgtgggtgtgccctacgccgcctccttcaagaagtaccacgtggaccaccaccgctacctgggcggcgacgggctggacgtggacgtgcccacgcgtctggagggctggttcttctgcacacccgcccgcaagctgctctggctggtgctgcagcccttcttctactcactacggccgctctgcgtccaccccaaggccgtgacccgcatggaggtgctcaacacgctggtgcagctggcggccgacctggccatctttgccctttgggggctcaagcccgtggtctacctgctggccagctccttcctgggcctgggcctgcaccccatctcgggccacttcgtggccgagcactacatgttcctcaagggccacgagacctactcctactatgggcctctcaactggatcaccttcaatgtgggctaccacgtggagcaccacgacttccccagcatcccgggctacaacctgccgctggtgcggaagatcgcgcccgagtactacgaccacctgccgcagcaccactcctgggtgaaggtgctctgggattttgtgtttgaggactccctggggccctatgccagggtgaagcgggtgtacaggctggcaaaagatggtctgtgagcccgggctgcctcctggtggtggccattgtcccccatcggcccctcagccttgcaccccagcactgagaagctacatttccttcctgtgctctggactgctgcccttgtccccgaggagtgtcccgcgcagccacacctggcaacagcagtgtgggctgcagggctccgtctgcacgtggacttgccctggaccttgagtgtggccctccctttctgggcctccccaggtgaggcctggccctgccccaccatgacctgggtgctctgagcccacggttcccacggagctgacttctccggggtgcctgtgccctacattaaacccggcgtttgtttcacagcccatggattgtgcttctgagggggtggtctgggcttgagcctggccccagggaatggggcgctgggccgccccgatgagtggagcttgaggcctgagtgccgcttcgtccaggccaggcccaggtcctgccatgcactcctggctctttgtgggacggtggctgctgctggcagtgctccctcagggcctgccactgtggtgtgcacacacactgaggtgtggacagcagaaagctcactttggtcatctgtgtggctccaaatccctcctagcagcccggggatcccacggctcccttgcctggctgagccacgcagaggctggctcccccatccccctgagcccacaccacctgccttgcccccaccccttgggcctgctcacctcctgctctctgtatgccctcccgcggcagggagcgtccctgagcccagagagggtctatcccccacaccagctcggaggaggggctggaggagctctgcccagatctggcacccaagcccgggggctggccgggcaggtgactgtcctggtgagccacagctcagatgggatgcgggtcgggcagcgtcctgggagtgtgcgtgacgtgagacgtgtcggtcctttctacagaagggctgagggtgcagctgcgacctaggaggttgtcttctcctggagggcagggctgggttgggtcctgatgtcccagaggtgggcaggcagcaggaggggtgcctgagcgaggaggccctccctgccagagagggatggagcgggcccactgcaatccagcagtggatgcagctcccaccactgccttggggaaggcggcctcagcctccaggacttaggaatggagactgaggctacagtcagggcttgaaggcctctccatgagtggggtgccaggggctgtccctgctgacctgggagatgcaggtctccccctatacctgggagtggccccgcacagcgccggcctcccatgtccgagtgggcagcctgctgagtggcgcagggaagaggcctgagcccaggacttgttctgcaaaggaagtgctgctggccccggcaccaggactttgagccgggcggcccctccctgtgcacacaggcccgcccacaggctgaggggaacccagagcacccgctcctcctgctgtgcctgagggggtgcctcgttcagcacacttttctgcagacagcgcaaaggggcatgtccaggcctcacccacaaactgaaggccaggcccagggtcagagggtggctccgaagacagacagtcctttgagcgctcctggggagactcctggccttggggggagccctcctggcctggggggcggcagggaagcgggagagagcagctctgagctgtggtctgcaggccctgggttaaaagtgccaccagacctaggtgaagcctaggcgaagccactcagagagtggagcctcctaaggggcagagcagtcatattcctgttgctagggctgccgggaagcccaacaacgtgcagtgtgctaggagccggcccttgagatcagccactgggtcccagcaggcagtgccggctccctcccctgccatggcccttgggggctgctgggcacactgctctgtggctgcaggaggtcatgtgggagaactgggggcatgagtggtcacaggatctcaaggcctgcctgttggtggccctggttccttgaagctgagggtcagaacctctgtctctggctgctgcctcagggcaggggcctgggacagcccattgcaggccaggtggtcctcccaggagactttgtggggccgaggagaaggcaaagctgccttgcatttgcctggtgcctgctaagccccaagtccatccctcccctgaacaggacgctcgcagggccctgcccgtcagaatgcacgtggagtcctctgaggttcgggggtgtgggttgcacttgagggaccatcttcctggagatcccgtagggagttccctacaggcaggacctgaggcccagccccaggacaccaccccaccttcccggggcttgggaatgttctgagcccagcttcctgtcgaagaccgccatcttgctcctacgactcctggtcaccgtggtcccgggcccttctctgaaaaggggcatccccagcccggagcgtgatggaccaatgcgagggcctgagcccgagggtgcggacagtaaaccgtttattactgtgtggacacagacaccgtggtgcatgacagacagtttcaacaccatgagcgctggggacggagctgtgcctggacagctctgcggtgtgtggtggcgccacgctgggccggctgtcaccgccagctgaggcgctaacagcgtcacctgggagaaaacctggaaaccgtctaatgaagcaggtgacttaggggcgtctctagaaacccaaagaaatgtaccttaaataagcaaatataaaacacaaaaaagacga

SEQ ID NO: 126139 - DNA, 421 bp, Homo sapiens
  Payload ID: 4736
  Gene Symbol: DEGS2
  Gene Name: delta(4)-desaturase, sphingolipid 2
  ENST ID: ENST00000553834
  CDS Start-End: 9-173
gccccaccatgggcaacagcgcgagccgcagcgacttcgagtgggtctacaccgaccagccgcacacgcagcggcgcaaggagatactgggtgcggaagatcgcgcccgagtactacgaccacctgccgcagcaccactcctgggtgaaggtgctctgggattttgtgtttgaggactccctggggccctatgccagggtgaagcgggtgtacaggctggcaaaagatggtctgtgagcccgggctgcctcctggtggtggccattgtcccccatcggcccctcagccttgcaccccagcactgagaagctacatttccttcctgtgctctggactgctgcccttgtccccgaggagtgtcccgcgcagccacacctggcaacagcagtgtgggctgcagggctccgtctgcacgtggact

SEQ ID NO: 126140 - DNA, 3260 bp, Homo sapiens
  Payload ID: 4737
  Gene Symbol: DNER
  Gene Name: delta/notch-like EGF repeat containing
  Uniprot ID: Q8NFT8
  ENST ID: ENST00000341772
  CDS Start-End: 136-2349
cgcagctgcaggaggcgcccggcccggcggagcagccctagccgccaccgtcgctctcgcagctctcgtcgccactgccaccgccgccgccgtcactgcgtcctggctccggctcccgcgccctcccggccggccatgcagccccgccgcgcccaggcgcccggtgcgcagctgctgcccgcgctggccctgctgctgctgctgctcggagcggggccccgaggcagctccctggccaacccggtgcccgccgcgcccctgtctgcgcccgggccgtgcgccgcgcagccctgccggaatgggggtgtgtgcacctcgcgccctgagccggacccgcagcacccggcccccgccggcgagcctggctacagctgcacctgccccgccgggatctccggcgccaactgccagcttgttgcagatccttgtgccagcaacccttgtcaccatggcaactgcagcagcagcagcagcagcagcagcgatggctacctctgcatttgcaatgaaggctatgaaggtcccaactgtgaacaggcacttcccagtctcccagccactggctggaccgaatccatggcaccccgacagcttcagcctgttcctgctactcaggagcctgacaaaatcctgcctcgctctcaggcaacggtgacactgcctacctggcagccgaaaacagggcagaaagttgtagaaatgaaatgggatcaagtggaggtgatcccagatattgcctgtgggaatgccagttctaacagctctgcgggtggccgcctggtatcctttgaagtgccacagaacacctcagtcaagattcggcaagatgccactgcctcactgattttgctctggaaggtcacggccacaggattccaacagtgctccctcatagatggacgaagtgtgaccccccttcaggcttcagggggactggtcctcctggaggagatgctcgccttggggaataatcactttattggttttgtgaatgattctgtgactaagtctattgtggctttgcgcttaactctggtggtgaaggtcagcacctgtgtgccgggggagagtcacgcaaatgacttggagtgttcaggaaaaggaaaatgcaccacgaagccgtcagaggcaactttttcctgtacctgtgaggagcagtacgtgggtactttctgtgaagaatacgatgcttgccagaggaaaccttgccaaaacaacgcgagctgtattgatgcaaatgaaaagcaagatgggagcaatttcacctgtgtttgccttcctggttatactggagagctttgccagtccaagattgattactgcatcctagacccatgcagaaatggagcaacatgcatttccagtctcagtggattcacctgccagtgtccagaaggatacttcggatctgcttgtgaagaaaaggtggacccctgcgcctcgtctccgtgccagaacaacggcacctgctatgtggacggggtacactttacctgcaactgcagcccgggcttcacagggccgacctgtgcccagcttattgacttctgtgccctcagcccctgtgctcatggcacgtgccgcagcgtgggcaccagctacaaatgcctctgtgatccaggttaccatggcctctactgtgaggaggaatataatgagtgcctctccgctccatgcctgaatgcagccacctgcagggacctcgttaatggctatgagtgtgtgtgcctggcagaatacaaaggaacacactgtgaattgtacaaggatccctgcgctaacgtcagctgtctgaacggagccacctgtgacagcgacggcctgaatggcacgtgcatctgtgcacccgggtttacaggtgaagagtgcgacattgacataaatgaatgtgacagtaacccctgccaccatggtgggagctgcctggaccagcccaatggttataactgccactgcccgcatggttgggtgggagcaaactgtgagatccacctccaatggaagtccgggcacatggcggagagcctcaccaacatgccacggcactccctctacatcatcattggagccctctgcgtggccttcatccttatgctgatcatcctgatcgtggggatttgccgcatcagccgcattgaataccagggttcttccaggccagcctatgaggagttctacaactgccgcagcatcgacagcgagttcagcaatgccattgcatccatccggcatgccaggtttggaaagaaatcccggcctgcaatgtatgatgtgagccccatcgcctatgaagattacagtcctgatgacaaacccttggtcacactgattaaaactaaagatttgtaatctttttttggattatttttcaaaaagatgagatactacactcatttaaatatttttaagaaaataaaaagcttaagaaatttaaaatgctagctgctcaagagttttcagtagaatatttaagaactaattttctgcagcttttagtttggaaaaaatattttaaaaacaaaatttgtgaaacctatagacgatgttttaatgtaccttcagctctctaaactgtgtgcttctactagtgtgtgctcttttcactgtagacactatcacgagacccagattaatttctgtggttgttacagaataagtctaatcaaggagaagtttctgtttgacgtttgagtgccggctttctgagtagagttaggaaaaccacgtaacgtagcatatgatgtataatagagtatacccgttacttaaaaagaagtctgaaatgttcgttttgtggaaaagaaactagttaaatttactattcctaacccgaatgaaattagcctttgccttattctgtgcatgggtaagtaacttatttctgcactgttttgttgaactttgtggaaacattctttcgagtttgtttttgtcattttcgtaacagtcgtcgaactaggcctcaaaaacatacgtaacgaaaaggcctagcgaggcaaattctgattgatttgaatctatatttttctttaaaaagtcaagggttctatattgtgagtaaattaaatttacatttgagttgtttgttgctaagaggtagtaaatgtaagagagtactggttccttcagtagtgagtatttctcatagtgcagctttatttatctccaggatgtttttgtggctgtatttgattgatatgtgcttcttctgattcttgctaatttccaaccatattgaataaatgtgatcaagtcaagga

SEQ ID NO: 126141 - DNA, 3174 bp, Homo sapiens
  Payload ID: 4738
  Gene Symbol: DLL1
  Gene Name: delta-like 1 (Drosophila)
  Uniprot ID: O00548
  ENST ID: ENST00000366756
  CDS Start-End: 335-2506
aaaccaggaagccggcgaccctcacctcctcgggggctgggaggaaggaggaaaacgaaagtcgccgccgccgcgctgtcccccgagagctgcctttcctcgggcatccctggggctgccgcgggacctcgcagggcggatataaagaaccgcggccttgggaagaggcggagaccggcttttaaagaaagaagtcctgggtcctgcggtctggggcgaggcaagggcgcttttctgcccacgctccccgtggcccatcgatcccccgcgcgtccgccgctgttctaaggagagaagtgggggccccccaggctcgcgcgtggagcgaagcagcatgggcagtcggtgcgcgctggccctggcggtgctctcggccttgctgtgtcaggtctggagctctggggtgttcgaactgaagctgcaggagttcgtcaacaagaaggggctgctggggaaccgcaactgctgccgcgggggcgcggggccaccgccgtgcgcctgccggaccttcttccgcgtgtgcctcaagcactaccaggccagcgtgtcccccgagccgccctgcacctacggcagcgccgtcacccccgtgctgggcgtcgactccttcagtctgcccgacggcgggggcgccgactccgcgttcagcaaccccatccgcttccccttcggcttcacctggccgggcaccttctctctgattattgaagctctccacacagattctcctgatgacctcgcaacagaaaacccagaaagactcatcagccgcctggccacccagaggcacctgacggtgggcgaggagtggtcccaggacctgcacagcagcggccgcacggacctcaagtactcctaccgcttcgtgtgtgacgaacactactacggagagggctgctccgttttctgccgtccccgggacgatgccttcggccacttcacctgtggggagcgtggggagaaagtgtgcaaccctggctggaaagggccctactgcacagagccgatctgcctgcctggatgtgatgagcagcatggattttgtgacaaaccaggggaatgcaagtgcagagtgggctggcagggccggtactgtgacgagtgtatccgctatccaggctgtctccatggcacctgccagcagccctggcagtgcaactgccaggaaggctgggggggccttttctgcaaccaggacctgaactactgcacacaccataagccctgcaagaatggagccacctgcaccaacacgggccaggggagctacacttgctcttgccggcctgggtacacaggtgccacctgcgagctggggattgacgagtgtgaccccagcccttgtaagaacggagggagctgcacggatctcgagaacagctactcctgtacctgcccacccggcttctacggcaaaatctgtgaattgagtgccatgacctgtgcggacggcccttgctttaacgggggtcggtgctcagacagccccgatggagggtacagctgccgctgccccgtgggctactccggcttcaactgtgagaagaaaattgactactgcagctcttcaccctgttctaatggtgccaagtgtgtggacctcggtgatgcctacctgtgccgctgccaggccggcttctcggggaggcactgtgacgacaacgtggacgactgcgcctcctccccgtgcgccaacgggggcacctgccgggatggcgtgaacgacttctcctgcacctgcccgcctggctacacgggcaggaactgcagtgcccccgtcagcaggtgcgagcacgcaccctgccacaatggggccacctgccacgagaggggccaccgctatgtgtgcgagtgtgcccgaggctacgggggtcccaactgccagttcctgctccccgagctgcccccgggcccagcggtggtggacctcactgagaagctagagggccagggcgggccattcccctgggtggccgtgtgcgccggggtcatccttgtcctcatgctgctgctgggctgtgccgctgtggtggtctgcgtccggctgaggctgcagaagcaccggcccccagccgacccctgccggggggagacggagaccatgaacaacctggccaactgccagcgtgagaaggacatctcagtcagcatcatcggggccacgcagatcaagaacaccaacaagaaggcggacttccacggggaccacagcgccgacaagaatggcttcaaggcccgctacccagcggtggactataacctcgtgcaggacctcaagggtgacgacaccgccgtcagggacgcgcacagcaagcgtgacaccaagtgccagccccagggctcctcaggggaggagaaggggaccccgaccacactcaggggtggagaagcatctgaaagaaaaaggccggactcgggctgttcaacttcaaaagacaccaagtaccagtcggtgtacgtcatatccgaggagaaggatgagtgcgtcatagcaactgaggtgtaaaatggaagtgagatggcaagactcccgtttctcttaaaataagtaaaattccaaggatatatgccccaacgaatgctgctgaagaggagggaggcctcgtggactgctgctgagaaaccgagttcagaccgagcaggttctcctcctgaggtcctcgacgcctgccgacagcctgtcgcggcccggccgcctgcggcactgccttccgtgacgtcgccgttgcactatggacagttgctcttaagagaatatatatttaaatgggtgaactgaattacgcataagaagcatgcactgcctgagtgtatattttggattcttatgagccagtcttttcttgaattagaaacacaaacactgcctttattgtcctttttgatacgaagatgtgctttttctagatggaaaagatgtgtgttattttttggatttgtaaaaatatttttcatgatatctgtaaagcttgagtattttgtgatgttcgttttttataatttaaattttggtaaatatgtacaaaggcacttcgggtctatgtgactatatttttttgtatataaatgtatttatggaatattgtgcaaatgttatttgagttttttactgttttgttaatgaagaaattcctttttaaaatatttttccaaaataaattttatgaatgacaa

SEQ ID NO: 126142 - DNA, 3174 bp, Homo sapiens; identical to SEQ ID NO: 126141
  Payload ID: 4738
  Gene Symbol: DLL1
  Gene Name: delta-like 1 (Drosophila)
  Uniprot ID: O00548
  ENST ID: ENST00000616526
  CDS Start-End: 335-2506

SEQ ID NO: 126143 - DNA, 548 bp, Homo sapiens
  Payload ID: 4738
  Gene Symbol: DLL1
  Gene Name: delta-like 1 (Drosophila)
  ENST ID: ENST00000630500
  CDS Start-End: 387-548
aactgctctggtgctggcggacctcgggtcgcgcagtcagaagctcaagacaaaaccaggaagccggcgaccctcacctcctcgggggctgggaggaaggaggaaaacgaaagtcgccgccgccgcgctgtcccccgagagctgcctttcctcgggcatccctggggctgccgcgggacctcgcagggcggatataaagaaccgcggccttgggaagaggcggagaccggcttttaaagaaagaagtcctgggtcctgcggtctggggcgaggcaagggcgcttttctgcccacgctccccgtggcccatcgatcccccgcgcgtccgccgctgttctaaggagagaagtgggggccccccaggctcgcgcgtggagcgaagcagcatgggcagtcggtgcgcgctggccctggcggtgctctcggccttgctgtgtcaggtctggagctctggggtgttcgaactgaagctgcaggagttcgtcaacaagaaggggctgctggggaaccgcaactgctgccgcgggggcgcggggccaccgccgtgc

SEQ ID NO: 126144 - DNA, 548 bp, Homo sapiens; identical to SEQ ID NO: 126143
  Payload ID: 4738
  Gene Symbol: DLL1
  Gene Name: delta-like 1 (Drosophila)
  ENST ID: ENST00000630365
  CDS Start-End: 387-548

SEQ ID NO: 126145 - DNA, 1324 bp, Homo sapiens
  Payload ID: 4739
  Gene Symbol: DLK1
  Gene Name: delta-like 1 homolog (Drosophila)
  Uniprot ID: P80370
  ENST ID: ENST00000331224
  CDS Start-End: 161-1093
ggcggtggagagcgcagcgcgcagcccggtgcagccctggctttcccctcgctgcgcgcccgcgccccctttcgcgtccgcaaccagaagcccagtgcggcgccaggagccggacccgcgcccgcaccgctcccgggaccgcgaccccggccgcccagagatgaccgcgaccgaagccctcctgcgcgtcctcttgctcctgctggctttcggccacagcacctatggggctgaatgcttcccggcctgcaacccccaaaatggattctgcgaggatgacaatgtttgcaggtgccagcctggctggcagggtcccctttgtgaccagtgcgtgacctctcccggctgccttcacggactctgtggagaacccgggcagtgcatttgcaccgacggctgggacggggagctctgtgatagagatgttcgggcctgctcctcggccccctgtgccaacaacaggacctgcgtgagcctggacgatggcctctatgaatgctcctgtgcccccgggtactcgggaaaggactgccagaaaaaggacgggccctgtgtgatcaacggctccccctgccagcacggaggcacctgcgtggatgatgagggccgggcctcccatgcctcctgcctgtgcccccctggcttctcaggcaatttctgcgagatcgtggccaacagctgcacccccaacccatgcgagaacgacggcgtctgcactgacattgggggcgacttccgctgccggtgcccagccggcttcatcgacaagacctgcagccgcccggtgaccaactgcgccagcagcccgtgccagaacgggggcacctgcctgcagcacacccagggccaggccatctgcttcaccatcctgggcgtgctcaccagcctggtggtgctgggcactgtgggtatcgtcttcctcaacaagtgcgagacctgggtgtccaacctgcgctacaaccacatgctgcggaagaagaagaacctgctgcttcagtacaacagcggggaggacctggccgtcaacatcatcttccccgagaagatcgacatgaccaccttcagcaaggaggccggcgacgaggagatctaagcagcgttcccacagccccctctagattcttggagttccgcagagcttactatacgcggtctgtcctaatctttgtggtgttcgctatctcttgtgtcaaatctggtgaacgctacgcttacatatattgtctttgtgctgctgtgtgacaaacgcaatgcaaaaacaatcctctttctctctcttaatgcatgatacagaataataataagaatttcatctttaaatgag

SEQ ID NO: 126146 - DNA, 4722 bp, Homo sapiens
  Payload ID: 4739
  Gene Symbol: DLK1
  Gene Name: delta-like 1 homolog (Drosophila)
  Uniprot ID: P80370
  ENST ID: ENST00000341267
  CDS Start-End: 243-1394
ggggcggggggcgggggccgcgaggggggaggcggtacgaaaagggcggcgcgcgcggcggcggcggcagctccccggcagcggcggtggagagcgcagcgcgcagcccggtgcagccctggctttcccctcgctgcgcgcccgcgccccctttcgcgtccgcaaccagaagcccagtgcggcgccaggagccggacccgcgcccgcaccgctcccgggaccgcgaccccggccgcccagagatgaccgcgaccgaagccctcctgcgcgtcctcttgctcctgctggctttcggccacagcacctatggggctgaatgcttcccggcctgcaacccccaaaatggattctgcgaggatgacaatgtttgcaggtgccagcctggctggcagggtcccctttgtgaccagtgcgtgacctctcccggctgccttcacggactctgtggagaacccgggcagtgcatttgcaccgacggctgggacggggagctctgtgatagagatgttcgggcctgctcctcggccccctgtgccaacaacaggacctgcgtgagcctggacgatggcctctatgaatgctcctgtgcccccgggtactcgggaaaggactgccagaaaaaggacgggccctgtgtgatcaacggctccccctgccagcacggaggcacctgcgtggatgatgagggccgggcctcccatgcctcctgcctgtgcccccctggcttctcaggcaatttctgcgagatcgtggccaacagctgcacccccaacccatgcgagaacgacggcgtctgcactgacattgggggcgacttccgctgccggtgcccagccggcttcatcgacaagacctgcagccgcccggtgaccaactgcgccagcagcccgtgccagaacgggggcacctgcctgcagcacacccaggtgagctacgagtgtctgtgcaagcccgagttcacaggtctcacctgtgtcaagaagcgcgcgctgagcccccagcaggtcacccgtctgcccagcggctatgggctggcctaccgcctgacccctggggtgcacgagctgccggtgcagcagccggagcaccgcatcctgaaggtgtccatgaaagagctcaacaagaaaacccctctcctcaccgagggccaggccatctgcttcaccatcctgggcgtgctcaccagcctggtggtgctgggcactgtgggtatcgtcttcctcaacaagtgcgagacctgggtgtccaacctgcgctacaaccacatgctgcggaagaagaagaacctgctgcttcagtacaacagcggggaggacctggccgtcaacatcatcttccccgagaagatcgacatgaccaccttcagcaaggaggccggcgacgaggagatctaagcagcgttcccacagccccctctagattcttggagttccgcagagcttactatacgcggtctgtcctaatctttgtggtgttcgctatctcttgtgtcaaatctggtgaacgctacgcttacatatattgtctttgtgctgctgtgtgacaaacgcaatgcaaaaacaatcctctttctctctcttaatgcatgatacagaataataataagaatttcatctttaaatgagtaagagaaataagtatgttattctaaaatctaaactcaaatgaaatttcaaaaaagaccaaaaaaaaacaaggcaacagaaccagggctcagtgccgacgcccctaccctgggggtctcggccacatggtcctcgtgaaaccgttacgagtgctgtacatgaccacccactgtgcaaagagctacgattgctttcgttcgttaattctcacacaccacatccgactcgcactcacatccagctcaacatcgctacctttagatctttccgattgatttgagatttagcggagtgcagcggctgtgtgtcagtcagagagagccccaggttggctgctggggggccgggcctctgtgccagccctgccactaactcgctgtgtgatccttggcgagtccctatcccaatcctgggcccactttctcgcccctctcgagggaggggtttgaacaccgaccaccatggtcctctctggctctaaaactctgaattaggaacgagggggtatgaaccaaaacacttcctgaccccaacaattgggatctgatgaagacgaattctcatcctgggatccgaaaggttttggcctatcctggatgaacgcttgatgttgaaatttatcctaactgtgtttctcaaagtggggagcctcctggcccacttcccttttgggaaaaaatagcccctttgagtcataatgtgccatctggagttgccacttaggcagccagccctcccccacccctctttgcccacccagaaccccaacactatacctgcctctaccctatagagacatcccttgagacttgaatgtactttgagccgcaagtgcccctggcagaatctgagcagcaacacagccctcaccaaggttttcacagggattagtggaaattgtcacttgtggggcgcttactagttttgtggcaaatgtggtccaagacctggcccacacagccatgggtttacatttgtgttgctgagttaataatcctcagatctcaaaagacctagccagcttctgaattttgaatttgactttttttttttttttaacaaagagcatctatcttttttgcaaaaatagaaagaaatgggacagagctctgtttagcttttcagcttttggggttggacagctaaacagcccttgggtaccagataggaatattttgcttcttagattatttggataagaatctatactcttagctttattgagcattgcctgccgtgtttaccttgctccaggtgtttatttctaagtcatcatcaccttcgtcatctacagtcagtcacatcagtcacccacacacaactcacagtcacccatccattggtcacctgcgccatcgtcatgacacaatatcgacctcatcacctcatcgtcctccagccactacccaagccccctcatcctgactcaaagcccgaccagcatctgcccaaactcccaacaccccactctccccaccaagccattggtctcctcactcccggtcctttgtcatcctgattccaagccccgccccaccctcaccgcctcctccgcatcatctgcactctgcagagcccctcctacccgcctctgtccccaccaggcccctccctaccgtcagccctgagtcccacagcacgcgtccccagcccctcccagcctcaccccaaaaaccctgtcaccccaccgaccaccatcatcactggcaagccccttccccttctccagctcccgtccccactacccctcccgtcccccaatccttcccctcctgttagcccacccctcctttcctatcacccccacctttcccttcccattctccccacccttcccctccgatcccaccacccttcccttccgatccccgtcatccttcccctctgatcccccacccttcccctcctgtcctccccagccctcccttcctatcaccctcacccttcccctcccgttctccccacccttcccctcctgtctccaccagccctcccttcctatcacccccacccttctcctcccttccctcaccccaaacccctgggtcctccaccccaatctctgacaaccgccccaagtccctcttccttccccacgaagtcattcataagtcaccatctcatctcattttgagtttgttttaagaaataaaaaaattaaaaagacaaaaaaaagaattgttggcatgtgtcaggcgggcgtctggtaccctgcctggcctctctcagcgtgagacctggactgagcctgctaacgattctgttcctcagtttccccaaatagaaaattctaagattggtcagatgatcaaattatctatgttttcgatcttgatgctatagagaacagccatgttcccctgataacaagaaaaagacgtcccacggtcgaggtatccttgaccaactccccatccattcatttgttcaccgtccacaacccatctgatcaggaagcatttccaggcacctgcggagcactaggcagtgtgcggaagctgcagggcaggcaggacgagggggcagtctggaggggggtggacacacagctgtccccagggagcccagcgcggtgccggtcacatgccgtgggagtggagggtcttgagcagacgcctcccttggagaagagccaccatctcaccttcccacgcaacaaattatctattaccagcacccgatgaggccgtccctcccaaattccacagtgcccaccactcgcactaccccccccgtgccacagaagcagtgtcagcagcctcgccacggtcttcacgtcatgcagaaatggtcattccatgttctatggccaccagattctgctgagagtgtcgggatccttgactgcccagccacaccttgtgtgtgtctggtgtagtgtgtagtttacgaaacaaacggaaaagctcaaagacagcgatccaagacatgatcagcaatttggtcccaaattaggagaggaggaagaggagtatcaattttgtcaccaaaatgttaaaaaaaatgtccttggcgctctttttagctttcccgtttactaccagtccagacatgcaaaaaaaccttgtttattgaaaaataaacaacaagggctaga

SEQ ID NO: 126147 - DNA, 555 bp, Homo sapiens
  Payload ID: 4739
  Gene Symbol: DLK1
  Gene Name: delta-like 1 homolog (Drosophila)
  ENST ID: ENST00000392848
  CDS Start-End: 265-555
aatggggaggaggggtgtctgaggagcactccctctccctgggagctctgcagaggaagagggtctctggcaatcagcatcctctacctccacctctccagcgggcgacccctcagagaaggtctcccacgataagtgtttcggtgttcctgcgtgcggatttgtgctctccggggaggtctgcggcccagaagcccagtgcggcgccaggagccggacccgcgcccgcaccgctcccgggaccgcgaccccggccgcccagagatgaccgcgaccgaagccctcctgcgcgtcctcttgctcctgctggctttcggccacagcacctatggggctgaatgcttcccggcctgcaacccccaaaatggattctgcgaggatgacaatgtttgcaggtgccagcctggctggcagggtcccctttgtgaccagtgcgtgacctctcccggctgccttcacggactctgtggagaacccgggcagtgcatttgcaccgacggctgggacggggagctctgtgatagagatgttcgggcctgctcctcggccccctgt

SEQ ID NO: 126148 - DNA, 469 bp, Homo sapiens
  Payload ID: 4739
  Gene Symbol: DLK1
  Gene Name: delta-like 1 homolog (Drosophila)
  ENST ID: ENST00000556051
  CDS Start-End: 40-450
ccgcaccgctcccgggaccgcgaccccggccgcccagagatgaccgcgaccgaagccctcctgcgcgtcctcttgctcctgctggctttcggccacagcacctatggggctgaatgcttcccggcctgcaacccccaaaatggattctgcgaggatgacaatgtttgcaggtgccagcctggctggcagggtcccctttgtgaccagtgcgtgacctctcccggctgccttcacggactctgtggagaacccgggcagtgcatttgcaccgacggctgggacggggagctctgtgatagaggttggcactcgcctttgttcacctcagctctgcgtccttacctgcctgccctagcccctaccacctcctcccagtctcctgttgctggtgttcctcacttcctcattcctgcacactccgtgccctgtattctaaagatctgtttataaatttcctgtgggtaccgaa

SEQ ID NO: 126149 - DNA, 2038 bp, Homo sapiens
  Payload ID: 4740
  Gene Symbol: DLK2
  Gene Name: delta-like 2 homolog (Drosophila)
  Uniprot ID: Q6UY11
  ENST ID: ENST00000357338
  CDS Start-End: 702-1853
agcgattttcctgcctcagccttccgagtagctgggattacaggcgcgcaccaccacgcctggctaatttctgtatttttaatagagacgggtttcaccatgttggccaggctggtctcgaactcctgacctcaggtgatccgcccgcctcagcctcccaaagtgctggaattataggcgtgagcccaccgagcttggctgggtccttgtcttgaaatgtgtctctgagccattagccagaagggggcaaagaggcctggagggcagctttcccccactccccctccgttactctctgaatctgagctccaggtttgggcagttgaggtttagcctgaggccaaggacgaacgtgatggggtacaggagaagacttggcggtggagggggttttgtgtgcacatttacagagtcaggggcattcccagtccagaaaggattctcagaggcagtcacaaaaaggaatggggtggaagggctgagacttgagggagggaagggtggtgggggtagggccggggtgtggttgggtggatcgggttgatatttatatagggataggttgatcttggaaggctggagacggcaacgtggacaggaagaagcggagggcgaggaggagcagaggagcacacagatgaagcaggtgtccacgcgtccggccgtccatccgtccgtccctcctggggccggcgctgaccatgcccagcggctgccgctgcctgcatctcgtgtgcctgttgtgcattctgggggctcccggtcagcctgtccgagccgatgactgcagctcccactgtgacctggcccacggctgctgtgcacctgacggctcctgcaggtgtgacccgggctgggaggggctgcactgtgagcgctgtgtgaggatgcctggctgccagcacggtacctgccaccagccatggcagtgcatctgccacagtggctgggcaggcaagttctgtgacaaagatgaacatatctgtaccacgcagtccccctgccagaatggaggccagtgcatgtatgacgggggcggtgagtaccattgtgtgtgcttaccaggcttccatgggcgtgactgcgagcgcaaggctggaccctgtgaacaggcaggctccccatgccgcaatggcgggcagtgccaggacgaccagggctttgctctcaacttcacgtgccgctgcttggtgggctttgtgggtgcccgctgtgaggtaaatgtggatgactgcctgatgcggccttgtgctaacggtgccacctgccttgacggcataaaccgcttctcctgcctctgtcctgagggctttgctggacgcttctgcaccatcaacctggatgactgtgccagccgcccatgccagagaggggcccgctgtcgggaccgtgtccacgacttcgactgcctctgccccagtggctatggtggcaagacctgtgagcttgtcttacctgtcccagaccccccaaccacagtggacacccctctagggcccacctcagctgtagtggtacctgccacggggccagccccccacagcgcaggggctggtctgctgcggatctcagtgaaggaggtggtgcggaggcaagaggctgggctaggtgagcctagcttggtggccctggtggtgtttggggccctcactgctgccctggttctggctactgtgttgctgaccctgagggcctggcgccggggtgtctgcccccctggaccctgttgctaccctgccccacactatgctccagcgtgccaggaccaggagtgtcaggttagcatgctgccagcagggctccccctgccacgtgacttgccccctgagcctggaaagaccacagcactgtgatggaggtgggggctttctggcccccttcctcacctcttccacccctcagactggagtggtccgttctcaccacccttcagcttgggtacacacacagaggagacctcagcctcacaccagaaatattatttttttaatacacagaatgtaagatggaattttatcaaataaaactatgaaaatgc

SEQ ID NO: 126150 - DNA, 1572 bp, Homo sapiens
  Payload ID: 4740
  Gene Symbol: DLK2
  Gene Name: delta-like 2 homolog (Drosophila)
  ENST ID: ENST00000372485
  CDS Start-End: 252-1385
gaggagcagccgctgccgccgctcggggtcgcctggagccccagattcccgagcgctcggctcgcatggcagccgcttcggcgcccggccccgcggccagctaggggcggccccgcgctccctcacggcccctcggcggcgcccgtcggatccggcctctctctgcgccccggggcgcgccacctccccgccggaggtgtccacgcgtccggccgtccatccgtccgtccctcctggggccggcgctgaccatgcccagcggctgccgctgcctgcatctcgtgtgcctgttgtgcattctgggggctcccggtcagcctgtccgagccgatgactgcagctcccactgtgacctggcccacggctgctgtgcacctgacggctcctgcaggtgtgacccgggctgggaggggctgcactgtgagcgctgtgtgaggatgcctggctgccagcacggtacctgccaccagccatggcagtgcatctgccacagtggctgggcagatgaacatatctgtaccacgcagtccccctgccagaatggaggccagtgcatgtatgacgggggcggtgagtaccattgtgtgtgcttaccaggcttccatgggcgtgactgcgagcgcaaggctggaccctgtgaacaggcaggctccccatgccgcaatggcgggcagtgccaggacgaccagggctttgctctcaacttcacgtgccgctgcttggtgggctttgtgggtgcccgctgtgaggtaaatgtggatgactgcctgatgcggccttgtgctaacggtgccacctgccttgacggcataaaccgcttctcctgcctctgtcctgagggctttgctggacgcttctgcaccatcaacctggatgactgtgccagccgcccatgccagagaggggcccgctgtcgggaccgtgtccacgacttcgactgcctctgccccagtggctatggtggcaagacctgtgagcttgtcttacctgtcccagaccccccaaccacagtggacacccctctagggcccacctcagctgtagtggtacctgccacggggccagccccccacagcgcaggggctggtctgctgcggatctcagtgaaggaggtggtgcggaggcaagaggctgggctaggtgagcctagcttggtggccctggtggtgtttggggccctcactgctgccctggttctggctactgtgttgctgaccctgagggcctggcgccggggtgtctgcccccctggaccctgttgctaccctgccccacactatgctccagcgtgccaggaccaggagtgtcaggttagcatgctgccagcagggctccccctgccacgtgacttgccccctgagcctggaaagaccacagcactgtgatggaggtgggggctttctggcccccttcctcacctcttccacccctcagactggagtggtccgttctcaccacccttcagcttgggtacacacacagaggagacctcagcctcacaccagaaatattatttttttaatacacagaatgtaagatggaattttatcaaataaaactatgaaaatgcaa

SEQ ID NO: 126151 - DNA, 1590 bp, Homo sapiens
  Payload ID: 4740
  Gene Symbol: DLK2
  Gene Name: delta-like 2 homolog (Drosophila)
  Uniprot ID: Q6UY11
  ENST ID: ENST00000372488
  CDS Start-End: 252-1403
gaggagcagccgctgccgccgctcggggtcgcctggagccccagattcccgagcgctcggctcgcatggcagccgcttcggcgcccggccccgcggccagctaggggcggccccgcgctccctcacggcccctcggcggcgcccgtcggatccggcctctctctgcgccccggggcgcgccacctccccgccggaggtgtccacgcgtccggccgtccatccgtccgtccctcctggggccggcgctgaccatgcccagcggctgccgctgcctgcatctcgtgtgcctgttgtgcattctgggggctcccggtcagcctgtccgagccgatgactgcagctcccactgtgacctggcccacggctgctgtgcacctgacggctcctgcaggtgtgacccgggctgggaggggctgcactgtgagcgctgtgtgaggatgcctggctgccagcacggtacctgccaccagccatggcagtgcatctgccacagtggctgggcaggcaagttctgtgacaaagatgaacatatctgtaccacgcagtccccctgccagaatggaggccagtgcatgtatgacgggggcggtgagtaccattgtgtgtgcttaccaggcttccatgggcgtgactgcgagcgcaaggctggaccctgtgaacaggcaggctccccatgccgcaatggcgggcagtgccaggacgaccagggctttgctctcaacttcacgtgccgctgcttggtgggctttgtgggtgcccgctgtgaggtaaatgtggatgactgcctgatgcggccttgtgctaacggtgccacctgccttgacggcataaaccgcttctcctgcctctgtcctgagggctttgctggacgcttctgcaccatcaacctggatgactgtgccagccgcccatgccagagaggggcccgctgtcgggaccgtgtccacgacttcgactgcctctgccccagtggctatggtggcaagacctgtgagcttgtcttacctgtcccagaccccccaaccacagtggacacccctctagggcccacctcagctgtagtggtacctgccacggggccagccccccacagcgcaggggctggtctgctgcggatctcagtgaaggaggtggtgcggaggcaagaggctgggctaggtgagcctagcttggtggccctggtggtgtttggggccctcactgctgccctggttctggctactgtgttgctgaccctgagggcctggcgccggggtgtctgcccccctggaccctgttgctaccctgccccacactatgctccagcgtgccaggaccaggagtgtcaggttagcatgctgccagcagggctccccctgccacgtgacttgccccctgagcctggaaagaccacagcactgtgatggaggtgggggctttctggcccccttcctcacctcttccacccctcagactggagtggtccgttctcaccacccttcagcttgggtacacacacagaggagacctcagcctcacaccagaaatattatttttttaatacacagaatgtaagatggaattttatcaaataaaactatgaaaatgcaa

SEQ ID NO: 126152 - DNA, 1056 bp, Homo sapiens
  Payload ID: 4740
  Gene Symbol: DLK2
  Gene Name: delta-like 2 homolog (Drosophila)
  ENST ID: ENST00000430324
  CDS Start-End: 1-869
ctggctgccagcacggtacctgccaccagccatggcagtgcatctgccacagtggctgggcaggcaagttctgtgacaaaggcttccatgggcgtgactgcgagcgcaaggctggaccctgtgaacaggcaggctccccatgccgcaatggcgggcagtgccaggacgaccagggctttgctctcaacttcacgtgccgctgcttggtgggctttgtgggtgcccgctgtgaggtaaatgtggatgactgcctgatgcggccttgtgctaacggtgccacctgccttgacggcataaaccgcttctcctgcctctgtcctgagggctttgctggacgcttctgcaccatcaacctggatgactgtgccagccgcccatgccagagaggggcccgctgtcgggaccgtgtccacgacttcgactgcctctgccccagtggctatggtggcaagacctgtgagcttgtcttacctgtcccagaccccccaaccacagtggacacccctctagggcccacctcagctgtagtggtacctgccacggggccagccccccacagcgcaggggctggtctgctgcggatctcagtgaaggaggtggtgcggaggcaagaggctgggctaggtgagcctagcttggtggccctggtggtgtttggggccctcactgctgccctggttctggctactgtgttgctgaccctgagggcctggcgccggggtgtctgcccccctggaccctgttgctaccctgccccacactatgctccagcgtgccaggaccaggagtgtcaggttagcatgctgccagcagggctccccctgccacgtgacttgccccctgagcctggaaagaccacagcactgtgatggaggtgggggctttctggcccccttcctcacctcttccacccctcagactggagtggtccgttctcaccacccttcagcttgggtacacacacagaggagacctcagcctcacaccagaaatattatttttttaatacacagaatgtaagatggaattttatcaaataaaactatgaaaatgcaa

SEQ ID NO: 126153 - DNA, 2332 bp, Homo sapiens
  Payload ID: 4741
  Gene Symbol: DLL3
  Gene Name: delta-like 3 (Drosophila)
  Uniprot ID: Q9NYJ7
  ENST ID: ENST00000205143
  CDS Start-End: 8-1864
gaaggccatggtctccccacggatgtccgggctcctctcccagactgtgatcctagcgctcattttcctcccccagacacggcccgctggcgtcttcgagctgcagatccactctttcgggccgggtccaggccctggggccccgcggtccccctgcagcgcccggctcccctgccgcctcttcttcagagtctgcctgaagcctgggctctcagaggaggccgccgagtccccgtgcgccctgggcgcggcgctgagtgcgcgcggaccggtctacaccgagcagcccggagcgcccgcgcctgatctcccactgcccgacggcctcttgcaggtgcccttccgggacgcctggcctggcaccttctctttcatcatcgaaacctggagagaggagttaggagaccagattggagggcccgcctggagcctgctggcgcgcgtggctggcaggcggcgcttggcagccggaggcccgtgggcccgggacattcagcgcgcaggcgcctgggagctgcgcttctcgtaccgcgcgcgctgcgagccgcctgccgtcgggaccgcgtgcacgcgcctctgccgtccgcgcagcgccccctcgcggtgcggtccgggactgcgcccctgcgcaccgctcgaggacgaatgtgaggcgccgctggtgtgccgagcaggctgcagccctgagcatggcttctgtgaacagcccggtgaatgccgatgcctagagggctggactggacccctctgcacggtccctgtctccaccagcagctgcctcagccccaggggcccgtcctctgctaccaccggatgccttgtccctgggcctgggccctgtgacgggaacccgtgtgccaatggaggcagctgtagtgagacacccaggtcctttgaatgcacctgcccgcgtgggttctacgggctgcggtgtgaggtgagcggggtgacatgtgcagatggaccctgcttcaacggcggcttgtgtgtcgggggtgcagaccctgactctgcctacatctgccactgcccacccggtttccaaggctccaactgtgagaagagggtggaccggtgcagcctgcagccatgccgcaatggcggactctgcctggacctgggccacgccctgcgctgccgctgccgcgccggcttcgcgggtcctcgctgcgagcacgacctggacgactgcgcgggccgcgcctgcgctaacggcggcacgtgtgtggagggcggcggcgcgcaccgctgctcctgcgcgctgggcttcggcggccgcgactgccgcgagcgcgcggacccgtgcgccgcgcgcccctgtgctcacggcggccgctgctacgcccacttctccggcctcgtctgcgcttgcgctcccggctacatgggagcgcggtgtgagttcccagtgcaccccgacggcgcaagcgccttgcccgcggccccgccgggcctcaggcccggggaccctcagcgctaccttttgcctccggctctgggactgctcgtggccgcgggcgtggccggcgctgcgctcttgctggtccacgtgcgccgccgtggccactcccaggatgctgggtctcgcttgctggctgggaccccggagccgtcagtccacgcactcccggatgcactcaacaacctaaggacgcaggagggttccggggatggtccgagctcgtccgtagattggaatcgccctgaagatgtagaccctcaagggatttatgtcatatctgctccttccatctacgctcgggaggtagcgacgccccttttccccccgctacacactgggcgcgctgggcagaggcagcacctgctttttccctacccttcctcgattctgtccgtgaaatgaattgggtagagtctctggaaggttttaagcccattttcagttctaacttactttcatcctattttgcatccctcttatcgttttgagctacctgccatcttctctttgaaaaacctatgggcttgaggaggtcacgatgccgactccgccagagcttttccactgattgtactcagcggggaggcaggggaggcagaggggcagcctctctaatgcttcctactcattttgtttctaggcctgacgcgtctcctccatccgcacctggagtcagagcgtggatttttgtatttgctcggtggtgcccagtctctgccccagaggctttggagttcaatcttgaaggggtgtctgggggaactttactgttgcaagttgtaaataatggttatttatatcctattttttctcaccccatctctctagaaacacctataaaggctattattgtgatcagttttgactaac

SEQ ID NO: 126154 - DNA, 2055 bp, Homo sapiens
  Payload ID: 4741
  Gene Symbol: DLL3
  Gene Name: delta-like 3 (Drosophila)
  Uniprot ID: Q9NYJ7
  ENST ID: ENST00000356433
  CDS Start-End: 81-1844
gaaggggcggggccattctctcagatataaggcttggaagccagcagctgcgactcccgagacccccccaccagaaggccatggtctccccacggatgtccgggctcctctcccagactgtgatcctagcgctcattttcctcccccagacacggcccgctggcgtcttcgagctgcagatccactctttcgggccgggtccaggccctggggccccgcggtccccctgcagcgcccggctcccctgccgcctcttcttcagagtctgcctgaagcctgggctctcagaggaggccgccgagtccccgtgcgccctgggcgcggcgctgagtgcgcgcggaccggtctacaccgagcagcccggagcgcccgcgcctgatctcccactgcccgacggcctcttgcaggtgcccttccgggacgcctggcctggcaccttctctttcatcatcgaaacctggagagaggagttaggagaccagattggagggcccgcctggagcctgctggcgcgcgtggctggcaggcggcgcttggcagccggaggcccgtgggcccgggacattcagcgcgcaggcgcctgggagctgcgcttctcgtaccgcgcgcgctgcgagccgcctgccgtcgggaccgcgtgcacgcgcctctgccgtccgcgcagcgccccctcgcggtgcggtccgggactgcgcccctgcgcaccgctcgaggacgaatgtgaggcgccgctggtgtgccgagcaggctgcagccctgagcatggcttctgtgaacagcccggtgaatgccgatgcctagagggctggactggacccctctgcacggtccctgtctccaccagcagctgcctcagccccaggggcccgtcctctgctaccaccggatgccttgtccctgggcctgggccctgtgacgggaacccgtgtgccaatggaggcagctgtagtgagacacccaggtcctttgaatgcacctgcccgcgtgggttctacgggctgcggtgtgaggtgagcggggtgacatgtgcagatggaccctgcttcaacggcggcttgtgtgtcgggggtgcagaccctgactctgcctacatctgccactgcccacccggtttccaaggctccaactgtgagaagagggtggaccggtgcagcctgcagccatgccgcaatggcggactctgcctggacctgggccacgccctgcgctgccgctgccgcgccggcttcgcgggtcctcgctgcgagcacgacctggacgactgcgcgggccgcgcctgcgctaacggcggcacgtgtgtggagggcggcggcgcgcaccgctgctcctgcgcgctgggcttcggcggccgcgactgccgcgagcgcgcggacccgtgcgccgcgcgcccctgtgctcacggcggccgctgctacgcccacttctccggcctcgtctgcgcttgcgctcccggctacatgggagcgcggtgtgagttcccagtgcaccccgacggcgcaagcgccttgcccgcggccccgccgggcctcaggcccggggaccctcagcgctaccttttgcctccggctctgggactgctcgtggccgcgggcgtggccggcgctgcgctcttgctggtccacgtgcgccgccgtggccactcccaggatgctgggtctcgcttgctggctgggaccccggagccgtcagtccacgcactcccggatgcactcaacaacctaaggacgcaggagggttccggggatggtccgagctcgtccgtagattggaatcgccctgaagatgtagaccctcaagggatttatgtcatatctgctccttccatctacgctcgggaggcctgacgcgtctcctccatccgcacctggagtcagagcgtggatttttgtatttgctcggtggtgcccagtctctgccccagaggctttggagttcaatcttgaaggggtgtctgggggaactttactgttgcaagttgtaaataatggttatttatatcctattttttctcaccccatctctctagaaacacctataaaggctattattgtgatc

SEQ ID NO: 126155 - DNA, 668 bp, Homo sapiens
  Payload ID: 4741
  Gene Symbol: DLL3
  Gene Name: delta-like 3 (Drosophila)
  ENST ID: ENST00000596614
  CDS Start-End: 9-668
agaaggccatggtctccccacggatgtccgggctcctctcccagactgtgatcctagcgctcattttcctcccccagacacggcccgctggcgtcttcgagctgcagatccactctttcgggccgggtccaggccctggggccccgcggtccccctgcagcgcccggctcccctgccgcctcttcttcagagtctgcctgaagcctgggctctcagaggaggccgccgagtccccgtgcgccctgggcgcggcgctgagtgcgcgcggaccggtctacaccgagcagcccggagcgcccgcgcctgatctcccactgcccgacggcctcttgcaggtgcccttccgggacgcctggcctggcaccttctctttcatcatcgaaacctggagagaggagttaggagaccagattggaggcggactctgcctggacctgggccacgccctgcgctgccgctgccgcgccggcttcgcgggtcctcgctgcgagcacgacctggacgactgcgcgggccgcgcctgcgctaacggcggcacgtgtgtggagggcggcggcgcgcaccgctgctcctgcgcgctgggcttcggcggccgcgactgccgcgagcgcgcggacccgtgcgccgcgcgcccctgtgctcacggcggccgctgctacgcccacttc

SEQ ID NO: 126156 - DNA, 3372 bp, Homo sapiens
  Payload ID: 4742
  Gene Symbol: DLL4
  Gene Name: delta-like 4 (Drosophila)
  Uniprot ID: Q9NR61
  ENST ID: ENST00000249749
  CDS Start-End: 277-2334
gccgccttggtgcagcgtacaccggcactagcccgcttgcagccccaggattagacagaagacgcgtcctcggcgcggtcgccgcccagccgtagtcacctggattacctacagcggcagctgcagcggagccagcgagaaggccaaaggggagcagcgtcccgagaggagcgcctcttttcagggaccccgccggctggcggacgcgcgggaaagcggcgtcgcgaacagagccagattgagggcccgcgggtggagagagcgacgcccgaggggatggcggcagcgtcccggagcgcctctggctgggcgctactgctgctggtggcactttggcagcagcgcgcggccggctccggcgtcttccagctgcagctgcaggagttcatcaacgagcgcggcgtactggccagtgggcggccttgcgagcccggctgccggactttcttccgcgtctgccttaagcacttccaggcggtcgtctcgcccggaccctgcaccttcgggaccgtctccacgccggtattgggcaccaactccttcgctgtccgggacgacagtagcggcggggggcgcaaccctctccaactgcccttcaatttcacctggccgggtaccttctcgctcatcatcgaagcttggcacgcgccaggagacgacctgcggccagaggccttgccaccagatgcactcatcagcaagatcgccatccagggctccctagctgtgggtcagaactggttattggatgagcaaaccagcaccctcacaaggctgcgctactcttaccgggtcatctgcagtgacaactactatggagacaactgctcccgcctgtgcaagaagcgcaatgaccacttcggccactatgtgtgccagccagatggcaacttgtcctgcctgcccggttggactggggaatattgccaacagcctatctgtctttcgggctgtcatgaacagaatggctactgcagcaagccagcagagtgcctctgccgcccaggctggcagggccggctgtgtaacgaatgcatcccccacaatggctgtcgccacggcacctgcagcactccctggcaatgtacttgtgatgagggctggggaggcctgttttgtgaccaagatctcaactactgcacccaccactccccatgcaagaatggggcaacgtgctccaacagtgggcagcgaagctacacctgcacctgtcgcccaggctacactggtgtggactgtgagctggagctcagcgagtgtgacagcaacccctgtcgcaatggaggcagctgtaaggaccaggaggatggctaccactgcctgtgtcctccgggctactatggcctgcattgtgaacacagcaccttgagctgcgccgactccccctgcttcaatgggggctcctgccgggagcgcaaccagggggccaactatgcttgtgaatgtccccccaacttcaccggctccaactgcgagaagaaagtggacaggtgcaccagcaacccctgtgccaacgggggacagtgcctgaaccgaggtccaagccgcatgtgccgctgccgtcctggattcacgggcacctactgtgaactccacgtcagcgactgtgcccgtaacccttgcgcccacggtggcacttgccatgacctggagaatgggctcatgtgcacctgccctgccggcttctctggccgacgctgtgaggtgcggacatccatcgatgcctgtgcctcgagtccctgcttcaacagggccacctgctacaccgacctctccacagacacctttgtgtgcaactgcccttatggctttgtgggcagccgctgcgagttccccgtgggcttgccgcccagcttcccctgggtggccgtctcgctgggtgtggggctggcagtgctgctggtactgctgggcatggtggcagtggctgtgcggcagctgcggcttcgacggccggacgacggcagcagggaagccatgaacaacttgtcggacttccagaaggacaacctgattcctgccgcccagcttaaaaacacaaaccagaagaaggagctggaagtggactgtggcctggacaagtccaactgtggcaaacagcaaaaccacacattggactataatctggccccagggcccctggggcgggggaccatgccaggaaagtttccccacagtgacaagagcttaggagagaaggcgccactgcggttacacagtgaaaagccagagtgtcggatatcagcgatatgctcccccagggactccatgtaccagtctgtgtgtttgatatcagaggagaggaatgaatgtgtcattgccacggaggtataaggcaggagcctacctggacatccctgctcagccccgcggctggaccttccttctgcattgtttacattgcatcctggatgggacgtttttcatatgcaacgtgctgctctcaggaggaggagggaatggcaggaaccggacagactgtgaacttgccaagagatgcaatacccttccacacctttgggtgtctgtctggcatcagattggcagctgcaccaaccagaggaacagaagagaagagagatgccactgggcactgccctgccagtagtggccttcagggggctccttccggggctccggcctgttttccagagagagtggcagtagccccatggggcccggagctgctgtggcctccactggcatccgtgtttccaaaagtgcctttggcccaggctccacggcgacagttgggcccaaatcagaaaggagagagggggccaatgagggcagggcctcctgtgggctggaaaaccactgggtgcgtctcttgctggggtttgccctggaggtgaggtgagtgctcgagggaggggagtgctttctgccccatgcctccaactactgtatgcaggcctggctctctggtctaggccctttgggcaagaatgtccgtctacccggcttccaccaccctctggccctgggcttctgtaagcagacaggcagagggcctgcccctcccaccagccaagggtgccaggcctaactggggcactcagggcagtgtgttggaaattccactgagggggaaatcaggtgctgcggccgcctgggccctttcctccctcaagcccatctccacaacctcgagcctgggctctggtccactactgccccagaccaccctcaaagctggtcttcagaaatcaataatatgagtttttattttgtttttttttttttttttgtagtttattttggagtctagtatttcaataatttaagaatcagaagcactgacctttctacattttataacattattttgtatataatgtgtatttataatatgaaacagatgtgtacagg

SEQ ID NO: 126157 - DNA, 3455 bp, Homo sapiens
  Payload ID: 4743
  Gene Symbol: DTX1
  Gene Name: deltex 1, E3 ubiquitin ligase
  Uniprot ID: Q86Y01
  ENST ID: ENST00000257600
  CDS Start-End: 504-2366
gcgagaagccccactgaagccgggcgcagggtctgggacgcagttgggagtgcaaagggctggctgagagccgcaggagcagcaggctgtggcccaggcctcctgggtgacaggccctgtctggcggggaagagggaccaagagacaacacggaagaggctggacctcgaacaggggcggctgcctcactccctacctgagccagccgagggggccaaggactttagagctgtttcctccggcataagagagacacttgctttccagggcagcaccctttatcggagaaggctctacagggaaggggtctttgcagcctggatggccatcccacattcctttaacggaggtctctaggcctcagagagaacccagagttagaaaggaggccagacggtccttgctgtccccctggggagagaggaagttgccgcctgctgccaggcccaggaggagctgggcctgcaatagtgggggacctggcccctgaggcagtggcggccatgtcacggccaggccacggtgggctgatgcctgtgaatggtctgggcttcccaccgcagaacgtggcccgggtggtggtgtgggagtggctgaatgagcacagccgctggcggccctacacggccaccgtgtgccaccacattgagaacgtgctgaaggaggacgctcgcggttccgtggtcctggggcaggtggacgcccagcttgtgccctacatcatcgacctgcagtccatgcaccagtttcgccaggacacaggcaccatgcggcccgtgcggcgcaacttctacgacccgtcgtcggcgccgggcaagggcatcgtgtgggagtgggagaacgacggcggcgcatggacggcctacgatatggacatctgcatcaccatccagaacgcctacgagaagcagcacccgtggctcgacctctcatcgctaggcttctgctacctcatctacttcaacagcatgtcgcagatgaaccgccagacgcgccggcgccgccgcctgcgccgccgcctggacctcgcctacccgctcaccgtgggctccatccctaagtcgcagtcgtggcccgtgggcgccagctcgggccagccctgctcctgccagcagtgcctgctggtcaacagcacgcgcgccgcctccaacgccatcctggcctcgcagcgccgcaaggcgccccccgcgcccccgctgccgccgccgccgccacctggagggcctccaggcgcgcttgccgtgcgccccagcgccaccttcacaggcgccgcgctctgggcagcgcccgccgccggccccgccgagcccgcgccgcctcccggggcgcccccacggagcccgggcgcccccggcggagcgcgcaccccggggcagaacaacctcaaccggcccgggccccagcgcaccaccagcgtgagcgcgcgcgcctccatcccgccgggggtccccgcactcccggtgaagaacttgaatggtactgggccggtccatccggccctggcagggatgaccgggatactgctgtgcgcggccgggctgcccgtgtgcctgacgcgggcccccaagcccatcctgcacccgccgcccgtgagcaagagcgacgtgaagcccgtgcctggcgtgcccggggtgtgccgcaagaccaagaagaagcaccttaaaaagagtaagaatcccgaggatgtggttcgaagatacatgcagaaggtgaaaaacccacctgatgaggactgcaccatctgcatggagcgactggtcacagcatcaggctacgagggcgtgcttcggcacaagggcgtgcggcctgagctcgtgggccgcctgggccgctgtggccacatgtaccacctgctgtgcctcgtggccatgtactccaatggcaacaaggatggcagcctgcagtgccccacctgcaaggccatctacggggagaagacgggtacgcagccgcctgggaagatggagttccacctcatcccccactcgctgcccggcttccctgatacccagaccatccgcatcgtctatgacatccccacaggcatccagggccctgagcaccccaaccccgggaagaagttcaccgcaagaggattccctcgccactgctatctacccaacaacgagaaaggccggaaggtgctgcggctgctcatcacggcctgggagagaagactcatcttcactatcggcacgtccaacaccacgggcgagtcggacaccgtggtgtggaacgagatccaccacaagaccgagtttggatccaacctcacgggccacggctacccggacgctagctacctagacaacgtgctggctgagctcacagcccagggcgtatccgaggctgcagccaaggcttgaggcccaaggctgcccaccttccctcctgctttgcccctggtccggcaaatgcctccttcgccaggtgtgtcctggtagcccaggttcagggctggggaggagcctgcggaaggggccgcagccattcaggggacctgcctggtggcagctgggatgaagagagatggcatgtcaggctggccccgaatcatagctccctgagagggccaagcagagagtactggaaacctccctaccaaaaagacagagacccgccccctcacacacaaacacacatgtcctgttgaactcatgcacgcacacccacgtgcctgtacttgcccccaggctggaagagaagagacagaaagaccccatgacccccccatgtggatccccatctgtgtctcagttgcatctgtacagccttgtctgcaaactggaggatgcggggcaagcccttaggggcctgccagggctcggggggcaaagagggactcgggaaactcagtgtaccccagatgcctcacccattccgtgtcatcacccatgtctgccacccactgattgggcaattgtgggcccatggggtggaagcccccagatgactgagcagttctacaaaagaatggccagcacgagcggggactagagggtcctgattttgtgtctgtgcctcttcatctctctggactctgatctccttctcccttcccatctccaggccttctgtctgtcccagataaaggcgctgttctcccatcctccctaccccatcctctccaccaaatcgctcccaattttgagagccaaaggctggcgcttctgacttcaggagcgaaaggaggaggcctagtttgggccgatgtattttaaagcagagtggacagcagagagtcaatttccctttcgttgggagtgggcagtggggtggctaattgtcttcggccaaccaggggcctgttgcccaggcaactcaccagctccgcctctgctgattggctgccacggtgggagtcagccaagatttaaagggatgccagcgattgctcttttcaaaacctaccagtcccactgtgggtggagaaataaatggtctttctcctcctc

SEQ ID NO: 126158 - DNA, 2769 bp, Homo sapiens
  Payload ID: 4744
  Gene Symbol: DTX2
  Gene Name: deltex 2, E3 ubiquitin ligase
  Uniprot ID: Q86UW9
  ENST ID: ENST00000324432
  CDS Start-End: 511-2379
gcgacgccgagtttcactctggctgccttctcctgagagtcggagccacagccagagccctgcccaggccgagccggagctgcagcccgagcgcggtggtgccctcagccccgtcctcttgtcctcctcagcctcggtgccttggaatttgtgtcgctgagtcagcaagcctttcagatttgcccggtttttgttgtttgtggtttgtatcaagatgggaactcaaacaagtcattcctcctaaggagctggtgtcttcatccagaagggacagtttgtgccagctctccagagagaaaaggatctggtactgttctggagtggcctgtagcagacactgaaccaccagccagctgcatttgttgtcctggaagtcattgccaactctgccagtcacactggggtccccagagaagtcaagatctgccggaggcgctgggcaatgaccccgggactccaggccagaggggtctgaagctgtttgggaaagcagcgggactccttgggaagatggccatggccccaagcccttccctggtgcaggtgtacaccagccccgcggctgtggccgtgtgggaatggcaggacgggctgggcacctggcacccctacagtgccaccgtctgcagcttcatcgagcagcagtttgtccagcagaagggccaacgttttgggcttgggagcctggcccacagcatccccttgggccaggcagacccctcgctggccccttacattattgacctccccagctggacccagttccgccaggacaccggcaccatgcgggctgtgcggagacacctgttcccccagcactcagcccctggccgaggtgtcgtctgggagtggctgagcgacgatggctcctggactgcctatgaagccagcgtctgtgactatctggagcagcaggtggccaggggcaaccagctcgtggacttggcccccctggggtacaactacactgtcaactacaccacccacacgcagaccaacaagacttccagcttctgccgcagcgtgcggcgccaagcagggccgccttacccggtgaccaccatcatcgctccgccgggccacacaggcgtcgcctgctcttgccaccagtgcctcagtggcagcagaactggccccgtgtcaggccgctaccgccactccatgaccaacctccctgcataccccgtcccccagcaccccccacacaggaccgcttctgtgtttgggacccaccaggcctttgcaccgtacaacaaaccctcactctccggggcccggtctgcgcccaggctgaacaccaccaacgcctggggcgcagctcctccttccctggggagccagcccctctaccgctccagcctctcccacctgggaccgcagcacctgcccccaggatcctccacctccggtgcagtcagtgcctccctccccagcggtccctcaagcagcccagggagcgtccctgccactgtgcccatgcagatgccaaagcccagcagagtccagcaggcgctcgcaggcatgacgagtgttctgatgtcagccattggactccctgtgtgtcttagccgcgcaccccagcccaccagccctcccgcctcccgtctggcttccaaaagtcacggctcagttaagagattgaggaaaatgtccgtgaaaggagcgaccccgaagccagagccagagccagagcaggtcataaaaaactacacggaagagctgaaagtgcccccagatgaggactgcatcatctgcatggagaagctgtccacagcgtctggatacagcgatgtgactgacagcaaggcaatcgggtccctagctgtgggccacctcaccaagtgcagccatgccttccacctgctgtgcctcctggccatgtactgcaacggcaataaggatggaagtctgcagtgtccctcctgcaaaaccatctatggagagaagacggggacccagccccagggaaagatggaggtattacggttccagatgtcgctccccggccacgaggactgcgggaccatcctcatagtttacagcattccccatggtatccagggccctgagcaccccaatcccggaaagccgttcactgccagagggtttccccgccagtgctaccttccagacaacgcccagggccgcaaggtcctagagctcctgaaggtggcctggaagaggcggctcatcttcacagtgggcacgtccagcaccacgggtgagacggacaccgtggtatggaacgagatccaccacaagacagagatggaccgcaacattacgggccacggctatcccgaccccaactacctgcagaacgtgctggctgagctggctgcccagggggtgaccgaggactgcctggagcagcagtgacctcgcaccccagcacgcccgcctctggtggccaccccgctgccccatggctggctgggtggccaggcaggaagtgcccagcccgagaggctgggaggtttgttgagggtgtggggtgtgccccacctgaagccggggctccccctgcctgcctctctctcctcctcccctctgggaattgggcagccctgggcagttgtactcatgggggcttaggatgcagctacctcagtgcgcagggcccgtctgtcctctgggggctgcttcgggcccgcggtgctcggggcctggtgtggggcgagtagagacttccccagcctggacgggcgtgggttctgggtcagcttcttttacctcaattttgtttgcaataaatgctctatagccaaa

SEQ ID NO: 126159 - DNA, 540 bp, Homo sapiens
  Payload ID: 4744
  Gene Symbol: DTX2
  Gene Name: deltex 2, E3 ubiquitin ligase
  ENST ID: ENST00000438930
  CDS Start-End: 272-540
tggctgccttctcctgagagtcggagccacagccagagccctgcccaggccgagccggagctgcagcccgagcgcggtggtgccctcagccccgtcctcttgtcctcctcagcctcgaaacttccaattgaagacactgagctgaaccattccgcccgcccgcccgcccgagggcactccagatctgccggaggcgctgggcaatgaccccgggactccaggccagaggggtctgaagctgtttgggaaagcagcgggactccttgggaagatggccatggccccaagcccttccctggtgcaggtgtacaccagccccgcggctgtggccgtgtgggaatggcaggacgggctgggcacctggcacccctacagtgccaccgtctgcagcttcatcgagcagcagtttgtccagcagaagggccaacgttttgggcttgggagcctggcccacagcatccccttgggccaggcagacccctcgctggccccttacattattgacctccccagctggacccagttccgccaggacaccgg

SEQ ID NO: 126160 - DNA, 550 bp, Homo sapiens
  Payload ID: 4744
  Gene Symbol: DTX2
  Gene Name: deltex 2, E3 ubiquitin ligase
  ENST ID: ENST00000451769
  CDS Start-End: 466-550
agctgcgacgccgagtttcactctggctgccttctcctgagagtcggagccacagccagagccctgcccaggccgagccggagctgcagcccgagcgcggtggtgccctcagccccgtcctcttgtcctcctcagcctcggctgtttttgcagagttgtgagagttggttcatccgggccatgaggacatgttgggacataccccgtgtgccgatgatggaggcggccgtggctgcccgagagatgcgtgacacccaggagtaattggcttggaaggcagtcctctgatttgtacctcattgtggttacagaaacttccaattgaagacactgagctgaaccattccgcccgcccgcccgcccgagggcactccagatctgccggaggcgctgggcaatgaccccgggactccaggccagaggggtctgaagctgtttgggaaagcagcgggactccttgggaagatggccatggccccaagcccttccctggtgcaggtgtacaccagccccgcggctgtggccgtgtgggaatggcaggacgggctgg

SEQ ID NO: 126161 - DNA, 2472 bp, Homo sapiens
  Payload ID: 4744
  Gene Symbol: DTX2
  Gene Name: deltex 2, E3 ubiquitin ligase
  Uniprot ID: Q86UW9
  ENST ID: ENST00000413936
  CDS Start-End: 211-2079
actctggctgccttctcctgagagtcggagccacagccagagccctgcccaggccgagccggagctgcagcccgagcgcggtggtgccctcagccccgtcctcttgtcctcctcagcctcgatctgccggaggcgctgggcaatgaccccgggactccaggccagaggggtctgaagctgtttgggaaagcagcgggactccttgggaagatggccatggccccaagcccttccctggtgcaggtgtacaccagccccgcggctgtggccgtgtgggaatggcaggacgggctgggcacctggcacccctacagtgccaccgtctgcagcttcatcgagcagcagtttgtccagcagaagggccaacgttttgggcttgggagcctggcccacagcatccccttgggccaggcagacccctcgctggccccttacattattgacctccccagctggacccagttccgccaggacaccggcaccatgcgggctgtgcggagacacctgttcccccagcactcagcccctggccgaggtgtcgtctgggagtggctgagcgacgatggctcctggactgcctatgaagccagcgtctgtgactatctggagcagcaggtggccaggggcaaccagctcgtggacttggcccccctggggtacaactacactgtcaactacaccacccacacgcagaccaacaagacttccagcttctgccgcagcgtgcggcgccaagcagggccgccttacccggtgaccaccatcatcgctccgccgggccacacaggcgtcgcctgctcttgccaccagtgcctcagtggcagcagaactggccccgtgtcaggccgctaccgccactccatgaccaacctccctgcataccccgtcccccagcaccccccacacaggaccgcttctgtgtttgggacccaccaggcctttgcaccgtacaacaaaccctcactctccggggcccggtctgcgcccaggctgaacaccaccaacgcctggggcgcagctcctccttccctggggagccagcccctctaccgctccagcctctcccacctgggaccgcagcacctgcccccaggatcctccacctccggtgcagtcagtgcctccctccccagcggtccctcaagcagcccagggagcgtccctgccactgtgcccatgcagatgccaaagcccagcagagtccagcaggcgctcgcaggcatgacgagtgttctgatgtcagccattggactccctgtgtgtcttagccgcgcaccccagcccaccagccctcccgcctcccgtctggcttccaaaagtcacggctcagttaagagattgaggaaaatgtccgtgaaaggagcgaccccgaagccagagccagagccagagcaggtcataaaaaactacacggaagagctgaaagtgcccccagatgaggactgcatcatctgcatggagaagctgtccacagcgtctggatacagcgatgtgactgacagcaaggcaatcgggtccctagctgtgggccacctcaccaagtgcagccatgccttccacctgctgtgcctcctggccatgtactgcaacggcaataaggatggaagtctgcagtgtccctcctgcaaaaccatctatggagagaagacggggacccagccccagggaaagatggaggtattacggttccagatgtcgctccccggccacgaggactgcgggaccatcctcatagtttacagcattccccatggtatccagggccctgagcaccccaatcccggaaagccgttcactgccagagggtttccccgccagtgctaccttccagacaacgcccagggccgcaaggtcctagagctcctgaaggtggcctggaagaggcggctcatcttcacagtgggcacgtccagcaccacgggtgagacggacaccgtggtatggaacgagatccaccacaagacagagatggaccgcaacattacgggccacggctatcccgaccccaactacctgcagaacgtgctggctgagctggctgcccagggggtgaccgaggactgcctggagcagcagtgacctcgcaccccagcacgcccgcctctggtggccaccccgctgccccatggctggctgggtggccaggcaggaagtgcccagcccgagaggctgggaggtttgttgagggtgtggggtgtgccccacctgaagccggggctccccctgcctgcctctctctcctcctcccctctgggaattgggcagccctgggcagttgtactcatgggggcttaggatgcagctacctcagtgcgcagggcccgtctgtcctctgggggctgcttcgggcccgcggtgctcggggcctggtgtggggcgagtagagacttccccagcctggacgggcgtgggttctgggtcagcttcttttacctcaattttgtttgcaataaatgctctatagccaaagcc

SEQ ID NO: 126162 - DNA, 633 bp, Homo sapiens
  Payload ID: 4744
  Gene Symbol: DTX2
  Gene Name: deltex 2, E3 ubiquitin ligase
  ENST ID: ENST00000457529
  CDS Start-End: 448-633
gagtttcactctggctgccttctcctgagagtcggagccacagccagagccctgcccaggccgagccggagctgcagcccgagcgcggtggtgccctcagccccgtcctcttgtcctcctcagcctcggtgccttggaatttgtgtcgctgagtcagcaagcctttcagatttgcccggtttttgttgtttgtggtttgtatcaagatgggaactcaaacaagtcattcctcctaaggagctggtgtcttcatccagaagggacagtttgtgccagctctccagagagaaaagaaacttccaattgaagacactgagctgaaccattccgcccgcccgcccgcccgagggcactccagatctgccggaggcgctgggcaatgaccccgggactccaggccagaggggtctgaagctgtttgggaaagcagcgggactccttgggaagatggccatggccccaagcccttccctggtgcaggtgtacaccagccccgcggctgtggccgtgtgggaatggcaggacgggctgggcacctggcacccctacagtgccaccgtctgcagcttcatcgagcagcagtttgtccagcagaagggccaacgttttgggcttgggagcctggcccacagc

SEQ ID NO: 126163 - DNA, 570 bp, Homo sapiens
  Payload ID: 4744
  Gene Symbol: DTX2
  Gene Name: deltex 2, E3 ubiquitin ligase
  ENST ID: ENST00000442516
  CDS Start-End: 529-570
ctgtctcagccagctgccctcctcctccaagctggctccacttctctaagcgccaacagcgatggaaataaatagcatgtgtacagacgcctggacccttgagaaactcagaatatttctgcatgccttcctagctcctctagcgctctagaaggtgccttggaatttgtgtcgctgagtcagcaagcctttcagatttgcccggtttttgttgtttgtggtttgtatcaagatgggaactcaaacaagtcattcctcctaaggagctggtgtcttcatccagaagggacagtttgtgccagctctccagagagaaaaggatctggtactgttctggagtggcctgtagcagacactgaaccaccagccagctgcatttgttgtcctggaagtcattgccaactctgccagtcacactggggtccccagagaagtcaagatctgccggaggcgctgggcaatgaccccgggactccaggccagaggggtctgaagctgtttgggaaagcagcgggactccttgggaagatggccatggccccaagcccttccctggtgcaggtgtacacc

SEQ ID NO: 126164 - DNA, 1770 bp, Homo sapiens
  Payload ID: 4744
  Gene Symbol: DTX2
  Gene Name: deltex 2, E3 ubiquitin ligase
  Uniprot ID: Q86UW9
  ENST ID: ENST00000446820
  CDS Start-End: 1-1728
atggccatggccccaagcccttccctggtgcaggtgtacaccagccccgcggctgtggccgtgtgggaatggcaggacgggctgggcacctggcacccctacagtgccaccgtctgcagcttcatcgagcagcagtttgtccagcagaagggccaacgttttgggcttgggagcctggcccacagcatccccttgggccaggcagacccctcgctggccccttacattattgacctccccagctggacccagttccgccaggacaccggcaccatgcgggctgtgcggagacacctgttcccccagcactcagcccctggccgaggtgtcgtctgggagtggctgagcgacgatggctcctggactgcctatgaagccagcgtctgtgactatctggagcagcaggtggccaggggcaaccagctcgtggacttggcccccctggggtacaactacactgtcaactacaccacccacacgcagaccaacaagacttccagcttctgccgcagcgtgcggcgccaagcagggccgccttacccggtgaccaccatcatcgctccgccgggccacacaggcgtcgcctgctcttgccaccagtgcctcagtggcagcagaactggccccgtgtcaggccgctaccgccactccatgaccaacctccctgcataccccgtcccccagcaccccccacacaggaccgcttctgtgtttgggacccaccaggcctttgcaccgtacaacaaaccctcactctccggggcccggtctgcgcccaggctgaacaccaccaacgcctggggcgcagctcctccttccctggggagccagcccctctaccgctccagcctctcccacctgggaccgcagcacctgcccccaggatcctccacctccggtgcagtcagtgcctccctccccagcggtccctcaagcagcccagggagcgtccctgccactgtgcccatgcagatgccaaagcccagcagagtccagcaggcgctcgcaggagcgaccccgaagccagagccagagccagagcaggtcataaaaaactacacggaagagctgaaagtgcccccagatgaggactgcatcatctgcatggagaagctgtccacagcgtctggatacagcgatgtgactgacagcaaggcaatcgggtccctagctgtgggccacctcaccaagtgcagccatgccttccacctgctgtgcctcctggccatgtactgcaacggcaataaggatggaagtctgcagtgtccctcctgcaaaaccatctatggagagaagacggggacccagccccagggaaagatggaggtattacggttccagatgtcgctccccggccacgaggactgcgggaccatcctcatagtttacagcattccccatggtatccagggccctgagcaccccaatcccggaaagccgttcactgccagagggtttccccgccagtgctaccttccagacaacgcccagggccgcaaggtcctagagctcctgaaggtggcctggaagaggcggctcatcttcacagtgggcacgtccagcaccacgggtgagacggacaccgtggtatggaacgagatccaccacaagacagagatggaccgcaacattacgggccacggctatcccgaccccaactacctgcagaacgtgctggctgagctggctgcccagggggtgaccgaggactgcctggagcagcagtgacctcgcaccccagcacgcccgcctctggtggccaccccgctg

SEQ ID NO: 126165 - DNA, 2281 bp, Homo sapiens
  Payload ID: 4744
  Gene Symbol: DTX2
  Gene Name: deltex 2, E3 ubiquitin ligase
  ENST ID: ENST00000446600
  CDS Start-End: 299-1894
gagtttcactctggctgccttctcctgagagtcggagccacagccagagccctgcccaggccgagccggagctgcagcccgagcgcggtggtgccctcagccccgtcctcttgtcctcctcagcctcggtgccttggaatttgtgtcgctgagtcagcaagcctttcagatttgcccggtttttgttgtttgtggtttgtatcaagatgggaactcaaacaagtcattcctcctaaggagctggtgtcttcatccagaagggacagtttgtgccagctctccagagagaaaaggcaccatgcgggctgtgcggagacacctgttcccccagcactcagcccctggccgaggtgtcgtctgggagtggctgagcgacgatggctcctggactgcctatgaagccagcgtctgtgactatctggagcagcaggtggccaggggcaaccagctcgtggacttggcccccctggggtacaactacactgtcaactacaccacccacacgcagaccaacaagacttccagcttctgccgcagcgtgcggcgccaagcagggccgccttacccggtgaccaccatcatcgctccgccgggccacacaggcgtcgcctgctcttgccaccagtgcctcagtggcagcagaactggccccgtgtcaggccgctaccgccactccatgaccaacctccctgcataccccgtcccccagcaccccccacacaggaccgcttctgtgtttgggacccaccaggcctttgcaccgtacaacaaaccctcactctccggggcccggtctgcgcccaggctgaacaccaccaacgcctggggcgcagctcctccttccctggggagccagcccctctaccgctccagcctctcccacctgggaccgcagcacctgcccccaggatcctccacctccggtgcagtcagtgcctccctccccagcggtccctcaagcagcccagggagcgtccctgccactgtgcccatgcagatgccaaagcccagcagagtccagcaggcgctcgcaggcatgacgagtgttctgatgtcagccattggactccctgtgtgtcttagccgcgcaccccagcccaccagccctcccgcctcccgtctggcttccaaaagtcacggctcagttaagagattgaggaaaatgtccgtgaaaggagcgaccccgaagccagagccagagccagagcaggtcataaaaaactacacggaagagctgaaagtgcccccagatgaggactgcatcatctgcatggagaagctgtccacagcgtctggatacagcgatgtgactgacagcaaggcaatcgggtccctagctgtgggccacctcaccaagtgcagccatgccttccacctgctgtgcctcctggccatgtactgcaacggcaataaggatggaagtctgcagtgtccctcctgcaaaaccatctatggagagaagacggggacccagccccagggaaagatggaggtattacggttccagatgtcgctccccggccacgaggactgcgggaccatcctcatagtttacagcattccccatggtatccagggccctgagcaccccaatcccggaaagccgttcactgccagagggtttccccgccagtgctaccttccagacaacgcccagggccgcaaggtcctagagctcctgaaggtggcctggaagaggcggctcatcttcacagtgggcacgtccagcaccacgggtgagacggacaccgtggtatggaacgagatccaccacaagacagagatggaccgcaacattacgggccacggctatcccgaccccaactacctgcagaacgtgctggctgagctggctgcccagggggtgaccgaggactgcctggagcagcagtgacctcgcaccccagcacgcccgcctctggtggccaccccgctgccccatggctggctgggtggccaggcaggaagtgcccagcccgagaggctgggaggtttgttgagggtgtggggtgtgccccacctgaagccggggctccccctgcctgcctctctctcctcctcccctctgggaattgggcagccctgggcagttgtactcatgggggcttaggatgcagctacctcagtgcgcagggcccgtctgtcctctgggggctgcttcgggcccgcggtgctcggggcctggtgtggggcgagtagagacttccccagcctggacgggcgtgggttctgggtcagcttcttttacctcaattttgtttgcaataaatgctctatagcc

SEQ ID NO: 126166 - DNA, 434 bp, Homo sapiens
  Payload ID: 4744
  Gene Symbol: DTX2
  Gene Name: deltex 2, E3 ubiquitin ligase
  ENST ID: ENST00000435861
  CDS Start-End: 166-434
tgatacaatctggtgattcccgagcatacacatcatattttatccccattttgccaatgaggaaactgagacccagatctgccggaggcgctgggcaatgaccccgggactccaggccagaggggtctgaagctgtttgggaaagcagcgggactccttgggaagatggccatggccccaagcccttccctggtgcaggtgtacaccagccccgcggctgtggccgtgtgggaatggcaggacgggctgggcacctggcacccctacagtgccaccgtctgcagcttcatcgagcagcagtttgtccagcagaagggccaacgttttgggcttgggagcctggcccacagcatccccttgggccaggcagacccctcgctggccccttacattattgacctccccagctggacccagttccgccaggacaccgg

SEQ ID NO: 126167 - DNA, 539 bp, Homo sapiens
  Payload ID: 4744
  Gene Symbol: DTX2
  Gene Name: deltex 2, E3 ubiquitin ligase
  ENST ID: ENST00000429179
  CDS Start-End: 216-539
cttttcaagcaaagccccatctcgccgtgctcacaggactactgtcataggaacatggatgaaacttccaattgaagacactgagctgaaccattccgcccgcccgcccgcccgagggcactccagatctgccggaggcgctgggcaatgaccccgggactccaggccagaggggtctgaagctgtttgggaaagcagcgggactccttgggaagatggccatggccccaagcccttccctggtgcaggtgtacaccagccccgcggctgtggccgtgtgggaatggcaggacgggctgggcacctggcacccctacagtgccaccgtctgcagcttcatcgagcagcagtttgtccagcagaagggccaacgttttgggcttgggagcctggcccacagcatccccttgggccaggcagacccctcgctggccccttacattattgacctccccagctggacccagttccgccaggacaccggcaccatgcgggctgtgcggagacacctgttcccccagcactcagcccctggccga

SEQ ID NO: 126168 - DNA, 566 bp, Homo sapiens
  Payload ID: 4744
  Gene Symbol: DTX2
  Gene Name: deltex 2, E3 ubiquitin ligase
  ENST ID: ENST00000425780
  CDS Start-End: 372-566
atgcgcagcggctcgctcggaagctgcgacgccgagtttcactctggctgccttctcctgagagtcggagccacagccagagccctgcccaggccgagccggagctgcagcccgagcgcggtggtgccctcagccccgtcctcttgtcctcctcagcctcggagctggtgtcttcatccagaagggacagtttgtgccagctctccagagagaaaagaaacttccaattgaagacactgagctgaaccattccgcccgcccgcccgcccgagggcactccagatctgccggaggcgctgggcaatgaccccgggactccaggccagaggggtctgaagctgtttgggaaagcagcgggactccttgggaagatggccatggccccaagcccttccctggtgcaggtgtacaccagccccgcggctgtggccgtgtgggaatggcaggacgggctgggcacctggcacccctacagtgccaccgtctgcagcttcatcgagcagcagtttgtccagcagaagggccaacgttttgggcttgggagcctggcccacagcatccccttg

SEQ ID NO: 126169 - DNA, 569 bp, Homo sapiens
  Payload ID: 4744
  Gene Symbol: DTX2
  Gene Name: deltex 2, E3 ubiquitin ligase
  ENST ID: ENST00000456590
  CDS Start-End: 495-569
agctgcgacgccgagtttcactctggctgccttctcctgagagtcggagccacagccagagccctgcccaggccgagccggagctgcagcccgagcgcggtggtgccctcagccccgtcctcttgtcctcctcagcctcgtccccaggcacagcacacggatccaacatctgtacctttgtttttactaactgctgtttcttaatttaaaacctgatcatcttcttcctcgttggcaaaggtgccttggaatttgtgtcgctgagtcagcaagcctttcagatttgcccggtttttgttgtttgtggtttgtatcaagatgggaactcaaacaagtcattcctcctaaggagctggtgtcttcatccagaagggacagtttgtgccagctctccagagagaaaagatctgccggaggcgctgggcaatgaccccgggactccaggccagaggggtctgaagctgtttgggaaagcagcgggactccttgggaagatggccatggccccaagcccttccctggtgcaggtgtacaccagccccgcggctgtggccgtgtgggaatggcag

SEQ ID NO: 126170 - DNA, 547 bp, Homo sapiens
  Payload ID: 4744
  Gene Symbol: DTX2
  Gene Name: deltex 2, E3 ubiquitin ligase
  ENST ID: ENST00000435251
  CDS Start-End: 1-262
tgcctccctccccagcggtccctcaagcagcccagggagcgtccctgccactgtgcccatgcagatgccaaagcccagcagagtccagcaggcgctcgcaggagcgaccccgaagccagagccagagccagagcaggtcataaaaaactacacggaagagctgaaagtgcccccagatgagtctgttgagtccatgagaaaaatctggactgcatcatctgcatggagaagctgtccacagcgtctggatacagcgatgtgactgacagcaaggcaatcgggtccctagctgtgggccacctcaccaagtgcagccatgccttccacctgctgtgcctcctggccatgtactgcaacggcaataagcatccctgtgcagtcagcacagtgctcatgagggagaggctcagagcaggggctgtgcccagggtcaccccactgggaggtgggagccaggccttgaggcagggctgatcctgggccccacagcagcctacacatgaagagccgcgcccagactgacccccagctgctctccctgcatcgg

SEQ ID NO: 126171 - DNA, 2623 bp, Homo sapiens
  Payload ID: 4744
  Gene Symbol: DTX2
  Gene Name: deltex 2, E3 ubiquitin ligase
  Uniprot ID: Q86UW9
  ENST ID: ENST00000430490
  CDS Start-End: 365-2233
cttctcctgagagtcggagccacagccagagccctgcccaggccgagccggagctgcagcccgagcgcggtggtgccctcagccccgtcctcttgtcctcctcagcctcggtgccttggaatttgtgtcgctgagtcagcaagcctttcagatttgcccggtttttgttgtttgtggtttgtatcaagatgggaactcaaacaagtcattcctcctaaggagctggtgtcttcatccagaagggacagtttgtgccagctctccagagagaaaagatctgccggaggcgctgggcaatgaccccgggactccaggccagaggggtctgaagctgtttgggaaagcagcgggactccttgggaagatggccatggccccaagcccttccctggtgcaggtgtacaccagccccgcggctgtggccgtgtgggaatggcaggacgggctgggcacctggcacccctacagtgccaccgtctgcagcttcatcgagcagcagtttgtccagcagaagggccaacgttttgggcttgggagcctggcccacagcatccccttgggccaggcagacccctcgctggccccttacattattgacctccccagctggacccagttccgccaggacaccggcaccatgcgggctgtgcggagacacctgttcccccagcactcagcccctggccgaggtgtcgtctgggagtggctgagcgacgatggctcctggactgcctatgaagccagcgtctgtgactatctggagcagcaggtggccaggggcaaccagctcgtggacttggcccccctggggtacaactacactgtcaactacaccacccacacgcagaccaacaagacttccagcttctgccgcagcgtgcggcgccaagcagggccgccttacccggtgaccaccatcatcgctccgccgggccacacaggcgtcgcctgctcttgccaccagtgcctcagtggcagcagaactggccccgtgtcaggccgctaccgccactccatgaccaacctccctgcataccccgtcccccagcaccccccacacaggaccgcttctgtgtttgggacccaccaggcctttgcaccgtacaacaaaccctcactctccggggcccggtctgcgcccaggctgaacaccaccaacgcctggggcgcagctcctccttccctggggagccagcccctctaccgctccagcctctcccacctgggaccgcagcacctgcccccaggatcctccacctccggtgcagtcagtgcctccctccccagcggtccctcaagcagcccagggagcgtccctgccactgtgcccatgcagatgccaaagcccagcagagtccagcaggcgctcgcaggcatgacgagtgttctgatgtcagccattggactccctgtgtgtcttagccgcgcaccccagcccaccagccctcccgcctcccgtctggcttccaaaagtcacggctcagttaagagattgaggaaaatgtccgtgaaaggagcgaccccgaagccagagccagagccagagcaggtcataaaaaactacacggaagagctgaaagtgcccccagatgaggactgcatcatctgcatggagaagctgtccacagcgtctggatacagcgatgtgactgacagcaaggcaatcgggtccctagctgtgggccacctcaccaagtgcagccatgccttccacctgctgtgcctcctggccatgtactgcaacggcaataaggatggaagtctgcagtgtccctcctgcaaaaccatctatggagagaagacggggacccagccccagggaaagatggaggtattacggttccagatgtcgctccccggccacgaggactgcgggaccatcctcatagtttacagcattccccatggtatccagggccctgagcaccccaatcccggaaagccgttcactgccagagggtttccccgccagtgctaccttccagacaacgcccagggccgcaaggtcctagagctcctgaaggtggcctggaagaggcggctcatcttcacagtgggcacgtccagcaccacgggtgagacggacaccgtggtatggaacgagatccaccacaagacagagatggaccgcaacattacgggccacggctatcccgaccccaactacctgcagaacgtgctggctgagctggctgcccagggggtgaccgaggactgcctggagcagcagtgacctcgcaccccagcacgcccgcctctggtggccaccccgctgccccatggctggctgggtggccaggcaggaagtgcccagcccgagaggctgggaggtttgttgagggtgtggggtgtgccccacctgaagccggggctccccctgcctgcctctctctcctcctcccctctgggaattgggcagccctgggcagttgtactcatgggggcttaggatgcagctacctcagtgcgcagggcccgtctgtcctctgggggctgcttcgggcccgcggtgctcggggcctggtgtggggcgagtagagacttccccagcctggacgggcgtgggttctgggtcagcttcttttacctcaattttgtttgcaataaatgctctatagccaaa

SEQ ID NO: 126172 - DNA, 859 bp, Homo sapiens
  Payload ID: 4744
  Gene Symbol: DTX2
  Gene Name: deltex 2, E3 ubiquitin ligase
  ENST ID: ENST00000423646
  CDS Start-End: 440-859
ctctggctgccttctcctgagagtcggagccacagccagagccctgcccaggccgagccggagctgcagcccgagcgcggtggtgccctcagccccgtcctcttgtcctcctcagcctcggtgccttggaatttgtgtcgctgagtcagcaagcctttcagatttgcccggtttttgttgtttgtggtttgtatcaagatgggaactcaaacaagtcattcctcctaaggagctggtgtcttcatccagaagggacagtttgtgccagctctccagagagaaaagaaacttccaattgaagacactgagctgaaccattccgcccgcccgcccgcccgagggcactccagatctgccggaggcgctgggcaatgaccccgggactccaggccagaggggtctgaagctgtttgggaaagcagcgggactccttgggaagatggccatggccccaagcccttccctggtgcaggtgtacaccagccccgcggctgtggccgtgtgggaatggcaggacgggctgggcacctggcacccctacagtgccaccgtctgcagcttcatcgagcagcagtttgtccagcagaagggccaacgttttgggcttgggagcctggcccacagcatccccttgggccaggcagacccctcgctggccccttacattattgacctccccagctggacccagttccgccaggacaccggcaccatgcgggctgtgcggagacacctgttcccccagcactcagcccctggccgaggtgtcgtctgggagtggctgagcgacgatggctcctggactgcctatgaagccagcgtctgtgactatctggagcagcaggtggccaggggcaac

SEQ ID NO: 126173 - DNA, 681 bp, Homo sapiens
  Payload ID: 4744
  Gene Symbol: DTX2
  Gene Name: deltex 2, E3 ubiquitin ligase
  ENST ID: ENST00000631991
  CDS Start-End: 1-639
gactgcatcatctgcatggagaagctgtccacagcgtctggatacagcgatgtgactgacagcaaggcaatcgggtccctagctgtgggccacctcaccaagtgcagccatgccttccacctgctgtgcctcctggccatgtactgcaacggcaataaggatggaagtctgcagtgtccctcctgcaaaaccatctatggagagaagacggggacccagccccagggaaagatggaggtattacggttccagatgtcgctccccggccacgaggactgcgggaccatcctcatagtttacagcattccccatggtatccagggccctgagcaccccaatcccggaaagccgttcactgccagagggtttccccgccagtgctaccttccagacaacgcccagggccgcaaggtcctagagctcctgaaggtggcctggaagaggcggctcatcttcacagtgggcacgtccagcaccacgggtgagacggacaccgtggtatggaacgagatccaccacaagacagagatggaccgcaacattacgggccacggctatcccgaccccaactacctgcagaacgtgctggctgagctggctgcccagggggtgaccgaggactgcctggagcagcagtgacctcgcaccccagcacgcccgcctctggtggccaccccgctg

SEQ ID NO: 126174 - DNA, 1032 bp, Homo sapiens
  Payload ID: 4744
  Gene Symbol: DTX2
  Gene Name: deltex 2, E3 ubiquitin ligase
  ENST ID: ENST00000632696
  CDS Start-End: 1-639
gactgcatcatctgcatggagaagctgtccacagcgtctggatacagcgatgtgactgacagcaaggcaatcgggtccctagctgtgggccacctcaccaagtgcagccatgccttccacctgctgtgcctcctggccatgtactgcaacggcaataaggatggaagtctgcagtgtccctcctgcaaaaccatctatggagagaagacggggacccagccccagggaaagatggaggtattacggttccagatgtcgctccccggccacgaggactgcgggaccatcctcatagtttacagcattccccatggtatccagggccctgagcaccccaatcccggaaagccgttcactgccagagggtttccccgccagtgctaccttccagacaacgcccagggccgcaaggtcctagagctcctgaaggtggcctggaagaggcggctcatcttcacagtgggcacgtccagcaccacgggtgagacggacaccgtggtatggaacgagatccaccacaagacagagatggaccgcaacattacgggccacggctatcccgaccccaactacctgcagaacgtgctggctgagctggctgcccagggggtgaccgaggactgcctggagcagcagtgacctcgcaccccagcacgcccgcctctggtggccaccccgctgccccatggctggctgggtggccaggcaggaagtgcccagcccgagaggctgggaggtttgttgagggtgtggggtgtgccccacctgaagccggggctccccctgcctgcctctctctcctcctcccctctgggaattgggcagccctgggcagttgtactcatgggggcttaggatgcagctacctcagtgcgcagggcccgtctgtcctctgggggctgcttcgggcccgcggtgctcggggcctggtgtggggcgagtagagacttccccagcctggacgggcgtgggttctgggtcagcttcttttacctcaattttgtttgcaataaatgctctatagccaaagcc

SEQ ID NO: 126175 - DNA, 1026 bp, Homo sapiens
  Payload ID: 4744
  Gene Symbol: DTX2
  Gene Name: deltex 2, E3 ubiquitin ligase
  ENST ID: ENST00000631700
  CDS Start-End: 1-639
gactgcatcatctgcatggagaagctgtccacagcgtctggatacagcgatgtgactgacagcaaggcaatcgggtccctagctgtgggccacctcaccaagtgcagccatgccttccacctgctgtgcctcctggccatgtactgcaacggcaataaggatggaagtctgcagtgtccctcctgcaaaaccatctatggagagaagacggggacccagccccagggaaagatggaggtattacggttccagatgtcgctccccggccacgaggactgcgggaccatcctcatagtttacagcattccccatggtatccagggccctgagcaccccaatcccggaaagccgttcactgccagagggtttccccgccagtgctaccttccagacaacgcccagggccgcaaggtcctagagctcctgaaggtggcctggaagaggcggctcatcttcacagtgggcacgtccagcaccacgggtgagacggacaccgtggtatggaacgagatccaccacaagacagagatggaccgcaacattacgggccacggctatcccgaccccaactacctgcagaacgtgctggctgagctggctgcccagggggtgaccgaggactgcctggagcagcagtgacctcgcaccccagcacgcccgcctctggtggccaccccgctgccccatggctggctgggtggccaggcaggaagtgcccagcccgagaggctgggaggtttgttgagggtgtggggtgtgccccacctgaagccggggctccccctgcctgcctctctctcctcctcccctctgggaattgggcagccctgggcagttgtactcatgggggcttaggatgcagctacctcagtgcgcagggcccgtctgtcctctgggggctgcttcgggcccgcggtgctcggggcctggtgtggggcgagtagagacttccccagcctggacgggcgtgggttctgggtcagcttcttttacctcaattttgtttgcaataaatgctctatagcc

SEQ ID NO: 126176 - DNA, 366 bp, Homo sapiens
  Payload ID: 4744
  Gene Symbol: DTX2
  Gene Name: deltex 2, E3 ubiquitin ligase
  ENST ID: ENST00000633541
  CDS Start-End: 1-81
tctgttgagtccatgagaaaaatctggactgcatcatctgcatggagaagctgtccacagcgtctggatacagcgatgtgactgacagcaaggcaatcgggtccctagctgtgggccacctcaccaagtgcagccatgccttccacctgctgtgcctcctggccatgtactgcaacggcaataagcatccctgtgcagtcagcacagtgctcatgagggagaggctcagagcaggggctgtgcccagggtcaccccactgggaggtgggagccaggccttgaggcagggctgatcctgggccccacagcagcctacacatgaagagccgcgcccagactgacccccagctgctctccctgcatcgg

SEQ ID NO: 126177 - DNA, 1029 bp, Homo sapiens
  Payload ID: 4744
  Gene Symbol: DTX2
  Gene Name: deltex 2, E3 ubiquitin ligase
  ENST ID: ENST00000634040
  CDS Start-End: 1-639
gactgcatcatctgcatggagaagctgtccacagcgtctggatacagcgatgtgactgacagcaaggcaatcgggtccctagctgtgggccacctcaccaagtgcagccatgccttccacctgctgtgcctcctggccatgtactgcaacggcaataaggatggaagtctgcagtgtccctcctgcaaaaccatctatggagagaagacggggacccagccccagggaaagatggaggtattacggttccagatgtcgctccccggccacgaggactgcgggaccatcctcatagtttacagcattccccatggtatccagggccctgagcaccccaatcccggaaagccgttcactgccagagggtttccccgccagtgctaccttccagacaacgcccagggccgcaaggtcctagagctcctgaaggtggcctggaagaggcggctcatcttcacagtgggcacgtccagcaccacgggtgagacggacaccgtggtatggaacgagatccaccacaagacagagatggaccgcaacattacgggccacggctatcccgaccccaactacctgcagaacgtgctggctgagctggctgcccagggggtgaccgaggactgcctggagcagcagtgacctcgcaccccagcacgcccgcctctggtggccaccccgctgccccatggctggctgggtggccaggcaggaagtgcccagcccgagaggctgggaggtttgttgagggtgtggggtgtgccccacctgaagccggggctccccctgcctgcctctctctcctcctcccctctgggaattgggcagccctgggcagttgtactcatgggggcttaggatgcagctacctcagtgcgcagggcccgtctgtcctctgggggctgcttcgggcccgcggtgctcggggcctggtgtggggcgagtagagacttccccagcctggacgggcgtgggttctgggtcagcttcttttacctcaattttgtttgcaataaatgctctatagccaaa

SEQ ID NO: 126178 - DNA, 1029 bp, Homo sapiens; identical to SEQ ID NO: 126177
  Payload ID: 4744
  Gene Symbol: DTX2
  Gene Name: deltex 2, E3 ubiquitin ligase
  ENST ID: ENST00000631645
  CDS Start-End: 1-639

SEQ ID NO: 126179 - DNA, 5868 bp, Homo sapiens
  Payload ID: 4745
  Gene Symbol: DTX3L
  Gene Name: deltex 3 like, E3 ubiquitin ligase
  Uniprot ID: Q8TDB6
  ENST ID: ENST00000296161
  CDS Start-End: 190-2412
tactcacccggcaggccgctctcctcggtgcagacagcacagggaggagggggaagcggctctgccgggaacagggagggacctccagggaagcgaaactgaaactttgcgcccagtccgcagggcgggccgcgcctttaccgcccagctgcctcccggagcccccgcgccctcccgacgcgcagagccatggcctcccacctgcgcccgccgtccccgctcctcgtgcgggtgtacaagtccggcccccgagtacgaaggaagctggagagctacttccagagctctaagtcctcgggcggcggggagtgcacggtcagcacccaggaacacgaagccccgggcaccttccgggtggagttcagtgaaagggcagctaaggagagagtgttgaaaaaaggagagcaccaaatacttgttgacgaaaaacctgtgcccattttcctggtacccactgaaaattcaataaagaagaacacgagacctcaaatttcttcactgacacaatcacaagcagaaacaccgtctggtgatatgcatcaacatgaaggacatattcctaatgctgtggattcctgtctccaaaagatctttcttactgtaacagctgacctgaactgtaacctgttctccaaagagcagagggcatacataaccacactgtgccctagtatcagaaaaatggaaggtcacgatggaattgagaaggtgtgtggtgacttccaagacattgaaagaatacatcaatttttgagtgagcagttcctggaaagtgagcagaaacaacaattttccccttcaatgacagagaggaagccactcagtcagcaggagagggacagctgcatttctccttctgaaccagaaaccaaggcagaacaaaaaagcaactattttgaagttcccttgccttactttgaatactttaaatatatctgtcctgataaaatcaactcaatagagaaaagatttggtgtaaacattgaaatccaggagagttctccaaatatggtctgtttagatttcacctcaagtcgatcaggtgacctggaagcagctcgtgagtcttttgctagtgaatttcagaagaacacagaacctctgaagcaagaatgtgtctctttagcagacagtaagcaggcaaataaattcaaacaggaattgaatcaccagtttacaaagctccttataaaggagaaaggaggcgaattaactctccttgggacccaagatgacatttcagctgccaaacaaaaaatctctgaagcttttgtcaagatacctgtgaaactatttgctgccaattacatgatgaatgtaattgaggttgatagtgcccactataaacttttagaaactgaattactacaggagatatcagagatcgaaaaaaggtatgacatttgcagcaaggtttctgagaaaggtcagaaaacctgcattctgtttgaatccaaggacaggcaggtagatctatctgtgcatgcttatgcaagtttcatcgatgcctttcaacatgcctcatgtcagttgatgagagaagttcttttactgaagtctttgggcaaggagagaaagcacttacatcagaccaagtttgctgatgactttagaaaaagacatccaaatgtacactttgtgctaaatcaagagtcaatgactttgactggtttgccaaatcaccttgcaaaggcgaagcagtatgttctaaaaggaggaggaatgtcttcattggctggaaagaaattgaaagagggtcatgaaacaccgatggacattgatagcgatgattccaaagcagcttctccgccactcaagggctctgtgagttctgaggcctcagaactggacaagaaggaaaagggcatctgtgtcatctgtatggacaccattagtaacaaaaaagtgctaccaaagtgcaagcatgaattctgcgccccttgtatcaacaaagccatgtcatataagccaatctgtcccacatgccagacttcctatggtattcagaaaggaaatcagccagagggaagcatggttttcactgtttcaagagactcacttccaggttatgagtcctttggcaccattgtgattacttattctatgaaagcaggcatacaaacagaagaacacccaaacccaggaaagagataccctggaatacagcgaactgcatacttgcctgataataaggaaggaaggaaggttttgaaactgctttatagggcctttgaccaaaagctgatttttacagtggggtactctcgcgtattaggagtctcagatgtcatcacttggaatgatattcaccacaaaacatcccggtttggaggaccagaaatgtatggctatcctgatccttcttacctgaaacgtgtcaaagaggagctgaaagccaaaggaattgagtaagacaactgctggaagatgtcttaaatcaagctttcaaaaaaatatattttaggaggctgatttaatgccagtctaaatccttatgtagaaaggactttgaaatttttcttctcaagaaatggtttgtataagaataacaatctgctagtctgtcatttctggagtgatacttttttttttgagacggagtctgctctgtcgctcgcgctggagtgcagtggcatgatctcggctcactgcaagctccgcctcccaggttcatgccattctcctacctcagcctcccgagtagctgggactacaggcgcccaccaccatgcccggctaatttttgtttttgtatttttagtagagacagggtttcactgtgttagccaggatggtctcgatctcctgacctcgtgatccgcccgcctcagccttccaaagtgttgggattataggcgtgagccaccgcgcccagccctggagtgatactttttatggaagacaaaagccccccaaatctgtgtaaaatctgctgcaaaggtgtcatccctcttgtgtcatcactggggttagaggtgggtccgaaataatcttctgtgtccttcagttggactctcggctgccaattgatctctttttcattgccatctctggggtggttctttggttttttgtgtgttttccccttcatctctacctgtgaaagtgaaattctattgtaaatgggaggaaaaagggttggttgtgaaaaattaaagacccacattctgctttcttactcatggtaagaaaagtggccatgagtagagattgggcaagcattggtaataaatggaataagactattattattattatttgagatggagtctcactctgtcacccaggctggaatgcagtggtgtgatcttggctcactgcaacctccacttcccgggttcaagcgattctcctgcctcagcctcctgagtagctgggattacaggtgtgtgcctccacacccggctaattttttgtatttttagtagagacggggttttgccatgttggccaggctggtttcaaactcctgagctcaaatgatcctcctgccttggcctcccaaagtgctggaattacaggcatgagccaccacacccacacaagactatcatttttaatgaccaagagcctagtatatagttggtgcctgtcttagtctgtttgtgttgctataaaagaacacctgagactgggtaattgataaagaaaaaggtttgtttggctcacaattttgctggctagaaggttgggcatccggtgaaagcctcaggctgcttccattcatagcaaagggcagccagtgtgtgcagaaatcaaatgacagagaggaagtgagagagagaggtgtcggggaggtgccaggctctttttaacaagcagttcttcaggaactaagagtgagtcactcccatgagaacagcaccaagccattcatgggggaatctgcccccatgacccagacccctcccgttaggcttcacctccaacactgaggatcaaatttcaacatgagatttggaggaggtcaaacaaactaaactgtagcagtgtttcataaaattgtttgcctgactcaggttgctagtaagccagcagagggatatttgcctcctaaatctttggcagaggcaggagtaaggaagccatttctggagtccttgctactaatttggaaaactgagcttctttctttcattgctttttcccttaagagacaagtccttactatattgccctgtctctcaagggaagacatcaagactggacttgaactcctgggctcaagccatcccccaaccttggcctctcgagtagatgggattataggcatgtgccacggtgcctgacttgagtttcttattctagaacacttggagcctgaactctgaccaggcccctcacttgagcctttgctttctgctccttgtaaactgccatattgggtgcacttgccctgccacagtaatgctatatatttctgagcattgtttttctctagataattttatatttttgagtataccccacttccaagtgttttttgttttgttttgctttgtttttgttgttgttgttttgagacagggtctcactgtgtcccccaggctggagtgcagtggcacaatgacgactcactgcagcctcaacctcctggggccaagtgatcctcccacctcagcctctcaagtggctgggaccacagaagtgcaccaccatgcctggcttttttttttttttttggtcgagatggggtgtccctgtgttgcccagactggtcttgaactcctggactcaagggatcctcctgtcttgggctcccaaagtgttgggattacaggcgtgagtgaccatgcctagctcacttccaggtttaacagacaaaataaacttactctagtttccatctctatcattttataataaccgtagcccacattgtagtagtttttcagctctttactaagtcccaccaattcatgttttcacccttaaaatctttctcactgatactctctctggacagaaaaaaggtgaaataagcctactataaggaatatatgacatgctaaattttatttttaaacggttcttcaagtcagattaaagtaataatagcaaattatgtgattatccatgtcccagcctctctccaaaaaaatagtaaacaagatgtcttcttcttttcccaaagatacacatacacacatgtacaaatttttttatcagataataatagctaatatttaatgagtacttaccttagtttgtcccctttacaacagctttacatctgtgtgattgatacagttcatattcccattttataactgagaaaactggtgcacagagaggataagcaacttgccaaaggtcacacagttaataagtggaaatgctggggtatgaaccaggtagtctgcccccatagctctgccccccagagctgtactgtctcccatgagggtacttctccatggagcagcctgaggcgatccctttattctgggcttctctcagaaatggattcccacacagtattcaaagcaaatttccccagaggaaatcctattggaagaacttaaaaactcagaatctttttctttgtccagagagttgaggaagcttaagctaaatgatacatgtttttaaaaaaaaatcagattataaatttagtttttggtgattcattaaattctttactattatagttattttctagctgttcatcttttagctaaatttgttccaaagaagcaaaagtttggtttctactaagttctggattctggatgggagattgcactgtgtgtgacatgcaagtttcatggtgtgggagattgcagagcatttgggttactgcttttactctttggaagctgttatcatctgtatctgctttaaataaagttaaagatttggaacaaa

SEQ ID NO: 126180 - DNA, 687 bp, Homo sapiens
  Payload ID: 4745
  Gene Symbol: DTX3L
  Gene Name: deltex 3 like, E3 ubiquitin ligase
  Uniprot ID: Q8TDB6
  ENST ID: ENST00000383661
  CDS Start-End: 1-687
atggcctcccacctgcgcccgccgtccccgctcctcgtgcgggtgtacaagtccggcccccgagtacgaaggaagctggagagctacttccagagctctaagtcctcgggcggcggggagtgcacggtcagcacccaggaacacgaagccccgggcaccttccgggtggagttcagtgaaagggcagctaaggagagagtgttgaaaaaaggagagcaccaaatacttgttgacgaaaaacctgtgcccattttcctggtacccactgaaaattcaataaagaagaacacgagacctcaaatttcttcactgacacaatcacaagcagaaacaccgtctggtgatatgcatcaacatgaaggacatattcctaatgctgtggattcctgtctccaaaaggaagaacacccaaacccaggaaagagataccctggaatacagcgaactgcatacttgcctgataataaggaaggaaggaaggttttgaaactgctttatagggcctttgaccaaaagctgatttttacagtggggtactctcgcgtattaggagtctcagatgtcatcacttggaatgatattcaccacaaaacatcccggtttggaggaccagaaatgtatggctatcctgatccttcttacctgaaacgtgtcaaagaggagctgaaagccaaaggaattgagtaa

SEQ ID NO: 126181 - DNA, 2029 bp, Homo sapiens
  Payload ID: 4746
  Gene Symbol: DTX3
  Gene Name: deltex 3, E3 ubiquitin ligase
  Uniprot ID: Q8N9I9
  ENST ID: ENST00000337737
  CDS Start-End: 338-1381
ctcagtcatgtgaccggcaatggcggcgctgacgagagctgcatttggaagtgttgtggagacagccccgtagcccaatgcgaccagactcagggaaaacatcaggcccctccagctgagcccttgtgtgagccccgcccctccctaaatgccagacttgggagctgacagacagcactgcctgtgctgggtttaaaagtcctggtcagctgagtggaaatagaaggatttctgctgccatcatcttccatgggctttccaggtcacacgacctacaagtagggagcagggaaagaagagtgagcctgcatgccaattctaagctcttcaggatcaaatgtcgttcgtcctgtccagaatggcagcctgtggaggcacctgcaagaacaaagtgactgtgtccaagcccgtgtgggacttcctgagcaaagagaccccagcccggctggcccggcttcgggaggagcaccgtgtgtccatcctcatagatggcgagacttctgacatctatgttctccagctttccccacagggtcctcccccggcccctccaaatgggctctacctagcccggaaggctctcaaggggctgctaaaagaggcagagaaagagctgaagaaagctcagaggcagggggagctgatgggctgcctggctctggggggtggaggggagcaccctgagatgcaccgcgcaggcccaccccctctccgagcagccccacttctgcccccaggagctcgggggctcccccctcctcctccccccctgcccccacctcttcctcctcgccttcgggaggaggcagaagagcaggagagcacctgccccatctgtctgggggagatccagaatgccaagacattggagaagtgccggcattcattctgcgagggctgcatcacccgggctctgcaggtgaaaaaggcctgccccatgtgcggccgcttctatgggcagctggtgggcaaccagccccagaatgggcggatgctggtctctaaggacgccaccctcctactgcccagctatgagaagtacggcaccattgtcatccagtacgtcttcccgcccggtgtccagggggctgaacacccaaacccaggagttcggtatcctggcaccacacgggtggcctacctcccggactgccctgagggcaacaaggtgctgaccctgttccgcaaggcgtttgaccagcgtctcaccttcactatcggcacgtccatgaccacagggagaccgaatgtcatcacctggaacgacatccaccacaagaccagctgcacagggggaccccagctgtttgggtacccagaccccacctacctgacccgggtgcaagaggagctgagagcgaagggtatcacagatgactgaaggacatcgcctttgccaaggcccctgctgtctgcctctactaggacccagcagaagcctctttctcctctctgccccctgccccccacaccacacctgtaggggacctgtctgactgggaagggagttccgagagggagggggcaatcccttcccccatcccccactggccaagtgtttcaatgcagtgtgagccactcccttctggcagaggccgacctccaaggctctgttctcccctccccgtgtacatatactcccggtttccctgcccctccattgcccttggctttttctggtatgtgctgtgctccacgaccaagccgagaaaggacctagggtggggaagggagggtctcttgattcctaaccgcccccacatactgctccaccgctgaacttcgggtgccggggaggagaaattgggctgatgtgagctccccgtcacccgccatggagccggctgtgtgtgttcatcagatacagttctcccttaaccttgtcctttctctcctgtgtctcagtctccgtcagtctgtctttctccgctcttctctgacccctgtgaggaacctccttaccctgttctggaatcgctgccagactgtagcttttaatttaataaaaataaagtaaaatatgcaactc

SEQ ID NO: 126182 - DNA, 791 bp, Homo sapiens
  Payload ID: 4746
  Gene Symbol: DTX3
  Gene Name: deltex 3, E3 ubiquitin ligase
  ENST ID: ENST00000550300
  CDS Start-End: 1-519
cagccccagaatgggcggatgctggtctctaaggacgccaccctcctactgcccagctatgagaagtacggcaccattgtcatccagtacgtcttcccgcccggtgtccagggggctgaacacccaaacccaggagttcggtatcctggcaccacacgggtggcctacctcccggactgccctgagggcaacaaggtgctgaccctgttccgcaaggcgtttgaccagcgtctcaccttcactatcggcacgtccatgaccacagggagaccgaatgtcatcacctggaacgacatccaccacaagaccagctgcacagggggaccccagctgtgcgacccctcttcatttcctttcccttggctcctcccctttgttccatttccactgagggacccaccaacccctcgctcacggagcctcctaactggagagaaccacttccaaactgttcagccatctcagtttctcctacattcaacctggtcctggtgtgcccagcttagcctacaaaaataagcagaactgggctaaattatcttggatttggaggtgtcctcccttaggggaggtggggaggtgtctgagccacctagaatgagggtgagcatggggataatagcaagttcaaacagctaacaaccctcaccctcatttctctttgctcccaggtttgggtacccagaccccacctacctgacccgggtgcaagaggagctgagagcgaagggtatcacagatgactgaaggacatcgcctttgccaaggcccctgctgtctgcctctactag

SEQ ID NO: 126183 - DNA, 3199 bp, Homo sapiens
  Payload ID: 4746
  Gene Symbol: DTX3
  Gene Name: deltex 3, E3 ubiquitin ligase
  Uniprot ID: Q8N9I9
  ENST ID: ENST00000548198
  CDS Start-End: 1505-2548
agtcatgtgaccggcaatggcggcgctgacgagaggtaggtgagcccggcgccccccacacccaccgcgcgccccccgggccccgctcgcacccctcacgcgccccccgctcccccggcgccccctcctccacctcccctccccgcgcgcggctccgggctccccgctccgtgcccggccgatcatctttctagcaccctccagccttggcctccattcgggggttctgagggctgcgatcgggccgacatgcacccccacccggcggtggggatccgggggctttggctactgagggatgtggggagttggttccgggtcgggtcttggaggaggccgtggggggagggcgggagctgcttcagtggatgcccccagggacccttgcccatccgggctgtgcctccctctggcctctgtctggagggagagactggttccttgtccggcctgggttgccacagaggaatcacagacccaccctaaactggggccccgcctcccttttctgtgccagcaggacttggacctaggacacctaggtcctgggtcccccgtgatggggagagaagtgttgcatcgcggatagactgtatgggctgagactctagggttccattttcacttatgaatctcgaggtgcatctggccttgggggacgatgatggaggcatgaagggacagctgctccttcttggatcagtcaataaatggaggtcacactaatggcccttctttctgtttgagctgcatttggaagtgttgtggagacagccccgtagcccaatgcgaccagactcagggaaaacatcaggcccctccagctgagcccttgtgtgagccccgcccctccctaaatgccagacttgggagctgacagacagcactgcctgtgctgggtttaaaaggtgacaatgagaactttgttattgcaggggctgctgccactttgttcacatccttaacagacttcagcagaagggactgagttagctctcaaggaaggctccctggcaataggggctgaattatttggcaatgtggagcaggcgaggagttggggagcataggaaatattccggtccatgtgatctgagggaggtggcaagaagacctccacctgtgtgggcgttttctttcctgacttctcttatgtgtgccctaggctttcttgggggcctcagagctggggaagaaaggaggaaggttagcatgttgaagttccttcttgagcaacttggggagaagctgataatggaattctgcagagaagagaggagatggaaggggagtttttatttctgggttggctgaggggaatggtaacatttgccatcataactttttacccttcccccactcccagtcctggtcagctgagtggaaatagaaggatttctgctgccatcatcttccatgggctttccaggtcacacgacctacaagtagggagcagggaaagaagagtgagcctgcatgccaattctaagctcttcaggatcaaatgtcgttcgtcctgtccagaatggcagcctgtggaggcacctgcaagaacaaagtgactgtgtccaagcccgtgtgggacttcctgagcaaagagaccccagcccggctggcccggcttcgggaggagcaccgtgtgtccatcctcatagatggcgagacttctgacatctatgttctccagctttccccacagggtcctcccccggcccctccaaatgggctctacctagcccggaaggctctcaaggggctgctaaaagaggcagagaaagagctgaagaaagctcagaggcagggggagctgatgggctgcctggctctggggggtggaggggagcaccctgagatgcaccgcgcaggcccaccccctctccgagcagccccacttctgcccccaggagctcgggggctcccccctcctcctccccccctgcccccacctcttcctcctcgccttcgggaggaggcagaagagcaggagagcacctgccccatctgtctgggggagatccagaatgccaagacattggagaagtgccggcattcattctgcgagggctgcatcacccgggctctgcaggtgaaaaaggcctgccccatgtgcggccgcttctatgggcagctggtgggcaaccagccccagaatgggcggatgctggtctctaaggacgccaccctcctactgcccagctatgagaagtacggcaccattgtcatccagtacgtcttcccgcccggtgtccagggggctgaacacccaaacccaggagttcggtatcctggcaccacacgggtggcctacctcccggactgccctgagggcaacaaggtgctgaccctgttccgcaaggcgtttgaccagcgtctcaccttcactatcggcacgtccatgaccacagggagaccgaatgtcatcacctggaacgacatccaccacaagaccagctgcacagggggaccccagctgtttgggtacccagaccccacctacctgacccgggtgcaagaggagctgagagcgaagggtatcacagatgactgaaggacatcgcctttgccaaggcccctgctgtctgcctctactaggacccagcagaagcctctttctcctctctgccccctgccccccacaccacacctgtaggggacctgtctgactgggaagggagttccgagagggagggggcaatcccttcccccatcccccactggccaagtgtttcaatgcagtgtgagccactcccttctggcagaggccgacctccaaggctctgttctcccctccccgtgtacatatactcccggtttccctgcccctccattgcccttggctttttctggtatgtgctgtgctccacgaccaagccgagaaaggacctagggtggggaagggagggtctcttgattcctaaccgcccccacatactgctccaccgctgaacttcgggtgccggggaggagaaattgggctgatgtgagctccccgtcacccgccatggagccggctgtgtgtgttcatcagatacagttctcccttaaccttgtcctttctctcctgtgtctcagtctccgtcagtctgtctttctccgctcttctctgacccctgtgaggaacctccttaccctgttctggaatcgctgccagactgtagcttttaatttaataaaaataaagtaaaatatgcaactcttt

SEQ ID NO: 126184 - DNA, 2270 bp, Homo sapiens
  Payload ID: 4746
  Gene Symbol: DTX3
  Gene Name: deltex 3, E3 ubiquitin ligase
  ENST ID: ENST00000548478
  CDS Start-End: 1689-2270
catctttctagcaccctccagccttggcctccattcgggggttctgagggctgcgatcgggccgacatgcacccccacccggcggtggggatccgggggctttggctactgagggatgtggggagttggttccgggtcgggtcttggaggaggccgtggggggagggcgggagctgcttcagtggatgcccccagggacccttgcccatccgggctgtgcctccctctggcctctgtctggagggagagactggttccttgtccggcctgggttgccacagaggaatcacagacccaccctaaactggggccccgcctcccttttctgtgccagcaggacttggacctaggacacctaggtcctgggtcccccgtgatggggagagaagtgttgcatcgcggatagactgtatgggctgagactctagggttccattttcacttatgaatctcgaggtgcatctggccttgggggacgatgatggaggcatgaagggacagctgctccttcttggatcagtcaataaatggaggtcacactaatggcccttctttctgtttgagctgcatttggaagtgttgtggagacagccccgtagcccaatgcgaccagactcagggaaaacatcaggcccctccagctgagcccttgtgtgagccccgcccctccctaaatgccagacttgggagctgacagacagcactgcctgtgctgggtttaaaaggtgacaatgagaactttgttattgcaggggctgctgccactttgttcacatccttaacagacttcagcagaagggactgagttagctctcaaggaaggctccctggcaataggggctgaattatttggcaatgtggagcaggcgaggagttggggagcataggaaatattccggtccatgtgatctgagggaggtggcaagaagacctccacctgtgtgggcgttttctttcctgacttctcttatgtgtgccctaggctttcttgggggcctcagagctggggaagaaaggaggaaggttagcatgttgaagttccttcttgagcaacttggggagaagctgataatggaattctgcagagaagagaggagatggaaggggagtttttatttctgggttggctgaggggaatggtaacatttgccatcataactttttacccttcccccactcccagtcctggtcagctgagtggaaatagaaggatttctgctgccatcatcttccatgggctttccaggtcacacgacctacaagtagggagcagggaaagaagagtgagcctgcatgccaattctaagctcttcaggatcaaagtaagcaaaaaggaggggcaaagagtctccctcccctttaaacagcccatttttccccaagaggtgggaggggcaagttgtttctatgatctgggagaaatgacaggagaaacaagactgatacttggcttagatgataatatagctctggaaacttttttgctcttcagtgggttttgggtttggaagataaggggagacagaatatgaatttgggtgaagggttggggattaggctttgagaaaacagaggtaatagagggtttggaaggaacctgaagtaggaggcactgatacttgtcaaatggggaccccccaccctgagtccctttcaccctgggggcagtgtcgttcgtcctgtccagaatggcagcctgtggaggcacctgcaagaacaaagtgactgtgtccaagcccgtgtgggacttcctgagcaaagagaccccagcccggctggcccggcttcgggaggagcaccgtgtgtccatcctcatagatggcgagacttctgacatctatgttctccagctttccccacagggtcctcccccggcccctccaaatgggctctacctagcccggaaggctctcaaggggctgctaaaagaggcagagaaagagctgaagaaagctcagaggcagggggagctgatgggctgcctggctctggggggtggaggggagcaccctgagatgcaccgcgcaggcccaccccctctccgagcagccccacttctgcccccaggagctcgggggctcccccctcctcctccccccctgcccccacctcttcctcctcgccttcgggaggaggcagaagagcaggagagcacctgccccatctgtctgggggagatccagaatgccaagacattggagaagtgccggcattcattctgcgagggctgcatcacccgggctctgcaggtgaaaaaggcctgccccatg

SEQ ID NO: 126185 - DNA, 1840 bp, Homo sapiens
  Payload ID: 4746
  Gene Symbol: DTX3
  Gene Name: deltex 3, E3 ubiquitin ligase
  Uniprot ID: Q8N9I9
  ENST ID: ENST00000551632
  CDS Start-End: 136-1188
ccggcaatggcggcgctgacgagagtcctggtcagctgagtggaaatagaaggatttctgctgccatcatcttccatgggctttccaggtcacacgacctacaagtagggagcagggaaagaagagtgagcctgcatgccaattctaagctcttcaggatcaaaaatggcagcctgtggaggcacctgcaagaacaaagtgactgtgtccaagcccgtgtgggacttcctgagcaaagagaccccagcccggctggcccggcttcgggaggagcaccgtgtgtccatcctcatagatggcgagacttctgacatctatgttctccagctttccccacagggtcctcccccggcccctccaaatgggctctacctagcccggaaggctctcaaggggctgctaaaagaggcagagaaagagctgaagaaagctcagaggcagggggagctgatgggctgcctggctctggggggtggaggggagcaccctgagatgcaccgcgcaggcccaccccctctccgagcagccccacttctgcccccaggagctcgggggctcccccctcctcctccccccctgcccccacctcttcctcctcgccttcgggaggaggcagaagagcaggagagcacctgccccatctgtctgggggagatccagaatgccaagacattggagaagtgccggcattcattctgcgagggctgcatcacccgggctctgcaggtgaaaaaggcctgccccatgtgcggccgcttctatgggcagctggtgggcaaccagccccagaatgggcggatgctggtctctaaggacgccaccctcctactgcccagctatgagaagtacggcaccattgtcatccagtacgtcttcccgcccggtgtccagggggctgaacacccaaacccaggagttcggtatcctggcaccacacgggtggcctacctcccggactgccctgagggcaacaaggtgctgaccctgttccgcaaggcgtttgaccagcgtctcaccttcactatcggcacgtccatgaccacagggagaccgaatgtcatcacctggaacgacatccaccacaagaccagctgcacagggggaccccagctgtttgggtacccagaccccacctacctgacccgggtgcaagaggagctgagagcgaagggtatcacagatgactgaaggacatcgcctttgccaaggcccctgctgtctgcctctactaggacccagcagaagcctctttctcctctctgccccctgccccccacaccacacctgtaggggacctgtctgactgggaagggagttccgagagggagggggcaatcccttcccccatcccccactggccaagtgtttcaatgcagtgtgagccactcccttctggcagaggccgacctccaaggctctgttctcccctccccgtgtacatatactcccggtttccctgcccctccattgcccttggctttttctggtatgtgctgtgctccacgaccaagccgagaaaggacctagggtggggaagggagggtctcttgattcctaaccgcccccacatactgctccaccgctgaacttcgggtgccggggaggagaaattgggctgatgtgagctccccgtcacccgccatggagccggctgtgtgtgttcatcagatacagttctcccttaaccttgtcctttctctcctgtgtctcagtctccgtcagtctgtctttctccgctcttctctgacccctgtgaggaacctccttaccctgttctggaatcgctgccagactgtagcttttaatttaataaaaataaagtaaaatatgcaactcttta

SEQ ID NO: 126186 - DNA, 569 bp, Homo sapiens
  Payload ID: 4746
  Gene Symbol: DTX3
  Gene Name: deltex 3, E3 ubiquitin ligase
  ENST ID: ENST00000550596
  CDS Start-End: 548-569
atttttgttttggggaggaagggcaggggcttgcggatagaagggggtcaaaggaacggtgattatcacctgtgaggggaaagggggtgctgtcctccctccttcccttttcctcagcctgcaccccctgcaatcccccacctttcggggtctccccctccttgttgctaaggcccggaccgtcatcccagcaacagcctcagtcatgtgaccggcaatggcggcgctgacgagaggctttcttgggggcctcagagctggggaagaaaggaggaaggttagcatgttgaagttccttcttgagcaacttggggagaagctgataatggaattctgcagagaagagaggagatggaaggggagtttttatttctgggttggctgaggggaatggtaacatttgccatcataactttttacccttcccccactcccagtcctggtcagctgagtggaaatagaaggatttctgctgccatcatcttccatgggctttccaggtcacacgacctacaagtagggagcagggaaagaagagtgagcctgcatgccaattctaagctcttcag

SEQ ID NO: 126187 - DNA, 2067 bp, Homo sapiens
  Payload ID: 4746
  Gene Symbol: DTX3
  Gene Name: deltex 3, E3 ubiquitin ligase
  Uniprot ID: Q8N9I9
  ENST ID: ENST00000548804
  CDS Start-End: 376-1419
catttttgttttggggaggaagggcaggggcttgcggatagaagggggtcaaaggaacggtgattatcacctgtgaggggaaagggggtgctgtcctccctccttcccttttcctcagcctgcaccccctgcaatcccccacctttcggggtctccccctccttgttgctaaggcccggaccgtcatcccagcaacagcctcagtcatgtgaccggcaatggcggcgctgacgagagtcctggtcagctgagtggaaatagaaggatttctgctgccatcatcttccatgggctttccaggtcacacgacctacaagtagggagcagggaaagaagagtgagcctgcatgccaattctaagctcttcaggatcaaatgtcgttcgtcctgtccagaatggcagcctgtggaggcacctgcaagaacaaagtgactgtgtccaagcccgtgtgggacttcctgagcaaagagaccccagcccggctggcccggcttcgggaggagcaccgtgtgtccatcctcatagatggcgagacttctgacatctatgttctccagctttccccacagggtcctcccccggcccctccaaatgggctctacctagcccggaaggctctcaaggggctgctaaaagaggcagagaaagagctgaagaaagctcagaggcagggggagctgatgggctgcctggctctggggggtggaggggagcaccctgagatgcaccgcgcaggcccaccccctctccgagcagccccacttctgcccccaggagctcgggggctcccccctcctcctccccccctgcccccacctcttcctcctcgccttcgggaggaggcagaagagcaggagagcacctgccccatctgtctgggggagatccagaatgccaagacattggagaagtgccggcattcattctgcgagggctgcatcacccgggctctgcaggtgaaaaaggcctgccccatgtgcggccgcttctatgggcagctggtgggcaaccagccccagaatgggcggatgctggtctctaaggacgccaccctcctactgcccagctatgagaagtacggcaccattgtcatccagtacgtcttcccgcccggtgtccagggggctgaacacccaaacccaggagttcggtatcctggcaccacacgggtggcctacctcccggactgccctgagggcaacaaggtgctgaccctgttccgcaaggcgtttgaccagcgtctcaccttcactatcggcacgtccatgaccacagggagaccgaatgtcatcacctggaacgacatccaccacaagaccagctgcacagggggaccccagctgtttgggtacccagaccccacctacctgacccgggtgcaagaggagctgagagcgaagggtatcacagatgactgaaggacatcgcctttgccaaggcccctgctgtctgcctctactaggacccagcagaagcctctttctcctctctgccccctgccccccacaccacacctgtaggggacctgtctgactgggaagggagttccgagagggagggggcaatcccttcccccatcccccactggccaagtgtttcaatgcagtgtgagccactcccttctggcagaggccgacctccaaggctctgttctcccctccccgtgtacatatactcccggtttccctgcccctccattgcccttggctttttctggtatgtgctgtgctccacgaccaagccgagaaaggacctagggtggggaagggagggtctcttgattcctaaccgcccccacatactgctccaccgctgaacttcgggtgccggggaggagaaattgggctgatgtgagctccccgtcacccgccatggagccggctgtgtgtgttcatcagatacagttctcccttaaccttgtcctttctctcctgtgtctcagtctccgtcagtctgtctttctccgctcttctctgacccctgtgaggaacctccttaccctgttctggaatcgctgccagactgtagcttttaatttaataaaaataaagtaaaatatgcaactc

SEQ ID NO: 126188 - DNA, 1331 bp, Homo sapiens
  Payload ID: 4746
  Gene Symbol: DTX3
  Gene Name: deltex 3, E3 ubiquitin ligase
  ENST ID: ENST00000549583
  CDS Start-End: 719-1331
ggaagggcaggggcttgcggatagaagggggtcaaaggaacggtgattatcacctgtgaggggaaagggggtgctgtcctccctccttcccttttcctcagcctgcaccccctgcaatcccccacctttcggggtctccccctccttgttgctaaggcccggaccgtcatcccagcaacagcctcagtcatgtgaccggcaatggcggcgctgacgagaggacttggacctaggacacctaggtcctgggtcccccgtgatggggagagaagtgttgcatcgcggatagactgtatgggctgagactctagggttccattttcacttatgaatctcgaggtgcatctggccttgggggacgatgatggaggcatgaagggacagctgctccttcttggatcagtcaataaatggaggtcacactaatggcccttctttctgtttgagctgcatttggaagtgttgtggagacagccccgtagcccaatgcgaccagactcagggaaaacatcaggcccctccagctgagcccttgtgtgagccccgcccctccctaaatgccagacttgggagctgacagacagcactgcctgtgctgggtttaaaagtcctggtcagctgagtggaaatagaaggatttctgctgccatcatcttccatgggctttccaggtcacacgacctacaagtagggagcagggaaagaagagtgagcctgcatgccaattctaagctcttcaggatcaaaaatggcagcctgtggaggcacctgcaagaacaaagtgactgtgtccaagcccgtgtgggacttcctgagcaaagagaccccagcccggctggcccggcttcgggaggagcaccgtgtgtccatcctcatagatggcgagacttctgacatctatgttctccagctttccccacagggtcctcccccggcccctccaaatgggctctacctagcccggaaggctctcaaggggctgctaaaagaggcagagaaagagctgaagaaagctcagaggcagggggagctgatgggctgcctggctctggggggtggaggggagcaccctgagatgcaccgcgcaggcccaccccctctccgagcagccccacttctgcccccaggagctcgggggctcccccctcctcctccccccctgcccccacctcttcctcctcgccttcgggaggaggcagaagagcaggagagcacctgccccatctgtctgggggagatccagaatgccaagacattggagaagtgccggcattcattctgcgagggctgcatcacccgggctctgcaggtgaaaaaggcctgccccatgt

SEQ ID NO: 126189 - DNA, 561 bp, Homo sapiens
  Payload ID: 4746
  Gene Symbol: DTX3
  Gene Name: deltex 3, E3 ubiquitin ligase
  ENST ID: ENST00000551835
  CDS Start-End: 416-561
atttttgttttggggaggaagggcaggggcttgcggatagaagggggtcaaaggaacggtgattatcacctgtgaggggaaagggggtgctgtcctccctccttcccttttcctcagcctgcaccccctgcaatcccccacctttcggggtctccccctccttgttgctaaggcccggaccgtcatcccagcaacagcctcagtcatgtgaccggcaatggcggcgctgacgagaggctttcttgggggcctcagagctggggaagaaaggaggaagtcctggtcagctgagtggaaatagaaggatttctgctgccatcatcttccatgggctttccaggtcacacgacctacaagtagggagcagggaaagaagagtgagcctgcatgccaattctaagctcttcaggatcaaatgtcgttcgtcctgtccagaatggcagcctgtggaggcacctgcaagaacaaagtgactgtgtccaagcccgtgtgggacttcctgagcaaagagaccccagcccggctggcccggcttcgggaggagcaccgtgtgtccatcct

SEQ ID NO: 126190 - DNA, 5642 bp, Homo sapiens
  Payload ID: 4747
  Gene Symbol: DTX4
  Gene Name: deltex 4, E3 ubiquitin ligase
  Uniprot ID: Q9Y2E6
  ENST ID: ENST00000227451
  CDS Start-End: 105-1964
ggcgcggtcgaggcccggaggcggcggcgcaggaggaagcggaggaggtcgggcgctcggggcccgggaggcgggccgcgcagcgccgcagccccgggctcgccatgctcctggcctcggccgtggtggtctgggaatggctgaacgagcacggccgctggcgtccctacagcccagcggtgagccaccacatcgaggcggtggtccgcgccggcccccgcgcggggggcagcgtggtgctgggccaggtggacagccgtctcgcgccctacatcatcgacctgcagtccatgaaccagttccgccaagacacgggaactctccgcccagttcgccgcaactactacgacccctcctcggcccctgggaagggcgtggtgtgggagtgggagaacgacaatggctcctggacgccctacgacatggaagtgggcatcaccatccagcatgcctatgagaagcagcacccctggatcgacctcacttccattggctttagctacgtaattgacttcaacaccatgggccagatcaaccgtcagacccagcgccaacgccgcgtccgccggcgcctcgacctcatctaccccatggtcacagggaccttgcctaaggctcagtcctggccagtcagccctgggccagccacctcgccccccatgtccccctgctcctgtccccagtgtgtcttggtgatgagtgttaaggcagccgtggtcaatggcagcactgggcccctacagctgccagtgacccgcaagaacatgccgcctcctggagtggtcaagctacccccactgccaggctctggggccaagccactggacagcacaggcaccattcgaggcccactgaagaccgccccatcgcaggtgatccggagacaagcctccagcatgcccactgggacaaccatgggctctcctgccagtcccccaggacccaacagcaagaccggaagggtggccctggccaccttgaatcgtaccaacctgcagcgactggccattgcccagtcccgggtgctgatcgcctctggggtccccacagtcccagtgaagaacctaaatgggtccagtcctgtcaaccctgccttggcaggaatcactgggatcctcatgagtgcagcggggctgcctgtgtgtctcaccaggccaccaaagctggtcctacacccaccccccgtcagcaagagtgaaataaaatccatcccaggggtttccaacacaagccgcaagaccaccaaaaaacaagccaagaaaggtaaaaccccagaggaagtgctaaaaaaatatctacagaaagtccggcacccaccagatgaggactgcaccatctgtatggaacgcctcacggccccctcaggctacaagggcccgcagcctacggtaaaacctgacctggtagggaagctgtccagatgcggccacgtctaccacatctactgcttggttgccatgtacaacaatgggaacaaggatggaagtttgcagtgtccaacctgcaagaccatttatggggtgaagacaggcacccaacctccagggaagatggagtaccacctcatcccccactccttgcctggccacccagactgcaaaaccatccggatcatctacagcatcccccccggcattcagggaccggaacacccgaatcctgggaagagtttcagcgcccgaggcttcccacgacactgttaccttccggacagcgagaaagggagaaaagttctgaagctgctgctcgtggcctgggatcgccgcctcatttttgccattggcacctccagcaccacaggcgagtcagacaccgtcatctggaatgaggtccaccacaagacagagtttggctctaatctcactggccatggctacccagatgccaattacctggataatgtgctggctgaactggctgcccagggcatctctgaggacagcactgcccaggagaaggactgaggccagaaaagctttgaggtgggaggggccatggagactgcaggacaggaagtgaggagagtgagtcaatgtagaagaagttggtgtcctgccctcccaactttctatcctcccctcctgccctgtgtccatccctcatccctcccaaccacagtgggagccagactgaatatagcgacatcattcataaatctcatccaacacaaagggagatgggatgagggccatcctgggtctgttcccatggagtttttggtgctgggtaggcaggaatcccctccctaccccacctcccaagtaggggcatggtcagcacacctagggtatgggcagtgcttaggcactccatatcctggctttgggaagccggggtttcttgcctcagccggcttcttgctacttccactctgctttgagactggagtttctgctattctccctctgctggaggcagggagctctcactgtgcaaggttggggggtgggcaaaggggtgaatcactaaactgctgtgacatcagaaactgatgccttggtgtagagcaaggaagcacttcttcccaagagggtcggagaaggaaaagcctctgggagcacattctgctgtcatcacagtccttggcttctctgggccctcctctcctcctcacagctctcacctgtccaaagaggcatctggttctctcatgtggatggatggactctggggttcctctttggagtggcatcccatgatgctgtttctagaccctctctgatcaaaccagagcctgcatcccactgagcatctgaactgtcctcagggagaggagcccacagccttcttcccaactcattctagaccagctcaaagattccatgagtttcatcgagtcactgtgagtggagcccatgctgggctctgtgccctctgtgtctgtgcatgcgcgtgtgtgtgtgggcgtgtgtgcattgctgggccagcttgaagggaaggcccgtcatgtccctgcactctgttttgcaagatgccaaaccccagttctgatggggctccaacagccaggctgtggtcctttgacgttcctcacctgttgccaacctatcccgtagtgaactgaaaccccaatgaagacagaactgtgcctggggagatgcaatgaggtgagggctgaactcatccttttatatttcttttcaagattggatcagagctcatctccatccagtcttgtttctatgaaggcttcaatctgtttccatgcaaatttgctaatcagagcccagagctgctgggtccctcatctccctcatctattatagattgacttacagcagggagagaatctctttagctcattcctaatggagttgggatcacaatatggtctggtccaatctgcatcttgttgtgtcccaagaccctatctcctccccaacattcttattgcctttggctcccagtaaggaacgaattgggggccagggaggagaacaggggggatcaagaagggaaacccaattccccctttgaaagtgggttctttgaactatgtgtttgggggaagttcctctggatactaatttgaatttatatacctcatgttttgggggtttgacgtatatatatatatatatatatgcatatatatttcataatatttggaaggtttttgatgctagaaaaatggaaacaagagaaccttcaaaaatggtacttagatgggaactggaggccaatctttcataaagccagccccatagctgcttgctgttaggcctccagccattttgacattggggtggatagtcgattcacctgcctgtcagtcgattcacctgcctgtcacccagttctgtggatgtgctggtgctgagcctttgctctctttccaaatggttacagggatgttgatcagctccaccagagggagctctgatgggaggaattgctctgccatccttgtccctgtgtctcctgtcggcaggcagccattgtatctcaccagcagaccaggagactggtcccaaggttactgcaccacagggcaatttcctgccatagttaggaaggaaacacctgaactaaatggaagagacatccctgcggtgtttaatatcacacccatgccctttgtcaggttaccatgtacagagattacttggagagcctcatgccgtctctaccttcgcacactggtcaagtatctgctgagcttcttggccgcaaggatgcagaaataggctgagggtccatgggaagaaagacacaatgaggcagtaggaggtggggaagaaaagaagacagactttcaaaatggaattaggcactggggagagatcagtttccccacatcagggagaagaaggtataggtggggaagggggtggccaggagcagaaggaagaagactcaagatggaaagggagccgctgtgcctgtggcaataccacttggagaggtcgacttcataccttcaagccttttcccctgggcttttgattgtgtctgtgccccctttcttgtcctctctgcagatgcccagtaggggctacctcatcctcgtgctgttcttgtgtggctttctgggcagtagggatcttgaatttcctttctaacactgtgcccggcaaggcggggagcattcctctgccctttgtcttgtgccaacctggaaaggtgcagtctagatttcagtgagaaccctgccagctgagccctgtgcatctactaccttgacacagagtgttttcccactagaagctctgctctgctctcctggcccaagtaggggattccatgccttccctttcatggtcttagcaccagcagcctagtttctcccttccagagtctccagggatgacaaattggattggagacaaacctcgtcagatgctcatcccctaaaaggttaattgtgtatttgtggctgcgtgtgcctttgtgttttcattctcttcccatttttgtacattttggtcttctctgtggttttatacttggtcaaaagtactcgtcttggtattgcactgttgtgtgcatgagaaaactgggggaaggctcactggtacaagaaaggacccctgacccctttccttctctgtggtccccggcattagattgggggttctgggagaggcaggtgaatgtcctaagtgaattgttctgtttgtaactggaatgtttttgaagtctttggtgttgctccgtgaaaggacatcgccacctggtgctcatgaggtgtctttgcagaacaataaatggcaaatgaacaaccacaaaattgttactcttgttggccttctgctgtttgtagattagtgcacctatctgtgagggatttgggttacctccctgagtctgtaagcaaccacaagccctgccactgggtgggggaagtccctccccaaccacttaaaaacaaattttccacatattacccacccacacatttgacctggctagactttgtttgcctaaaggaacagaccacattgctgggaaaatgagtaagtgaacgtgtgggagaaaaacacttttagaatcacgaatattcacttttaaaggtctctttgcctggctgcaatatagtgtgtgtttaaattatttacaggctgttgtttctcaaataaatgtttaatattaatcattcccaaactgacaagaacacaaaaataaaatgcaaatacagagcc

SEQ ID NO: 126191 - DNA, 1708 bp, Homo sapiens
  Payload ID: 4747
  Gene Symbol: DTX4
  Gene Name: deltex 4, E3 ubiquitin ligase
  Uniprot ID: Q9Y2E6
  ENST ID: ENST00000532982
  CDS Start-End: 167-1708
tgcgtcttcctgactctagtacgttgaatctggccagaaaaaccacatttgctctctacgaactctccgcccagttcgccgcaactactacgacccctcctcggcccctgggaagggcgtggtgtgggagtgggagaacgacaatggctcctggacgccctacgacatggaagtgggcatcaccatccagcatgcctatgagaagcagcacccctggatcgacctcacttccattggctttagctacgtaattgacttcaacaccatgggccagatcaaccgtcagacccagcgccaacgccgcgtccgccggcgcctcgacctcatctaccccatggtcacagggaccttgcctaaggctcagtcctggccagtcagccctgggccagccacctcgccccccatgtccccctgctcctgtccccagtgtgtcttggtgatgagtgttaaggcagccgtggtcaatggcagcactgggcccctacagctgccagtgacccgcaagaacatgccgcctcctggagtggtcaagctacccccactgccaggctctggggccaagccactggacagcacaggcaccattcgaggcccactgaagaccgccccatcgcaggtgatccggagacaagcctccagcatgcccactgggacaaccatgggctctcctgccagtcccccaggacccaacagcaagaccggaagggtggccctggccaccttgaatcgtaccaacctgcagcgactggccattgcccagtcccgggtgctgatcgcctctggggtccccacagtcccagtgaagaacctaaatgggtccagtcctgtcaaccctgccttggcaggaatcactgggatcctcatgagtgcagcggggctgcctgtgtgtctcaccaggccaccaaagctggtcctacacccaccccccgtcagcaagagtgaaataaaatccatcccaggggtttccaacacaagccgcaagaccaccaaaaaacaagccaagaaaggtaaaaccccagaggaagtgctaaaaaaatatctacagaaagtccggcacccaccagatgaggactgcaccatctgtatggaacgcctcacggccccctcaggctacaagggcccgcagcctacggtaaaacctgacctggtagggaagctgtccagatgcggccacgtctaccacatctactgcttggttgccatgtacaacaatgggaacaaggatggaagtttgcagtgtccaacctgcaagaccatttatggggtgaagacaggcacccaacctccagggaagatggagtaccacctcatcccccactccttgcctggccacccagactgcaaaaccatccggatcatctacagcatcccccccggcattcagggaccggaacacccgaatcctgggaagagtttcagcgcccgaggcttcccacgacactgttaccttccggacagcgagaaagggagaaaagttctgaagctgctgctcgtggcctgggatcgccgcctcatttttgccattggcacctccagcaccacaggcgagtcagacaccgtcatctggaatgaggtccaccacaagacagagtttggctctaatctcactggccatggctacccagatgccaattacctggataatgtgctggctgaactggctgcccagggcatctctgaggacagcactgcccaggagaaggactga

SEQ ID NO: 126192 - DNA, 2554 bp, Homo sapiens
  Payload ID: 4748
  Gene Symbol: DMTN
  Gene Name: dematin actin binding protein
  Uniprot ID: Q08495
  ENST ID: ENST00000265800
  CDS Start-End: 273-1490
gttgcctggttgtgagagtcaggggagcagggacaggtccaagacaaggaaggcagttgggctgtgggaatggggagcccagggaaggcctccagagctggcctggagagtcaccgccgagggatgaggacgcgccagcccgggggaacgcgccagctgctttcgcggccccaagcgcgcagcgcccagcagccgcgccgagcctgacacgctgtcctctcccctcgcgcacagggctctgcgagtgacccggcgggcgagctccgtgctgcatggaacggctgcagaagcaaccacttacctcccccgggagcgtgagcccctcccgagattccagtgtgcctggctctccctccagcatcgtggccaagatggacaatcaggtgctgggctacaaggacctggctgccatccccaaggacaaggccatcctggacatcgagcggcccgacctcatgatctacgagcctcacttcacttattccctcctggaacacgtggagctgcctcgcagccgcgagcgctcgctgtcacccaaatccacatcccccccaccatccccagaggtgtgggcggacagccggtcgcctggaatcatctctcaggcctcggcccccagaaccactggaaccccccggaccagcctgccccatttccaccaccctgagacctcccgcccagattccaacatctacaagaagcctcccatctataagcagagagagtccgtgggaggcagccctcagaccaagcacctcatcgaggatctcatcatcgagtcatccaagtttcctgcagcccagcccccagaccccaaccagccagccaaaatcgaaaccgactactggccatgccccccgtctctggctgttgtggagacagaatggaggaagcggaaggcgtctcggaggggagcagaggaagaggaggaggaggaagatgacgactctggagaggagatgaaggctctcagggagcgtcagagagaggaactcagtaaggttacttccaacttgggaaagatgatcttgaaagaagagatggaaaagtcattgccgatccgaaggaaaacccgctctctgcctgaccggacacccttccatacctccttgcaccagggaacgtctaaatcttcctctctccccgcctatggcaggaccaccctgagccggctacagtccacagagttcagcccatcagggagtgagactggaagcccaggcctgcagaacggagagggccagagggggaggatggaccgggggaactccctgccctgtgtgctggagcagaagatctatccctatgaaatgctagtggtgaccaacaaggggcgaaccaagctgccaccgggggtggatcggatgcggcttgagaggcatctgtctgccgaggacttctcaagggtatttgccatgtcccctgaagagtttggcaagctggctctgtggaagcggaatgagctcaagaagaaggcctctctcttctgatggcccccacctgctccgggacggcccccttacccctgctgcttcagggtttttccccggcgggttgggaggggcaggaggtggggtggaaatagggtgggctcctttcctcaggtagagtggggggccaaaacctctgcagtccccggcagtgagctatggactttcttccccctcacaaggctgggggcctcctgctctcgtccctggccctccctgcacagggcaaagccagtctgggctctggcacacagagttcatgtttgcgccctctccctgcccctcaccccagagggtgaggaggaatgaggggcattggtggttaggccggttggctgtcttgaacagctggagggaagatgcaggggtgggaagcggccaggcagaaagagctccaggctcttgtgtcgcccacccagccctcccatactcactcctgacagctttcctgcactgcagcctcctgctcctctgactctagtgggaacaggccccagctcagcctccggcagggaggtcacccctccacttcagcttgccctgacctccgctcgcaaaccccgagcttccaagccttttgctccagccctgcggcttccccagaagcctgggcttagggtggagatgccgcctacacacgatcctggccctccacctgcctccaggccacgaaatgggaattccagcactaagccaggcaccgggcagaagctgggccttccgcctcccttggatggggtcaagaggccaggcctggcacattttggagtgtcctggctaccagctctcacctacacccacgcacccccccacacactatgctctctcaagaatgtaatttattggggcccccccagctgctttcctcacctgcccctgccctaccttacacccccagcttgacttctttccagtccacgtgtgtatataatgatatctatatttttgcccaggtctgggtattgctcctgcccagaccctgacatccctttccactgtgtgtgtgaccatgctgggggagggggactctgcttggaattaaaaggttgcattgggtccctaca

SEQ ID NO: 126193 - DNA, 2772 bp, Homo sapiens
  Payload ID: 4748
  Gene Symbol: DMTN
  Gene Name: dematin actin binding protein
  Uniprot ID: Q08495
  ENST ID: ENST00000358242
  CDS Start-End: 494-1711
gagaaaagatgaagaaagccaagaaaagggaccagaagagaaagcagaaagacaggaggaagaaagggagagagggccaggcagtcgcactgtgaacagaacaggagaaggcgaagcggggcaaagttccctgcccaccgacgccagcctgcttggatgacttgcctcgtttcataattcacttactgtctgcaccagccggcctccagcctggctggaccctgctgcctgtgtggcccggagccagaggcccccacactcccagctgctcttctacagatgccatcaacgagcaggactctgggtggctccactgtctaagcctggagagtcaccgccgagggatgaggacgcgccagcccgggggaacgcgccagctgctttcgcggccccaagcgcgcagcgcccagcagccgcgccgagcctgacacgctgtcctctcccctcgcgcacagggctctgcgagtgacccggcgggcgagctccgtgctgcatggaacggctgcagaagcaaccacttacctcccccgggagcgtgagcccctcccgagattccagtgtgcctggctctccctccagcatcgtggccaagatggacaatcaggtgctgggctacaaggacctggctgccatccccaaggacaaggccatcctggacatcgagcggcccgacctcatgatctacgagcctcacttcacttattccctcctggaacacgtggagctgcctcgcagccgcgagcgctcgctgtcacccaaatccacatcccccccaccatccccagaggtgtgggcggacagccggtcgcctggaatcatctctcaggcctcggcccccagaaccactggaaccccccggaccagcctgccccatttccaccaccctgagacctcccgcccagattccaacatctacaagaagcctcccatctataagcagagagagtccgtgggaggcagccctcagaccaagcacctcatcgaggatctcatcatcgagtcatccaagtttcctgcagcccagcccccagaccccaaccagccagccaaaatcgaaaccgactactggccatgccccccgtctctggctgttgtggagacagaatggaggaagcggaaggcgtctcggaggggagcagaggaagaggaggaggaggaagatgacgactctggagaggagatgaaggctctcagggagcgtcagagagaggaactcagtaaggttacttccaacttgggaaagatgatcttgaaagaagagatggaaaagtcattgccgatccgaaggaaaacccgctctctgcctgaccggacacccttccatacctccttgcaccagggaacgtctaaatcttcctctctccccgcctatggcaggaccaccctgagccggctacagtccacagagttcagcccatcagggagtgagactggaagcccaggtctccagaacggagagggccagagggggaggatggaccgggggaactccctgccctgtgtgctggagcagaagatctatccctatgaaatgctagtggtgaccaacaaggggcgaaccaagctgccaccgggggtggatcggatgcggcttgagaggcatctgtctgccgaggacttctcaagggtatttgccatgtcccctgaagagtttggcaagctggctctgtggaagcggaatgagctcaagaagaaggcctctctcttctgatggcccccacctgctccgggacggcccccttacccctgctgcttcagggtttttccccggcgggttgggaggggcaggaggtggggtggaaatagggtgggctcctttcctcaggtagagtggggggccaaaacctctgcagtccccggcagtgagctatggactttcttccccctcacaaggctgggggcctcctgctctcgtccctggccctccctgcacagggcaaagccagtctgggctctggcacacagagttcatgtttgcgccctctccctgcccctcaccccagagggtgaggaggaatgaggggcattggtggttaggccggttggctgtcttgaacagctggagggaagatgcaggggtgggaagcggccaggcagaaagagctccaggctcttgtgtcgcccacccagccctcccatactcactcctgacagctttcctgcactgcagcctcctgctcctctgactctagtgggaacaggccccagctcagcctccggcagggaggtcacccctccacttcagcttgccctgacctccgctcgcaaaccccgagcttccaagccttttgctccagccctgcggcttccccagaagcctgggcttagggtggagatgccgcctacacacgatcctggccctccacctgcctccaggccacgaaatgggaattccagcactaagccaggcaccgggcagaagctgggccttccgcctcccttggatggggtcaagaggccaggcctggcacattttggagtgtcctggctaccagctctcacctacacccacgcacccccccacacactatgctctctcaagaatgtaatttattggggcccccccagctgctttcctcacctgcccctgccctaccttacacccccagcttgacttctttccagtccacgtgtgtatataatgatatctatatttttgcccaggtctgggtattgctcctgcccagaccctgacatccctttccactgtgtgtgtgaccatgctgggggagggggactctgcttggaattaaaaggttgcattgggtccct

SEQ ID NO: 126194 - DNA, 2601 bp, Homo sapiens
  Payload ID: 4748
  Gene Symbol: DMTN
  Gene Name: dematin actin binding protein
  Uniprot ID: Q08495
  ENST ID: ENST00000381470
  CDS Start-End: 389-1540
agagaagcctatcgacagggcctgggggagggaggaggcagcagggccggagtccacccaggacatctggcaccagtgaccttgtggggaaaggagccaagaacggggcgtcggggggcctgggacccccctgcctgagagatacaggaatcctggccccgtgttgtggacacaagcgcccatcctcaaggtcctgagaactcctgaacttccaaagcctggagagtcaccgccgagggatgaggacgcgccagcccgggggaacgcgccagctgctttcgcggccccaagcgcgcagcgcccagcagccgcgccgagcctgacacgctgtcctctcccctcgcgcacagggctctgcgagtgacccggcgggcgagctccgtgctgcatggaacggctgcagaagcaaccacttacctcccccgggagcgtgagcccctcccgagattccagtgtgcctggctctccctccagcatcgtggccaagatggacaatcaggtgctgggctacaaggacctggctgccatccccaaggacaaggccatcctggacatcgagcggcccgacctcatgatctacgagcctcacttcacttattccctcctggaacacgtggagctgcctcgcagccgcgagcgctcgctgtcacccaaatccacatcccccccaccatccccagaggtgtgggcggacagccggtcgcctggaatcatctctcaggcctcggcccccagaaccactggaaccccccggaccagcctgccccatttccaccaccctgagacctcccgcccagattccaacatctacaagaagcctcccatctataagcagagagagtccgtgggaggcagccctcagaccaagcacctcatcgaggatctcatcatcgagtcatccaagtttcctgcagcccagcccccagaccccaaccagccagccaaaatcgaaaccgactactggccatgccccccgtctctggctgttgtggagacagaatggaggaagcggaaggcgtctcggaggggagcagaggaagaggaggaggaggaagatgacgactctggagaggagatgaaggctctcagggagcgtcagagagaggaactcagtaaggttacttccaacttgggaaagatgatcttgaaagaagagatggaaaagtcattgccgatccgaaggaaaacccgctctctgcctgaccggacacccttccatacctccttgcaccagggaacgtctaaatcttcctctctccccgcctatggcaggaccaccctgagccggctacagtccacagagttcagcccatcagggagtgagactggaagcccaggcctgcagatctatccctatgaaatgctagtggtgaccaacaaggggcgaaccaagctgccaccgggggtggatcggatgcggcttgagaggcatctgtctgccgaggacttctcaagggtatttgccatgtcccctgaagagtttggcaagctggctctgtggaagcggaatgagctcaagaagaaggcctctctcttctgatggcccccacctgctccgggacggcccccttacccctgctgcttcagggtttttccccggcgggttgggaggggcaggaggtggggtggaaatagggtgggctcctttcctcaggtagagtggggggccaaaacctctgcagtccccggcagtgagctatggactttcttccccctcacaaggctgggggcctcctgctctcgtccctggccctccctgcacagggcaaagccagtctgggctctggcacacagagttcatgtttgcgccctctccctgcccctcaccccagagggtgaggaggaatgaggggcattggtggttaggccggttggctgtcttgaacagctggagggaagatgcaggggtgggaagcggccaggcagaaagagctccaggctcttgtgtcgcccacccagccctcccatactcactcctgacagctttcctgcactgcagcctcctgctcctctgactctagtgggaacaggccccagctcagcctccggcagggaggtcacccctccacttcagcttgccctgacctccgctcgcaaaccccgagcttccaagccttttgctccagccctgcggcttccccagaagcctgggcttagggtggagatgccgcctacacacgatcctggccctccacctgcctccaggccacgaaatgggaattccagcactaagccaggcaccgggcagaagctgggccttccgcctcccttggatggggtcaagaggccaggcctggcacattttggagtgtcctggctaccagctctcacctacacccacgcacccccccacacactatgctctctcaagaatgtaatttattggggcccccccagctgctttcctcacctgcccctgccctaccttacacccccagcttgacttctttccagtccacgtgtgtatataatgatatctatatttttgcccaggtctgggtattgctcctgcccagaccctgacatccctttccactgtgtgtgtgaccatgctgggggagggggactctgcttggaattaaaaggttgcattgggtccct

SEQ ID NO: 126195 - DNA, 2415 bp, Homo sapiens
  Payload ID: 4748
  Gene Symbol: DMTN
  Gene Name: dematin actin binding protein
  Uniprot ID: Q08495
  ENST ID: ENST00000443491
  CDS Start-End: 278-1354
aggttgtcttggcaacaggaggtggagaggagatgcgccgagggatggaggtgtatgtcaccgaggaggctgctgcgctcctgccccacgccctgggcccttgaagcctggagagtcaccgccgagggatgaggacgcgccagcccgggggaacgcgccagctgctttcgcggccccaagcgcgcagcgcccagcagccgcgccgagcctgacacgctgtcctctcccctcgcgcacagggctctgcgagtgacccggcgggcgagctccgtgctgcatggaacggctgcagaaggccaagatggacaatcaggtgctgggctacaaggacctggctgccatccccaaggacaaggccatcctggacatcgagcggcccgacctcatgatctacgagcctcacttcacttattccctcctggaacacgtggagctgcctcgcagccgcgagcgctcgctgtcacccaaatccacatcccccccaccatccccagaggtgtgggcggacagccggtcgcctggaatcatctctcaggcctcggcccccagaaccactggaaccccccggaccagcctgccccatttccaccaccctgagacctcccgcccagattccaacatctacaagaagcctcccatctataagcagagagagtccgtgggaggcagccctcagaccaagcacctcatcgaggatctcatcatcgagtcatccaagtttcctgcagcccagcccccagaccccaaccagccagccaaaatcgaaaccgactactggccatgccccccgtctctggctgttgtggagacagaatggaggaagcggaaggcgtctcggaggggagcagaggaagaggaggaggaggaagatgacgactctggagaggagatgaaggctctcagggagcgtcagagagaggaactcagtaaggttacttccaacttgggaaagatgatcttgaaagaagagatggaaaagtcattgccgatccgaaggaaaacccgctctctgcctgaccggacacccttccatacctccttgcaccagggaacgtctaaatcttcctctctccccgcctatggcaggaccaccctgagccggctacagtccacagagttcagcccatcagggagtgagactggaagcccaggcctgcagatctatccctatgaaatgctagtggtgaccaacaaggggcgaaccaagctgccaccgggggtggatcggatgcggcttgagaggcatctgtctgccgaggacttctcaagggtatttgccatgtcccctgaagagtttggcaagctggctctgtggaagcggaatgagctcaagaagaaggcctctctcttctgatggcccccacctgctccgggacggcccccttacccctgctgcttcagggtttttccccggcgggttgggaggggcaggaggtggggtggaaatagggtgggctcctttcctcaggtagagtggggggccaaaacctctgcagtccccggcagtgagctatggactttcttccccctcacaaggctgggggcctcctgctctcgtccctggccctccctgcacagggcaaagccagtctgggctctggcacacagagttcatgtttgcgccctctccctgcccctcaccccagagggtgaggaggaatgaggggcattggtggttaggccggttggctgtcttgaacagctggagggaagatgcaggggtgggaagcggccaggcagaaagagctccaggctcttgtgtcgcccacccagccctcccatactcactcctgacagctttcctgcactgcagcctcctgctcctctgactctagtgggaacaggccccagctcagcctccggcagggaggtcacccctccacttcagcttgccctgacctccgctcgcaaaccccgagcttccaagccttttgctccagccctgcggcttccccagaagcctgggcttagggtggagatgccgcctacacacgatcctggccctccacctgcctccaggccacgaaatgggaattccagcactaagccaggcaccgggcagaagctgggccttccgcctcccttggatggggtcaagaggccaggcctggcacattttggagtgtcctggctaccagctctcacctacacccacgcacccccccacacactatgctctctcaagaatgtaatttattggggcccccccagctgctttcctcacctgcccctgccctaccttacacccccagcttgacttctttccagtccacgtgtgtatataatgatatctatatttttgcccaggtctgggtattgctcctgcccagaccctgacatccctttccactgtgtgtgtgaccatgctgggggagggggactctgcttggaattaaaaggttgcattgggtccct

SEQ ID NO: 126196 - DNA, 2394 bp, Homo sapiens
  Payload ID: 4748
  Gene Symbol: DMTN
  Gene Name: dematin actin binding protein
  Uniprot ID: Q08495
  ENST ID: ENST00000415253
  CDS Start-End: 188-1339
ataattcacttactgtctgcaccagccggcctccagcctggctggaccctgctgcctgtgtggcccggagccagaggcccccacactcccagctgctcttctacagatgccatcaacgagcaggactctgggtggctccactgtctaagggctctgcgagtgacccggcgggcgagctccgtgctgcatggaacggctgcagaagcaaccacttacctcccccgggagcgtgagcccctcccgagattccagtgtgcctggctctccctccagcatcgtggccaagatggacaatcaggtgctgggctacaaggacctggctgccatccccaaggacaaggccatcctggacatcgagcggcccgacctcatgatctacgagcctcacttcacttattccctcctggaacacgtggagctgcctcgcagccgcgagcgctcgctgtcacccaaatccacatcccccccaccatccccagaggtgtgggcggacagccggtcgcctggaatcatctctcaggcctcggcccccagaaccactggaaccccccggaccagcctgccccatttccaccaccctgagacctcccgcccagattccaacatctacaagaagcctcccatctataagcagagagagtccgtgggaggcagccctcagaccaagcacctcatcgaggatctcatcatcgagtcatccaagtttcctgcagcccagcccccagaccccaaccagccagccaaaatcgaaaccgactactggccatgccccccgtctctggctgttgtggagacagaatggaggaagcggaaggcgtctcggaggggagcagaggaagaggaggaggaggaagatgacgactctggagaggagatgaaggctctcagggagcgtcagagagaggaactcagtaaggttacttccaacttgggaaagatgatcttgaaagaagagatggaaaagtcattgccgatccgaaggaaaacccgctctctgcctgaccggacacccttccatacctccttgcaccagggaacgtctaaatcttcctctctccccgcctatggcaggaccaccctgagccggctacagtccacagagttcagcccatcagggagtgagactggaagcccaggcctgcagatctatccctatgaaatgctagtggtgaccaacaaggggcgaaccaagctgccaccgggggtggatcggatgcggcttgagaggcatctgtctgccgaggacttctcaagggtatttgccatgtcccctgaagagtttggcaagctggctctgtggaagcggaatgagctcaagaagaaggcctctctcttctgatggcccccacctgctccgggacggcccccttacccctgctgcttcagggtttttccccggcgggttgggaggggcaggaggtggggtggaaatagggtgggctcctttcctcaggtagagtggggggccaaaacctctgcagtccccggcagtgagctatggactttcttccccctcacaaggctgggggcctcctgctctcgtccctggccctccctgcacagggcaaagccagtctgggctctggcacacagagttcatgtttgcgccctctccctgcccctcaccccagagggtgaggaggaatgaggggcattggtggttaggccggttggctgtcttgaacagctggagggaagatgcaggggtgggaagcggccaggcagaaagagctccaggctcttgtgtcgcccacccagccctcccatactcactcctgacagctttcctgcactgcagcctcctgctcctctgactctagtgggaacaggccccagctcagcctccggcagggaggtcacccctccacttcagcttgccctgacctccgctcgcaaaccccgagcttccaagccttttgctccagccctgcggcttccccagaagcctgggcttagggtggagatgccgcctacacacgatcctggccctccacctgcctccaggccacgaaatgggaattccagcactaagccaggcaccgggcagaagctgggccttccgcctcccttggatggggtcaagaggccaggcctggcacattttggagtgtcctggctaccagctctcacctacacccacgcacccccccacacactatgctctctcaagaatgtaatttattggggcccccccagctgctttcctcacctgcccctgccctaccttacacccccagcttgacttctttccagtccacgtgtgtatataatgatatctatatttttgcccaggtctgggtattgctcctgcccagaccctgacatccctttccactgtgtgtgtgaccatgctgggggagggggactctgcttggaattaaaaggttgcattgg

SEQ ID NO: 126197 - DNA, 2508 bp, Homo sapiens
  Payload ID: 4748
  Gene Symbol: DMTN
  Gene Name: dematin actin binding protein
  Uniprot ID: Q08495
  ENST ID: ENST00000432128
  CDS Start-End: 230-1447
tctctgaggaagaggcagcgggaggcacagcttcctcctccccccctccctgctgccgcggctgagccgggcctgagctgccggcaggttgtcttggcaacaggaggtggagaggagatgcgccgagggatggaggtgtatgtcaccgaggaggctgctgcgctcctgccccacgccctgggcccttgaagggctctgcgagtgacccggcgggcgagctccgtgctgcatggaacggctgcagaagcaaccacttacctcccccgggagcgtgagcccctcccgagattccagtgtgcctggctctccctccagcatcgtggccaagatggacaatcaggtgctgggctacaaggacctggctgccatccccaaggacaaggccatcctggacatcgagcggcccgacctcatgatctacgagcctcacttcacttattccctcctggaacacgtggagctgcctcgcagccgcgagcgctcgctgtcacccaaatccacatcccccccaccatccccagaggtgtgggcggacagccggtcgcctggaatcatctctcaggcctcggcccccagaaccactggaaccccccggaccagcctgccccatttccaccaccctgagacctcccgcccagattccaacatctacaagaagcctcccatctataagcagagagagtccgtgggaggcagccctcagaccaagcacctcatcgaggatctcatcatcgagtcatccaagtttcctgcagcccagcccccagaccccaaccagccagccaaaatcgaaaccgactactggccatgccccccgtctctggctgttgtggagacagaatggaggaagcggaaggcgtctcggaggggagcagaggaagaggaggaggaggaagatgacgactctggagaggagatgaaggctctcagggagcgtcagagagaggaactcagtaaggttacttccaacttgggaaagatgatcttgaaagaagagatggaaaagtcattgccgatccgaaggaaaacccgctctctgcctgaccggacacccttccatacctccttgcaccagggaacgtctaaatcttcctctctccccgcctatggcaggaccaccctgagccggctacagtccacagagttcagcccatcagggagtgagactggaagcccaggtctccagaacggagagggccagagggggaggatggaccgggggaactccctgccctgtgtgctggagcagaagatctatccctatgaaatgctagtggtgaccaacaaggggcgaaccaagctgccaccgggggtggatcggatgcggcttgagaggcatctgtctgccgaggacttctcaagggtatttgccatgtcccctgaagagtttggcaagctggctctgtggaagcggaatgagctcaagaagaaggcctctctcttctgatggcccccacctgctccgggacggcccccttacccctgctgcttcagggtttttccccggcgggttgggaggggcaggaggtggggtggaaatagggtgggctcctttcctcaggtagagtggggggccaaaacctctgcagtccccggcagtgagctatggactttcttccccctcacaaggctgggggcctcctgctctcgtccctggccctccctgcacagggcaaagccagtctgggctctggcacacagagttcatgtttgcgccctctccctgcccctcaccccagagggtgaggaggaatgaggggcattggtggttaggccggttggctgtcttgaacagctggagggaagatgcaggggtgggaagcggccaggcagaaagagctccaggctcttgtgtcgcccacccagccctcccatactcactcctgacagctttcctgcactgcagcctcctgctcctctgactctagtgggaacaggccccagctcagcctccggcagggaggtcacccctccacttcagcttgccctgacctccgctcgcaaaccccgagcttccaagccttttgctccagccctgcggcttccccagaagcctgggcttagggtggagatgccgcctacacacgatcctggccctccacctgcctccaggccacgaaatgggaattccagcactaagccaggcaccgggcagaagctgggccttccgcctcccttggatggggtcaagaggccaggcctggcacattttggagtgtcctggctaccagctctcacctacacccacgcacccccccacacactatgctctctcaagaatgtaatttattggggcccccccagctgctttcctcacctgcccctgccctaccttacacccccagcttgacttctttccagtccacgtgtgtatataatgatatctatatttttgcccaggtctgggtattgctcctgcccagaccctgacatccctttccactgtgtgtgtgaccatgctgggggagggggactctgcttggaattaaaaggttgcattgggtccct

SEQ ID NO: 126198 - DNA, 2735 bp, Homo sapiens
  Payload ID: 4748
  Gene Symbol: DMTN
  Gene Name: dematin actin binding protein
  Uniprot ID: Q08495
  ENST ID: ENST00000523266
  CDS Start-End: 463-1680
ccagaagagaaagcagaaagacaggaggaagaaagggagagagggccaggcagtcgcactgtgaacagaacaggagaaggcgaagcggggcaaagttccctgcccaccgacgccagcctgcttggatgacttgcctcgtttcataattcacttactgtctgcaccagccggcctccagcctggctggaccctgctgcctgtgtggcccggagccagaggcccccacactcccagctgctcttctacagatgccatcaacgagcaggactctgggtggctccactgtctaagcctggagagtcaccgccgagggatgaggacgcgccagcccgggggaacgcgccagctgctttcgcggccccaagcgcgcagcgcccagcagccgcgccgagcctgacacgctgtcctctcccctcgcgcacagggctctgcgagtgacccggcgggcgagctccgtgctgcatggaacggctgcagaagcaaccacttacctcccccgggagcgtgagcccctcccgagattccagtgtgcctggctctccctccagcatcgtggccaagatggacaatcaggtgctgggctacaaggacctggctgccatccccaaggacaaggccatcctggacatcgagcggcccgacctcatgatctacgagcctcacttcacttattccctcctggaacacgtggagctgcctcgcagccgcgagcgctcgctgtcacccaaatccacatcccccccaccatccccagaggtgtgggcggacagccggtcgcctggaatcatctctcaggcctcggcccccagaaccactggaaccccccggaccagcctgccccatttccaccaccctgagacctcccgcccagattccaacatctacaagaagcctcccatctataagcagagagagtccgtgggaggcagccctcagaccaagcacctcatcgaggatctcatcatcgagtcatccaagtttcctgcagcccagcccccagaccccaaccagccagccaaaatcgaaaccgactactggccatgccccccgtctctggctgttgtggagacagaatggaggaagcggaaggcgtctcggaggggagcagaggaagaggaggaggaggaagatgacgactctggagaggagatgaaggctctcagggagcgtcagagagaggaactcagtaaggttacttccaacttgggaaagatgatcttgaaagaagagatggaaaagtcattgccgatccgaaggaaaacccgctctctgcctgaccggacacccttccatacctccttgcaccagggaacgtctaaatcttcctctctccccgcctatggcaggaccaccctgagccggctacagtccacagagttcagcccatcagggagtgagactggaagcccaggcctgcagaacggagagggccagagggggaggatggaccgggggaactccctgccctgtgtgctggagcagaagatctatccctatgaaatgctagtggtgaccaacaaggggcgaaccaagctgccaccgggggtggatcggatgcggcttgagaggcatctgtctgccgaggacttctcaagggtatttgccatgtcccctgaagagtttggcaagctggctctgtggaagcggaatgagctcaagaagaaggcctctctcttctgatggcccccacctgctccgggacggcccccttacccctgctgcttcagggtttttccccggcgggttgggaggggcaggaggtggggtggaaatagggtgggctcctttcctcaggtagagtggggggccaaaacctctgcagtccccggcagtgagctatggactttcttccccctcacaaggctgggggcctcctgctctcgtccctggccctccctgcacagggcaaagccagtctgggctctggcacacagagttcatgtttgcgccctctccctgcccctcaccccagagggtgaggaggaatgaggggcattggtggttaggccggttggctgtcttgaacagctggagggaagatgcaggggtgggaagcggccaggcagaaagagctccaggctcttgtgtcgcccacccagccctcccatactcactcctgacagctttcctgcactgcagcctcctgctcctctgactctagtgggaacaggccccagctcagcctccggcagggaggtcacccctccacttcagcttgccctgacctccgctcgcaaaccccgagcttccaagccttttgctccagccctgcggcttccccagaagcctgggcttagggtggagatgccgcctacacacgatcctggccctccacctgcctccaggccacgaaatgggaattccagcactaagccaggcaccgggcagaagctgggccttccgcctcccttggatggggtcaagaggccaggcctggcacattttggagtgtcctggctaccagctctcacctacacccacgcacccccccacacactatgctctctcaagaatgtaatttattggggcccccccagctgctttcctcacctgcccctgccctaccttacacccccagcttgacttctttccagtccacgtgtgtatataatgatatctatatttttgcccaggtctgggtattgctcctgcccagaccctgacatccctttccactgtgtgtgtgaccatgctgggggagggggactctgcttggaattaaaaggttgcattgg

SEQ ID NO: 126199 - DNA, 616 bp, Homo sapiens
  Payload ID: 4748
  Gene Symbol: DMTN
  Gene Name: dematin actin binding protein
  ENST ID: ENST00000522148
  CDS Start-End: 402-616
gcgggctcgggtttcctgggctcgcgcggcgcggcccgtgctacctgttggggaagaaaacccgagcccccggaggggccggggccggggccgggacgtgcatccagccgggccccgggccccaggccccaggcccgaggcgcaggcgagggccctgcggagcccggcggagcccgggcggcccgcggacgccaggagcctcctcgggcagcgagattgctttttttccgcctggagagtcaccgccgagggatgaggacgcgccagcccgggggaacgcgccagctgctttcgcggccccaagcgcgcagcgcccagcagccgcgccgagcctgacacgctgtcctctcccctcgcgcacagggctctgcgagtgacccggcgggcgagctccgtgctgcatggaacggctgcagaaggccaagatggacaatcaggtgctgggctacaaggacctggctgccatccccaaggacaaggccatcctggacatcgagcggcccgacctcatgatctacgagcctcacttcacttattccctcctggaacacgtggagctgcctcgcagccgcgagcgctcgctgtcacccaaatccacatcccccccaccatcccc

SEQ ID NO: 126200 - DNA, 813 bp, Homo sapiens
  Payload ID: 4748
  Gene Symbol: DMTN
  Gene Name: dematin actin binding protein
  ENST ID: ENST00000517804
  CDS Start-End: 210-813
ccctaagccggcatttttcctgttatttgtgctccggggaagcgccgcggggttcctggaagagacacctattacctaggctcctgggggaagtgacagcccgtggatctggcctacgcctctcgggcctctgtggcctcagagcgtctgggccacactgtctgggaagagggctctgcgagtgacccggcgggcgagctccgtgctgcatggaacggctgcagaagcaaccacttacctcccccgggagcgtgagcccctcccgagattccagtgtgcctggctctccctccagcatcgtggccaagatggacaatcaggtgctgggctacaaggacctggctgccatccccaaggacaaggccatcctggacatcgagcggcccgacctcatgatctacgagcctcacttcacttattccctcctggaacacgtggagctgcctcgcagccgcgagcgctcgctgtcacccaaatccacatcccccccaccatccccagaggtgtgggcggacagccggtcgcctggaatcatctctcaggcctcggcccccagaaccactggaaccccccggaccagcctgccccatttccaccaccctgagacctcccgcccagattccaacatctacaagaagcctcccatctataagcagagagagtccgtgggaggcagccctcagaccaagcacctcatcgaggatctcatcatcgagtcatccaagtttcctgcagcccagcccccagaccccaaccagccagccaaaatcgaaaccgactactggccatgccccccgtctctggctgttgtgg

SEQ ID NO: 126201 - DNA, 581 bp, Homo sapiens
  Payload ID: 4748
  Gene Symbol: DMTN
  Gene Name: dematin actin binding protein
  ENST ID: ENST00000523623
  CDS Start-End: 138-581
acagaaagccgagaggctgggctgaggccgggctggttgtggagcgatggctggagtggctcctcctccaaggctgtgcccctttctgccacattgaagggctctgcgagtgacccggcgggcgagctccgtgctgcatggaacggctgcagaaggccaagatggacaatcaggtgctgggctacaaggacctggctgccatccccaaggacaaggccatcctggacatcgagcggcccgacctcatgatctacgagcctcacttcacttattccctcctggaacacgtggagctgcctcgcagccgcgagcgctcgctgtcacccaaatccacatcccccccaccatccccagaggtgtgggcggacagccggtcgcctggaatcatctctcaggcctcggcccccagaaccactggaaccccccggaccagcctgccccatttccaccaccctgagacctcccgcccagattccaacatctacaagaagcctcccatctataagcagagagagtccgtgggaggcagccctcagaccaagcacctcatcgaggatctcatcatcgagtcatccaagttt

SEQ ID NO: 126202 - DNA, 601 bp, Homo sapiens
  Payload ID: 4748
  Gene Symbol: DMTN
  Gene Name: dematin actin binding protein
  ENST ID: ENST00000523300
  CDS Start-End: 115-601
ctgcggagcccggcggagcccgggcggcccgcggacgccaggagcctcctcgggcagcgagattgctttttttccgggctctgcgagtgacccggcgggcgagctccgtgctgcatggaacggctgcagaaggccaagatggacaatcaggtgctgggctacaaggacctggctgccatccccaaggacaaggccatcctggacatcgagcggcccgacctcatgatctacgagcctcacttcacttattccctcctggaacacgtggagctgcctcgcagccgcgagcgctcgctgtcacccaaatccacatcccccccaccatccccagaggtgtgggcggacagccggtcgcctggaatcatctctcaggcctcggcccccagaaccactggaaccccccggaccagcctgccccatttccaccaccctgagacctcccgcccagattccaacatctacaagaagcctcccatctataagcagagagagtccgtgggaggcagccctcagaccaagcacctcatcgaggatctcatcatcgagtcatccaagtttcctgcagcccagcccccagaccccaaccagccagccaaaatcg

SEQ ID NO: 126203 - DNA, 2235 bp, Homo sapiens
  Payload ID: 4748
  Gene Symbol: DMTN
  Gene Name: dematin actin binding protein
  Uniprot ID: Q08495
  ENST ID: ENST00000523782
  CDS Start-End: 104-1180
gggatggaggtgtatgtcaccgaggaggctgctgcgctcctgccccacgccctgggcccttgaagggctctgcgagtgacccggcgggcgagctccgtgctgcatggaacggctgcagaaggccaagatggacaatcaggtgctgggctacaaggacctggctgccatccccaaggacaaggccatcctggacatcgagcggcccgacctcatgatctacgagcctcacttcacttattccctcctggaacacgtggagctgcctcgcagccgcgagcgctcgctgtcacccaaatccacatcccccccaccatccccagaggtgtgggcggacagccggtcgcctggaatcatctctcaggcctcggcccccagaaccactggaaccccccggaccagcctgccccatttccaccaccctgagacctcccgcccagattccaacatctacaagaagcctcccatctataagcagagagagtccgtgggaggcagccctcagaccaagcacctcatcgaggatctcatcatcgagtcatccaagtttcctgcagcccagcccccagaccccaaccagccagccaaaatcgaaaccgactactggccatgccccccgtctctggctgttgtggagacagaatggaggaagcggaaggcgtctcggaggggagcagaggaagaggaggaggaggaagatgacgactctggagaggagatgaaggctctcagggagcgtcagagagaggaactcagtaaggttacttccaacttgggaaagatgatcttgaaagaagagatggaaaagtcattgccgatccgaaggaaaacccgctctctgcctgaccggacacccttccatacctccttgcaccagggaacgtctaaatcttcctctctccccgcctatggcaggaccaccctgagccggctacagtccacagagttcagcccatcagggagtgagactggaagcccaggcctgcagatctatccctatgaaatgctagtggtgaccaacaaggggcgaaccaagctgccaccgggggtggatcggatgcggcttgagaggcatctgtctgccgaggacttctcaagggtatttgccatgtcccctgaagagtttggcaagctggctctgtggaagcggaatgagctcaagaagaaggcctctctcttctgatggcccccacctgctccgggacggcccccttacccctgctgcttcagggtttttccccggcgggttgggaggggcaggaggtggggtggaaatagggtgggctcctttcctcaggtagagtggggggccaaaacctctgcagtccccggcagtgagctatggactttcttccccctcacaaggctgggggcctcctgctctcgtccctggccctccctgcacagggcaaagccagtctgggctctggcacacagagttcatgtttgcgccctctccctgcccctcaccccagagggtgaggaggaatgaggggcattggtggttaggccggttggctgtcttgaacagctggagggaagatgcaggggtgggaagcggccaggcagaaagagctccaggctcttgtgtcgcccacccagccctcccatactcactcctgacagctttcctgcactgcagcctcctgctcctctgactctagtgggaacaggccccagctcagcctccggcagggaggtcacccctccacttcagcttgccctgacctccgctcgcaaaccccgagcttccaagccttttgctccagccctgcggcttccccagaagcctgggcttagggtggagatgccgcctacacacgatcctggccctccacctgcctccaggccacgaaatgggaattccagcactaagccaggcaccgggcagaagctgggccttccgcctcccttggatggggtcaagaggccaggcctggcacattttggagtgtcctggctaccagctctcacctacacccacgcacccccccacacactatgctctctcaagaatgtaatttattggggcccccccagctgctttcctcacctgcccctgccctaccttacacccccagcttgacttctttccagtccacgtgtgtatataatgatatctatatttttgcccaggtctgggtattgctcctgcccagaccctgacatccctttccactgtgtgtgtgaccatgctgggggagggggactctgcttggaattaaaaggttgcattgg

SEQ ID NO: 126204 - DNA, 2658 bp, Homo sapiens
  Payload ID: 4748
  Gene Symbol: DMTN
  Gene Name: dematin actin binding protein
  Uniprot ID: Q08495
  ENST ID: ENST00000519907
  CDS Start-End: 446-1597
aagacaggaggaagaaagggagagagggccaggcagtcgcactgtgaacagaacaggagaaggcgaagcggggcaaagttccctgcccaccgacgccagcctgcttggatgacttgcctcgtttcataattcacttactgtctgcaccagccggcctccagcctggctggaccctgctgcctgtgtggcccggagccagaggcccccacactcccagctgctcttctacagatgccatcaacgagcaggactctgggtggctccactgtctaagcctggagagtcaccgccgagggatgaggacgcgccagcccgggggaacgcgccagctgctttcgcggccccaagcgcgcagcgcccagcagccgcgccgagcctgacacgctgtcctctcccctcgcgcacagggctctgcgagtgacccggcgggcgagctccgtgctgcatggaacggctgcagaagcaaccacttacctcccccgggagcgtgagcccctcccgagattccagtgtgcctggctctccctccagcatcgtggccaagatggacaatcaggtgctgggctacaaggacctggctgccatccccaaggacaaggccatcctggacatcgagcggcccgacctcatgatctacgagcctcacttcacttattccctcctggaacacgtggagctgcctcgcagccgcgagcgctcgctgtcacccaaatccacatcccccccaccatccccagaggtgtgggcggacagccggtcgcctggaatcatctctcaggcctcggcccccagaaccactggaaccccccggaccagcctgccccatttccaccaccctgagacctcccgcccagattccaacatctacaagaagcctcccatctataagcagagagagtccgtgggaggcagccctcagaccaagcacctcatcgaggatctcatcatcgagtcatccaagtttcctgcagcccagcccccagaccccaaccagccagccaaaatcgaaaccgactactggccatgccccccgtctctggctgttgtggagacagaatggaggaagcggaaggcgtctcggaggggagcagaggaagaggaggaggaggaagatgacgactctggagaggagatgaaggctctcagggagcgtcagagagaggaactcagtaaggttacttccaacttgggaaagatgatcttgaaagaagagatggaaaagtcattgccgatccgaaggaaaacccgctctctgcctgaccggacacccttccatacctccttgcaccagggaacgtctaaatcttcctctctccccgcctatggcaggaccaccctgagccggctacagtccacagagttcagcccatcagggagtgagactggaagcccaggcctgcagatctatccctatgaaatgctagtggtgaccaacaaggggcgaaccaagctgccaccgggggtggatcggatgcggcttgagaggcatctgtctgccgaggacttctcaagggtatttgccatgtcccctgaagagtttggcaagctggctctgtggaagcggaatgagctcaagaagaaggcctctctcttctgatggcccccacctgctccgggacggcccccttacccctgctgcttcagggtttttccccggcgggttgggaggggcaggaggtggggtggaaatagggtgggctcctttcctcaggtagagtggggggccaaaacctctgcagtccccggcagtgagctatggactttcttccccctcacaaggctgggggcctcctgctctcgtccctggccctccctgcacagggcaaagccagtctgggctctggcacacagagttcatgtttgcgccctctccctgcccctcaccccagagggtgaggaggaatgaggggcattggtggttaggccggttggctgtcttgaacagctggagggaagatgcaggggtgggaagcggccaggcagaaagagctccaggctcttgtgtcgcccacccagccctcccatactcactcctgacagctttcctgcactgcagcctcctgctcctctgactctagtgggaacaggccccagctcagcctccggcagggaggtcacccctccacttcagcttgccctgacctccgctcgcaaaccccgagcttccaagccttttgctccagccctgcggcttccccagaagcctgggcttagggtggagatgccgcctacacacgatcctggccctccacctgcctccaggccacgaaatgggaattccagcactaagccaggcaccgggcagaagctgggccttccgcctcccttggatggggtcaagaggccaggcctggcacattttggagtgtcctggctaccagctctcacctacacccacgcacccccccacacactatgctctctcaagaatgtaatttattggggcccccccagctgctttcctcacctgcccctgccctaccttacacccccagcttgacttctttccagtccacgtgtgtatataatgatatctatatttttgcccaggtctgggtattgctcctgcccagaccctgacatccctttccactgtgtgtgtgaccatgctgggggagggggactctgcttggaattaaaaggttgcattgggtccct

SEQ ID NO: 126205 - DNA, 977 bp, Homo sapiens
  Payload ID: 4748
  Gene Symbol: DMTN
  Gene Name: dematin actin binding protein
  ENST ID: ENST00000517418
  CDS Start-End: 374-977
ggagcagggacaggtccaagacaaggaaggcagttgggctgtgggaatggggagcccagggaaggcctccagagctggccggcctccagcctggctggaccctgctgcctgtgtggcccggagccagaggcccccacactcccagctgctcttctacagatgccatcaacgagcaggactctgggtggctccactgtctaagcctggagagtcaccgccgagggatgaggacgcgccagcccgggggaacgcgccagctgctttcgcggccccaagcgcgcagcgcccagcagccgcgccgagcctgacacgctgtcctctcccctcgcgcacagggctctgcgagtgacccggcgggcgagctccgtgctgcatggaacggctgcagaagcaaccacttacctcccccgggagcgtgagcccctcccgagattccagtgtgcctggctctccctccagcatcgtggccaagatggacaatcaggtgctgggctacaaggacctggctgccatccccaaggacaaggccatcctggacatcgagcggcccgacctcatgatctacgagcctcacttcacttattccctcctggaacacgtggagctgcctcgcagccgcgagcgctcgctgtcacccaaatccacatcccccccaccatccccagaggtgtgggcggacagccggtcgcctggaatcatctctcaggcctcggcccccagaaccactggaaccccccggaccagcctgccccatttccaccaccctgagacctcccgcccagattccaacatctacaagaagcctcccatctataagcagagagagtccgtgggaggcagccctcagaccaagcacctcatcgaggatctcatcatcgagtcatccaagtttcctgcagcccagcccccagaccccaaccagccagccaaaatcgaaaccgactactggccatgccccccgtctctggctgttgtgg

SEQ ID NO: 126206 - DNA, 1057 bp, Homo sapiens
  Payload ID: 4748
  Gene Symbol: DMTN
  Gene Name: dematin actin binding protein
  ENST ID: ENST00000520174
  CDS Start-End: 404-1057
gatcagaccgctcagccgagaccagctcccctccttcgccagctcccaccccgcccacccaccctaagccggcatttttcctgttatttgtgctccggggaagcgccgcggggttcctggaagagacacctattacctaggctcctgggggaagtgacagcccgtggatctggcctacgcctctcgggcctctgtggcctcagagcgtctgggccacactgtctgggaagagcctggagagtcaccgccgagggatgaggacgcgccagcccgggggaacgcgccagctgctttcgcggccccaagcgcgcagcgcccagcagccgcgccgagcctgacacgctgtcctctcccctcgcgcacagggctctgcgagtgacccggcgggcgagctccgtgctgcatggaacggctgcagaaggccaagatggacaatcaggtgctgggctacaaggacctggctgccatccccaaggacaaggccatcctggacatcgagcggcccgacctcatgatctacgagcctcacttcacttattccctcctggaacacgtggagctgcctcgcagccgcgagcgctcgctgtcacccaaatccacatcccccccaccatccccagaggtgtgggcggacagccggtcgcctggaatcatctctcaggcctcggcccccagaaccactggaaccccccggaccagcctgccccatttccaccaccctgagacctcccgcccagattccaacatctacaagaagcctcccatctataagcagagagagtccgtgggaggcagccctcagaccaagcacctcatcgaggatctcatcatcgagtcatccaagtttcctgcagcccagcccccagaccccaaccagccagccaaaatcgaaaccgactactggccatgccccccgtctctggctgttgtggagacagaatggaggaagcggaaggcgtctcggaggggagcagaggaagaggaggaggaggaagatgacgactctggagaggagatgaaggctctcagggagcgtcagagagaggaactcagtaag

SEQ ID NO: 126207 - DNA, 587 bp, Homo sapiens
  Payload ID: 4748
  Gene Symbol: DMTN
  Gene Name: dematin actin binding protein
  ENST ID: ENST00000519850
  CDS Start-End: 256-587
agagaagcctatcgacagggcctgggggagggaggaggcagcagggccggagtccacccaggacatctggcaccagtgaccttgtggggaaaggagccaagaacggggcgtcggggggcctgggacccccctgcctgagagatacaggaatcctggccccgtgttgtggacacaagcgcccatcctcaaggtcctgagaactcctgaacttccaaagggctctgcgagtgacccggcgggcgagctccgtgctgcatggaacggctgcagaagcaaccacttacctcccccgggagcgtgagcccctcccgagattccagtgtgcctggctctccctccagcatcgtggccaagatggacaatcaggtgctgggctacaaggacctggctgccatccccaaggacaaggccatcctggacatcgagcggcccgacctcatgatctacgagcctcacttcacttattccctcctggaacacgtggagctgcctcgcagccgcgagcgctcgctgtcacccaaatccacatcccccccaccatccccagaggtgtgggcggacagccggtcgcctggaatcatctctca

SEQ ID NO: 126208 - DNA, 2551 bp, Homo sapiens
  Payload ID: 4748
  Gene Symbol: DMTN
  Gene Name: dematin actin binding protein
  Uniprot ID: Q08495
  ENST ID: ENST00000517305
  CDS Start-End: 273-1490
gttgcctggttgtgagagtcaggggagcagggacaggtccaagacaaggaaggcagttgggctgtgggaatggggagcccagggaaggcctccagagctggcctggagagtcaccgccgagggatgaggacgcgccagcccgggggaacgcgccagctgctttcgcggccccaagcgcgcagcgcccagcagccgcgccgagcctgacacgctgtcctctcccctcgcgcacagggctctgcgagtgacccggcgggcgagctccgtgctgcatggaacggctgcagaagcaaccacttacctcccccgggagcgtgagcccctcccgagattccagtgtgcctggctctccctccagcatcgtggccaagatggacaatcaggtgctgggctacaaggacctggctgccatccccaaggacaaggccatcctggacatcgagcggcccgacctcatgatctacgagcctcacttcacttattccctcctggaacacgtggagctgcctcgcagccgcgagcgctcgctgtcacccaaatccacatcccccccaccatccccagaggtgtgggcggacagccggtcgcctggaatcatctctcaggcctcggcccccagaaccactggaaccccccggaccagcctgccccatttccaccaccctgagacctcccgcccagattccaacatctacaagaagcctcccatctataagcagagagagtccgtgggaggcagccctcagaccaagcacctcatcgaggatctcatcatcgagtcatccaagtttcctgcagcccagcccccagaccccaaccagccagccaaaatcgaaaccgactactggccatgccccccgtctctggctgttgtggagacagaatggaggaagcggaaggcgtctcggaggggagcagaggaagaggaggaggaggaagatgacgactctggagaggagatgaaggctctcagggagcgtcagagagaggaactcagtaaggttacttccaacttgggaaagatgatcttgaaagaagagatggaaaagtcattgccgatccgaaggaaaacccgctctctgcctgaccggacacccttccatacctccttgcaccagggaacgtctaaatcttcctctctccccgcctatggcaggaccaccctgagccggctacagtccacagagttcagcccatcagggagtgagactggaagcccaggtctccagaacggagagggccagagggggaggatggaccgggggaactccctgccctgtgtgctggagcagaagatctatccctatgaaatgctagtggtgaccaacaaggggcgaaccaagctgccaccgggggtggatcggatgcggcttgagaggcatctgtctgccgaggacttctcaagggtatttgccatgtcccctgaagagtttggcaagctggctctgtggaagcggaatgagctcaagaagaaggcctctctcttctgatggcccccacctgctccgggacggcccccttacccctgctgcttcagggtttttccccggcgggttgggaggggcaggaggtggggtggaaatagggtgggctcctttcctcaggtagagtggggggccaaaacctctgcagtccccggcagtgagctatggactttcttccccctcacaaggctgggggcctcctgctctcgtccctggccctccctgcacagggcaaagccagtctgggctctggcacacagagttcatgtttgcgccctctccctgcccctcaccccagagggtgaggaggaatgaggggcattggtggttaggccggttggctgtcttgaacagctggagggaagatgcaggggtgggaagcggccaggcagaaagagctccaggctcttgtgtcgcccacccagccctcccatactcactcctgacagctttcctgcactgcagcctcctgctcctctgactctagtgggaacaggccccagctcagcctccggcagggaggtcacccctccacttcagcttgccctgacctccgctcgcaaaccccgagcttccaagccttttgctccagccctgcggcttccccagaagcctgggcttagggtggagatgccgcctacacacgatcctggccctccacctgcctccaggccacgaaatgggaattccagcactaagccaggcaccgggcagaagctgggccttccgcctcccttggatggggtcaagaggccaggcctggcacattttggagtgtcctggctaccagctctcacctacacccacgcacccccccacacactatgctctctcaagaatgtaatttattggggcccccccagctgctttcctcacctgcccctgccctaccttacacccccagcttgacttctttccagtccacgtgtgtatataatgatatctatatttttgcccaggtctgggtattgctcctgcccagaccctgacatccctttccactgtgtgtgtgaccatgctgggggagggggactctgcttggaattaaaaggttgcattgggtccct

SEQ ID NO: 126209 - DNA, 1569 bp, Homo sapiens
  Payload ID: 4748
  Gene Symbol: DMTN
  Gene Name: dematin actin binding protein
  Uniprot ID: Q08495
  ENST ID: ENST00000517600
  CDS Start-End: 249-1346
gagatgcgccgagggatggaggtgtatgtcaccgaggaggctgctgcgctcctgccccacgccctgggcccttgaagcctggagagtcaccgccgagggatgaggacgcgccagcccgggggaacgcgccagctgctttcgcggccccaagcgcgcagcgcccagcagccgcgccgagcctgacacgctgtcctctcccctcgcgcacagggctctgcgagtgacccggcgggcgagctccgtgctgcatggaacggctgcagaaggccaagatggacaatcaggtgctgggctacaaggacctggctgccatccccaaggacaaggccatcctggacatcgagcggcccgacctcatgatctacgagcctcacttcacttattccctcctggaacacgtggagctgcctcgcagccgcgaggtgtgggcggacagccggtcgcctggaatcatctctcaggcctcggcccccagaaccactggaaccccccggaccagcctgccccatttccaccaccctgagacctcccgcccagattccaacatctacaagaagcctcccatctataagcagagagagtccgtgggaggcagccctcagaccaagcacctcatcgaggatctcatcatcgagtcatccaagtttcctgcagcccagcccccagaccccaaccagccagccaaaatcgaaaccgactactggccatgccccccgtctctggctgttgtggagacagaatggaggaagcggaaggcgtctcggaggggagcagaggaagaggaggaggaggaagatgacgactctggagaggagatgaaggctctcagggagcgtcagagagaggaactcagtaaggttacttccaacttgggaaagatgatcttgaaagaagagatggaaaagtcattgccgatccgaaggaaaacccgctctctgcctgaccggacacccttccatacctccttgcaccagggaacgtctaaatcttcctctctccccgcctatggcaggaccaccctgagccggctacagtccacagagttcagcccatcagggagtgagactggaagcccaggcctgcagaacggagagggccagagggggaggatggaccgggggaactccctgccctgtgtgctggagcagaagatctatccctatgaaatgctagtggtgaccaacaaggggcgaaccaagctgccaccgggggtggatcggatgcggcttgagaggcatctgtctgccgaggacttctcaagggtatttgccatgtcccctgaagagtttggcaagctggctctgtggaagcggaatgagctcaagaagaaggcctctctcttctgatggcccccacctgctccgggacggcccccttacccctgctgcttcagggtttttccccggcgggttgggaggggcaggaggtggggtggaaatagggtgggctcctttcctcaggtagagtggggggccaaaacctctgcagtccccggcagtgagctatggactttcttccccctcacaaggctgggggcctcctgctctcgtccctggccctccctgcaca

SEQ ID NO: 126210 - DNA, 593 bp, Homo sapiens
  Payload ID: 4748
  Gene Symbol: DMTN
  Gene Name: dematin actin binding protein
  ENST ID: ENST00000522340
  CDS Start-End: 379-593
gtcatttcctttgaagccagagaacaatggctcaaaaacaagcgcagcccgtccttcggtcgcctcccgtccacgcgcgcgttctccggggctgagcggatgggaagcctcagccgcaaggggcccggctgcctggagagcggccgcccgcggaggccccgcagcctaacgccgccccggcgcggcctccctcccttctccccgcagcctggagagtcaccgccgagggatgaggacgcgccagcccgggggaacgcgccagctgctttcgcggccccaagcgcgcagcgcccagcagccgcgccgagcctgacacgctgtcctctcccctcgcgcacagggctctgcgagtgacccggcgggcgagctccgtgctgcatggaacggctgcagaagcaaccacttacctcccccgggagcgtgagcccctcccgagattccagtgtgcctggctctccctccagcatcgtggccaagatggacaatcaggtgctgggctacaaggacctggctgccatccccaaggacaaggccatcctggacatcgagcggcccgacctcatgatctacgagcctcacttcacttattccct

SEQ ID NO: 126211 - DNA, 582 bp, Homo sapiens
  Payload ID: 4748
  Gene Symbol: DMTN
  Gene Name: dematin actin binding protein
  ENST ID: ENST00000519333
  CDS Start-End: 361-582
agagaacaatggctcaaaaacaagcgcagcccgtccttcggtcgcctcccgtccacgcgcgcgttctccggggctgagcggatgggaagcctcagccgcaaggggcccggctgcctggagagcggccgcccgcggaggccccgcagcctaacgccgccccggcgcggcctccctcccttctccccgcagcctggagagtcaccgccgagggatgaggacgcgccagcccgggggaacgcgccagctgctttcgcggccccaagcgcgcagcgcccagcagccgcgccgagcctgacacgctgtcctctcccctcgcgcacagggctctgcgagtgacccggcgggcgagctccgtgctgcatggaacggctgcagaaggccaagatggacaatcaggtgctgggctacaaggacctggctgccatccccaaggacaaggccatcctggacatcgagcggcccgacctcatgatctacgagcctcacttcacttattccctcctggaacacgtggagctgcctcgcagccgcgagcgctcgctgtcacccaaatccacatcccccccaccatccccagaggtg

SEQ ID NO: 126212 - DNA, 3749 bp, Homo sapiens
  Payload ID: 4749
  Gene Symbol: DDN
  Gene Name: dendrin
  Uniprot ID: O94850
  ENST ID: ENST00000421952
  CDS Start-End: 23-2158
ggccggggtggggtggggcaggatgctggatggcccactgttctccgaggggcctgacagcccccgggagctccaggatgaggagtctggcagctgcctctgggtgcagaagtccaagctattggtgatagaagtgaagactatttcctgtcattatagtcgccgcgccccttctcgacagcccatggacttccaggccagccactgggctcgcgggttccagaaccgcacgtgtgggccgcgcccgggatccccacagccgccgccccgccggccctgggcctccagggtgctgcaggaggcgaccaactggcgggcggggcccctggccgaggtccgagctcgggagcaagagaaaaggaaagcggcgtcgcaggagcgggaggccaaggagaccgagcgaaaaaggcgcaaggctggtggggcccgacggagccccccgggtcgaccccgcccggagccccgcaacgcccctcgggtggcccagctggcagggctccctgctcccttgcggccggagcgcctggcgcctgtggggcgagcgccccgtccatccgcgcagccgcagagcgacccagggtcggcgtgggcggggccctggggaggtcggcggcccgggcccccaagctacgaggctcacctgctgctgagaggttctgccgggaccgccccacgacgccgctgggaccggccgccaccctacgtggctccaccttcttacgaaggcccccataggaccttggggactaagagaggccccgggaactctcaggtgcccacttcatcagccccagctgcgactccagccaggacagacggagggcgcacaaagaagaggctggatcctcggatctaccgggacgtcctcggggcttggggtctccgacaggggcaaggtctcttggggggatccccaggctgtggagcggccagagcaaggccagagcccggcaagggggtcgtggagaaaagcctggggctggctgctgctgacctgaacagtggtagcgacagccatccccaagccaaagctacagggagcgcaggcaccgagatagctcctgcggggtctgcaactgcggctccctgtgccccgcatcccgctcccagatccaggcaccacctcaagggctcgagggaagggaaagaaggagaacagatctggtttcccaaatgctggattccctcccctaaaaagcagccgccccgccatagccagacactccccagaccctgggctcccggaggcaccggatggagagaatctctgggtcttggagagggggcaggaccggagaccctggagggttggaaggcgacccgccgtgcccacaccttgccccgcagttcccagggcctgtcccgtggggaaggcgtctttgtcattgacgccacgtgcgtagtgatacgatcccaatatgttccaaccccccgaacccagcaggtgcagcttttgccctctggggtgacacgcgtggtgggggattcccccagccaatcgaagcccggcaaggaggagggtgaaggggccacggtctttccttccccttgtcaaaagcggctgtcgagcagtcgccttttacaccagcccggcgggggccgcgggggcgaagctgagggcgggaggccgggggactccacactggaggagcgcactttccgcatcttggggctcccggcccccgaagtaaacctgcgggacgcccccacgcagccaggtagcccagagcaccaagccttaggcccagcagcttcgggagcccagggcagagccgaggggtcggaagtggcggtggtccagcggcgcgccggccggggctgggcgcggaccccagggccctacgccggggccctgcgagaagccgtgtcccgtatccgccgccacacagcccctgactcggacacggacgaagctgaggagctcagcgtccatagcggctcctctgatggaagcgacacagaagccccgggcgcctcctggcggaatgagaggaccctgcccgaggttggaaacagttcgccagaggaagatgggaagacagcggaactgagcgacagtgtcggggagatcctagatgtcataagccaaaccgaggaggtcctcttcggggtgagggacatcagagggacccaacagggaaataggaagaggcagtgagaggccccttcttgtatttgtgtccccaacgcatccatccttgggtccactggtccccattcttccccacagacttcctttgcttctcttttccttgtatctttacccatacctgttctcatccttgaaatataaatgaaaggaagggaagcatatgcccattaatgattttgtttcaggagaggtgagaatgagcagatttaattaatgtctgttatgttcagggcacaagggtgagctcttcgcaggggctgatgcactgggtgtggagctgagcagagaggcctaaccaggatcaggcaggagggcagggatggtggcagccataggagggcagggtagggtagggcctctgaggaggagggaaaaagtgaaggagaggctttggacctggtgacagagtgatcagatgacagaggggttcttgggagaagaggcataggtccagcaacaaccaacaaagcagaaggagggctcaccttggtgtcacaagtcttggatttcaatcccaactctgccactgagttgctggttgactgaggccagtcactttccctctccaggcctccaggcctcctggtatataaaatgatggtattctaaggtccatccttccgtctctgacattttgagatctttggaaaggactctatctcatcctcccctcgacaagccaagaatgagaattgggaataagtgaacagagtttgagggtttctgggcggcctccgtgtcacccaaagtcatgatcaattcaggagactgcccaaggcttgcagaagaggtaagggagtgaggcactcctatcccagtctcccaggtttggttgagggctccccaaggcagggcaagatagcggccctgtcactgaccctggcctgtggtggtctgagctggggagggaaggacaccaatgaatcagcttgggacctctttaggccttccccttttcctccaccccgatgctccttagtgatgctctgaggcgtggccacgatctccctcccaggtggtatcgcccacctgaaaaaatcctgagaatttctcccatcttggcctcttccagaaaccggccaggcaaggaaagaggccggtcaccagaagccagcaggcgtggggtgtgatactctctatagccactacagggcgcgcgcaggtcgcggatctccccagttgctaatcccggctctgccactcaatcctatccctagttcccgagcgcgggtcccccgccttgcagtctccagccgtgcggggccgggagcaggcctccggcctcccagacttctagagcccgccgggcccatctttgtactcatccaccccagccggcttgggactcagacaccgaagtctttttttttttctctccgatccttggacacctcctctgtctgccatttattagccatgtgaacttggccacatcacttcacctccctgagcctcagtttcctcatctgtcaaatgggggtttataaacacctacctcgcagggttgttgtgaggatttaatgcgataatgtatgtaaagcgccttgcacactgcctggcacacagtaggcgctcaataaatctaagcttcccttta

SEQ ID NO: 126213 - DNA, 3135 bp, Homo sapiens
  Payload ID: 4750
  Gene Symbol: DCANP1
  Gene Name: dendritic cell-associated nuclear protein
  Uniprot ID: Q8TF63
  ENST ID: ENST00000503143
  CDS Start-End: 241-975
cagaacccaagggcttacctgtgctctgtgattccccaactagggatttagttgtagccacggacctggtaggcaacagggaggggattttaatctgctccttgcatcagaaggtccaataggcagggttagtataatgggagatgccctggtagggctggcaaggagaagaagccacatgtattttggtctgatgaaaagcagcagtgatctgtcactgaccaaaatggtcccccaactatgcattacggagcagcaacccacatacagaactcgagaagccacggcctggagactgtacctggacaccaaagactggagagaggagctggtggggaaaccccagagttcccagggtgccactccccagctccaccagagaactttgggaatgagctgctgcccctgagtgcccctctccagggcctcagtgagggtctctaccctccagggaggaacaaaaccttgccagctggggtcctgcgagagggggcagttcaattcctccacaggggactctgcaactccaatctttcgagtgaagcatctgcgaggccctcagggacccaggatgaactgcatagcagcagaaggaagacaggccagaccaggcgggagggagcccggaaacatctggtttgtagtttcagactctacccgttcacagttcacacagtctcaccgggaaactcacaccttgccctgtaccaagtttttaaggcagttaagctctgcccatccgagacttcatttttcttgagtagaaaatcactgaaatcatcagatccatggcacccaccttcactttctcctaacagctggaaccgtcaggctggcttcagggcctggtcttcgcacttgatatcactatccctcacctgctcagacagccagagcaggcgggtgagttcctcccaacaacctccactgcattctctcagctcccaccgcagggcagcccacgtgcctgagtgaacatgtgtgcgtgtgcacacacgcaagtatgcacagacatacactaaacacgaacatacagtgcacatgaacgctgctcccagctagggccctctggtcagactgctgcctgggttagaattcttgtccccacccccacttactatagttctgtgatcctggacaagtaactgaatctctccgtgccacagtttcttcttgtagaaaacgggaaagttcacagtacttacctccttagagtcattgtgaaggtcagtttgaggcatcacaaatttaaggcacccagacataagggtcaacagggttagctatcactgtccagtttggtgggaggaactgaatgcatgtaggcacatggacccagtctacactcaggcacaaaaggagctacattagttacattcaggcataccccagagcactacaattctctgagacattgtctggaaatctagaaatcatctccttgccctttaaggtattttaaccctcgcattcctctgcttttccaagaatgtgaatcttgccaagctgtccgtgagagacacgggctcccctcgagggagacttgcaaatgctccataaacagccacagtgtggggctctgccatgaggaagtcacagcagacacgctagacagcatagtcctggatgcaacctggaggaagggaggcccatggtggagcactcactccgtgcctgtctgcccggtgagacctcaagttccttgcagacaaaggccatgggttgttggctcttgtgttcccggtggcctttccagagctgaacagaggacagatgcacagacgggggggctctggtggtcaaggcagcagtccccttggatactaaagtctgagccaggcccctcaggcccggcatgggcagtgcgaggcccatagtggtgggaagccagttggccagctggggtgagaaggccgcgaagccatgggcagacaggaagtggaggtgaatgtctctgcctcctgtaggcctcagcagggacagcacagaccctctggctggggcagcgcagaccctctagctggggcagaacaaggctggtgcttccttctagtccttgagactttgtagctctaactcaagcagaaccctggggttttgggattctgtgtggtgactgctgaggaaggtttatggatttgacagggtgcatgtcacagagagacagttctcagtcagcacttcctgtcccctgcagaggctcataggggacagcccctgccaaggagaccctggaggggctctgaggatagcaatcagaggttgggctggctggactgagcccaggcctgttgcccaccaagtctccataggttctagtctgacccctctctccacccctgggctatgcaggccagcccgtgcagaccacccccgacgcgtccacttgcaacacccgcctcactgtgccaacactccatccacacaggaaaggactgagaacgtgatgcttaacccaaaggagtgagtttcataggatgggtggctttaacagtttcacagcaggacactgagggaatatttccctatcccttcaaatggacggtcactacagaaacgtgtagagcaagactttgtcaaggggctgtttccaggtctcccggtgtctaaatagcagagctggaatgggaactgagaaccgattctttccacaaccgcccactgagcagcaaggctgcagccagcaaagaggtgcggaggcaagcaagctccatgtggtggggacagcgcattgcgacctccaccacccctgcagtgggctgccagctgagccacctgtcttccactgtatctactgtacgaacttctccagctctgctctgttttctcttcctcagcatccaccccgtgacacgtagtggtggctgatgtcgccacagtaccatgaggttaacaggtcctccctccagcttccctcatggtggcagcctaacctgcattgcagccgttcaccggacaccgcaccagaccctcaaaacccatccaagactgtgggaggagtaaacaacccagcccagttaagaggagatgccgaatttaatgaaccctatttgaattgcagggctgtgattcctcttacctttaacgtgaactcacaggcggattaaagtgaaataaaacctaccatttgagtta

SEQ ID NO: 126214 - DNA, 1953 bp, Homo sapiens
  Payload ID: 4751
  Gene Symbol: DCSTAMP
  Gene Name: dendrocyte expressed seven transmembrane protein
  Uniprot ID: Q9H295
  ENST ID: ENST00000297581
  CDS Start-End: 50-1462
gcatttctgcattcgaagaagaatctgagagaaacctgacgcagggagcatgggtatctggacctcaggcactgatatcttcctaagtctttgggagatttacgtgtctccaagaagccccggatggatggactttatccagcatttgggagtttgctgtttggttgctcttatttcagtgggcctcctgtctgtggccgcctgctggtttctgccatcaatcatagcggccgctgcctcctggattatcacgtgtgttctgctgtgttgctccaagcatgcacgatgttttattcttcttgtctttctctcttgtggcctgcgtgaaggcaggaatgctttgattgcagctggcacagggatcgtcatcttgggacacgtagaaaatatttttcacaactttaaaggtctcctagatggtatgacttgcaacctaagggcaaagagcttttccatacattttccacttttgaaaaaatatattgaggcaattcagtggatttatggccttgccactccactaagtgtatttgatgaccttgtttcttggaaccagaccctggcagtctctcttttcagtcccagccatgtcctggaggcacagctaaatgacagcaaaggggaagtcctgagcgtcttgtaccagatggcaacaaccacagaggtgttgtcctccctgggtcagaagctacttgcctttgcagggctttcgctcgtcctgcttggcactggcctcttcatgaagcgatttttgggcccttgtggttggaagtatgaaaacatctacatcaccagacaatttgttcagtttgatgaaagggagagacatcaacagaggccctgtgtgctcccgctgaataaggaggaaaggaggaagtatgtcatcatcccgactttctggccgactcctaaagaaaggaaaaacctggggctgtttttcctccccatacttatccatctctgcatctgggtgctgtttgcagctgtagattatctgctgtatcggctcattttctcagtgagcaagcagtttcaaagcttgccagggtttgaggttcacttgaaactgcacggagagaaacaaggaactcaagatattatccatgattcttcctttaatatatctgtgtttgaacccaactgtatcccaaaaccaaaattccttctatctgagacctgggttcctctcagtgttattcttttgatattagtgatgctgggactgttgtcctctatccttatgcaacttaaaatcctggtgtcagcatctttctaccccagcgtggagaggaagcgcatccaatatctgcatgcaaagctgcttaaaaaaagatcaaagcagccgctgggagaagtcaaaagacggctgagtctctatcttacaaagattcatttctggcttccagtcctgaaaatgattaggaagaagcaaatggacatggcaagtgcagacaagtcatgagagaccccgactactcctcagccacatcgcaccaacaattctcttcaggtctaggatggcagtcactattcatgccggataatagagaactatgtgacgcagtcctctcaggagtctgagtttacagagccaacttgcagcacctggttatgcctcctttcatctcaaagccaaagagctgccaggtaaatggttatgtggtctatgttccaaacaaaccacatgatcttgcctgtgtcacaatgtaacaagactctagctgggtcccctggtgatgagtttcagcatagaataatgttcaaggaaaagaaaacgaaaacagtttaaatctctaccacagcctcacaagcaaatgctaaggggaacatacatgtaaaaagccagcaaactatcttcaaactcttccgtccttaatgtcttccatggctattgcccccacaatggtctcttttctccctgctcccttattaaagaactctttctgaaaccca

SEQ ID NO: 126215 - DNA, 949 bp, Homo sapiens
  Payload ID: 4751
  Gene Symbol: DCSTAMP
  Gene Name: dendrocyte expressed seven transmembrane protein
  Uniprot ID: Q9H295
  ENST ID: ENST00000517991
  CDS Start-End: 13-864
gacgcagggagcatgggtatctggacctcaggcactgatatcttcctaagtctttgggagatttacgtgtctccaagaagccccggatggatggactttatccagcatttgggagtttgctgtttggttgctcttatttcagtgggcctcctgtctgtggccgcctgctggtttctgccatcaatcatagcggccgctgcctcctggattatcacgtgtgttctgctgtgttgctccaagcatgcacgatgttttattcttcttgtctttctctcttgtggcctgcgtgaaggcaggaatgctttgattgcagctggcacagggatcgtcatcttgggacacgtagaaaatatttttcacaactttaaaggtctcctagatggtatgacttgcaacctaagggcaaagagcttttccatacattttccacttttgaaaaaatatattgaggcaattcagtggatttatggccttgccactccactaagtgtatttgatgaccttgtttcttggaaccagaccctggcagtctctcttttcagtcccagccatgtcctggaggcacagctaaatgacagcaaaggggaagtcctgagcgtcttgtaccagatggcaacaaccacagaggtgttgtcctccctgggtcagaagctacttgcctttgcagggctttcgctcgtcctgcttggcactggcctcttcatgaagcgatttttgggcccttgtggttggaagtatgaaaacatctacatcaccagacaatttgttcagtttgatgaaagggagagacatcaacagaggccctgtgtgctcccgctgaataaggaggaaaggaggaaattcatttctggcttccagtcctgaaaatgattaggaagaagcaaatggacatggcaagtgcagacaagtcatgagagaccccgactactcctcagccacatcgcaccaa

SEQ ID NO: 126216 - DNA, 1471 bp, Homo sapiens
  Payload ID: 4751
  Gene Symbol: DCSTAMP
  Gene Name: dendrocyte expressed seven transmembrane protein
  Uniprot ID: Q9H295
  ENST ID: ENST00000622554
  CDS Start-End: 80-931
atatatcaagacctacagcccttgggaagtgcatttctgcattcgaagaagaatctgagagaaacctgacgcagggagcatgggtatctggacctcaggcactgatatcttcctaagtctttgggagatttacgtgtctccaagaagccccggatggatggactttatccagcatttgggagtttgctgtttggttgctcttatttcagtgggcctcctgtctgtggccgcctgctggtttctgccatcaatcatagcggccgctgcctcctggattatcacgtgtgttctgctgtgttgctccaagcatgcacgatgttttattcttcttgtctttctctcttgtggcctgcgtgaaggcaggaatgctttgattgcagctggcacagggatcgtcatcttgggacacgtagaaaatatttttcacaactttaaaggtctcctagatggtatgacttgcaacctaagggcaaagagcttttccatacattttccacttttgaaaaaatatattgaggcaattcagtggatttatggccttgccactccactaagtgtatttgatgaccttgtttcttggaaccagaccctggcagtctctcttttcagtcccagccatgtcctggaggcacagctaaatgacagcaaaggggaagtcctgagcgtcttgtaccagatggcaacaaccacagaggtgttgtcctccctgggtcagaagctacttgcctttgcagggctttcgctcgtcctgcttggcactggcctcttcatgaagcgatttttgggcccttgtggttggaagtatgaaaacatctacatcaccagacaatttgttcagtttgatgaaagggagagacatcaacagaggccctgtgtgctcccgctgaataaggaggaaaggaggaaattcatttctggcttccagtcctgaaaatgattaggaagaagcaaatggacatggcaagtgcagacaagtcatgagagaccccgactactcctcagccacatcgcaccaacaattctcttcaggtctaggatggcagtcactattcatgccggataatagagaactatgtgacgcagtcctctcaggagtctgagtttacagagccaacttgcagcacctggttatgcctcctttcatctcaaagccaaagagctgccaggtaaatggttatgtggtctatgttccaaacaaaccacatgatcttgcctgtgtcacaatgtaacaagactctagctgggtcccctggtgatgagtttcagcatagaataatgttcaaggaaaagaaaacgaaaacagtttaaatctctaccacagcctcacaagcaaatgctaaggggaacatacatgtaaaaagccagcaaactatcttcaaactcttccgtccttaatgtcttccatggctattgcccccacaatggtctcttttctccctgctcccttattaaagaactctttctgaaaccc

SEQ ID NO: 126217 - DNA, 3003 bp, Homo sapiens
  Payload ID: 4752
  Gene Symbol: DENND1A
  Gene Name: DENN/MADD domain containing 1A
  Uniprot ID: Q8TEH3
  ENST ID: ENST00000373618
  CDS Start-End: 294-1694
ggcggagggggcggcgcgcgccgggcacgcgcgccggcgaccatggcgttcgccgggctggagcgagtacattaacccctggaggcggcggcggcggcgagggagcgagcctcgagcgggcgggccccagcctgagggaagggaggaaggggcggggagagcgccagagggaggccggtcggccgcgggcgggcgggcagcgcagcgccgagcggggcccgcgggcccatgaggaggcctggggaccatgggctccaggatcaagcagaatccagagaccacatttgaagtatatgttgaagtggcctatcccaggacaggtggcactctttcagatcctgaggtgcagaggcaattcccggaggactacagtgaccagcctcacagttagccaagttggccagaacttcacattcgtgctcactgacattgacagcaaacagagattcgggttctgccgcttatcttcaggagcgaagagctgcttctgtatcttaagctatctcccctggttcgaggtattttataagctgcttaacatcctggcagattacacgacaaaaagacaggaaaatcagtggaatgagcttcttgaaactctgcacaaacttcccatccctgacccaggagtgtctgtccatctcagcgtgcattcttattttactgtgcctgataccagagaacttcccagcatacctgagaatagaaatctgacagaatattttgtggctgtggatgttaacaacatgttgcatctgtacgccagtatgctgtacgaacgccggatactcatcatttgcagcaaactcagcactctgactgcctgcatccacgggtctgcggcgatgctctaccccatgtactggcagcacgtgtacatccccgtgctgccgccgcatctgctggactactgctgtgctcccatgccctacctcataggaatccatttaagtttaatggagaaagtcagaaacatggccctggatgatgtcgtgatcctgaatgtggacaccaacaccctggaaacccccttcgatgacctccagagcctcccaaacgacgtgatctcttccctgaagaacaggctgaaaaaggtctccacaaccactggggatggtgtggccagagcgttcctcaaggcccaggctgctttcttcggtagctaccgaaacgctctgaaaatcgagccggaggagccgatcactttctgtgaggaagccttcgtgtcccactaccgctccggagccatgaggcagttcctgcagaacgccacacagctgcagctcttcaagcagtttattgatggtcgattagatcttctcaattccggcgaaggtttcagtgatgtttttgaagaggaaatcaacatgggcgagtacgctggcagtgacaaactgtaccatcagtggctctccactgtccggaaaggaagtggagcaattctgaatactgtaaagaccaaagcaaatccggccatgaagactgtctacaagttcgcaaaagatcatgcaaaaatgggaataaaagaggtgaaaaaccgcttgaagcaaaaggacattgccgagaatggctgcgcccccaccccagaagagcagctgccaaagactgcaccgtccccactggtggaggccaaggaccccaagctccgagaagaccggcggccaatcacagtccactttggacaggcgttgtgaatccccaaaaggagcaagacagaagacagcatttctcagatttgcctggctggggaacctccttttttcccttcacacaatgcgtctcccaggatggtgtttctcagcagacaccctgtgagatgccggccttccactgagatgatttcatctgccaagtgccaagactgggtggacatttttttaagtcctctctggaaacaaatgtaggcgatggactgggagggggagaggctggaggcagggaaacctgctgatggtaatggttgctaatgtctgttggtggcactgtgcaaagaacctgacgtccatcatctcgttgaatcttcctaacaggacactcgggtaggcagtgctgttacctgtacttcacagatgaggacagtaaggcttggaatggtcaaatcgtgggcctggagtaacccagggagtaaatgggagaactggggttctctccaaaactgtctgacccctagaggctgcctcccgagcgctctggtgcactgccacccagcaggaatggaaatagcccaagccagaggtgacaagcagtgaagacagtggggctggagaagatggttcccccgaagtagaaaggccaagcataagagaagcagtattgtggggagtggtgtaggagagctgggtgtctagacagggtagcagcctgtgcaccggtggagggggtgggctcccctctccctgatcacctcttcctcttgatgaatggtgtgaattgaggggtgggggggctgttcccctttcccccacacacttcctgtaagccaggaaggggaaaaaacatggtggccttgcccatccctaggcagcacccccaactcccgggtagctgtcagctgaagggtcaccaagcatgggtcagccctcacgcccagctaatggcataggatctgggaagccacggtgtcattctatcccatcgtgttctccatgtgccgccagggaaccctccaccaagtccctggacccgctttcccctcaggctgccccgacaggttccatgcagagcaccagggacccagggacaactgggacacaggccctgccctccaggagtagtggggcaggttcagaaaacaaattctaaggcagatttgagatctgaagtgtcactcccactcagtagagccctatatcagcactgtccaagaaaaacataatgggagcttcatacgggagtcacatgtggaattctgaatgtgaaacataaacaggtgaaattgattttaatataatgaacccaatatatccaaaatattatttcaacatgtaatcaatctaaaaatta

SEQ ID NO: 126218 - DNA, 3612 bp, Homo sapiens
  Payload ID: 4752
  Gene Symbol: DENND1A
  Gene Name: DENN/MADD domain containing 1A
  Uniprot ID: Q8TEH3
  ENST ID: ENST00000373620
  CDS Start-End: 222-1901
acgcgcgccggcgaccatggcgttcgccgggctggagcgagtacattaacccctggaggcggcggcggcggcgagggagcgagcctcgagcgggcgggccccagcctgagggaagggaggaaggggcggggagagcgccagagggaggccggtcggccgcgggcgggcgggcagcgcagcgccgagcggggcccgcgggcccatgaggaggcctggggaccatgggctccaggatcaagcagaatccagagaccacatttgaagtatatgttgaagtggcctatcccaggacaggtggcactctttcagatcctgaggtgcagaggcaattcccggaggactacagtgaccaggaagttctacagactttgaccaagttttgtttccccttctatgtggacagcctcacagttagccaagttggccagaacttcacattcgtgctcactgacattgacagcaaacagagattcgggttctgccgcttatcttcaggagcgaagagctgcttctgtatcttaagctatctcccctggttcgaggtattttataagctgcttaacatcctggcagattacacgacaaaaagacaggaaaatcagtggaatgagcttcttgaaactctgcacaaacttcccatccctgacccaggagtgtctgtccatctcagcgtgcattcttattttactgtgcctgataccagagaacttcccagcatacctgagaatagaaatctgacagaatattttgtggctgtggatgttaacaacatgttgcatctgtacgccagtatgctgtacgaacgccggatactcatcatttgcagcaaactcagcactctgactgcctgcatccacgggtctgcggcgatgctctaccccatgtactggcagcacgtgtacatccccgtgctgccgccgcatctgctggactactgctgtgctcccatgccctacctcataggaatccatttaagtttaatggagaaagtcagaaacatggccctggatgatgtcgtgatcctgaatgtggacaccaacaccctggaaacccccttcgatgacctccagagcctcccaaacgacgtgatctcttccctgaagaacaggctgaaaaaggtctccacaaccactggggatggtgtggccagagcgttcctcaaggcccaggctgctttcttcggtagctaccgaaacgctctgaaaatcgagccggaggagccgatcactttctgtgaggaagccttcgtgtcccactaccgctccggagccatgaggcagttcctgcagaacgccacacagctgcagctcttcaagcagtttattgatggtcgattagatcttctcaattccggcgaaggtttcagtgatgtttttgaagaggaaatcaacatgggcgagtacgctggcagtgacaaactgtaccatcagtggctctccactgtccggaaaggaagtggagcaattctgaatactgtaaagaccaaagcaaatccggccatgaagactgtctacaagttcgcaaaagatcatgcaaaaatgggaataaaagaggtgaaaaaccgcttgaagcaaaaggacattgccgagaatggctgcgcccccaccccagaagagcagctgccaaagactgcaccgtccccactggtggaggccaaggaccccaagctccgagaagaccggcggccaatcacagtccactttggacaggtgcgcccacctcgtccacatgttgttaagagaccaaagagcaacatcgcagtggaaggccggaggacgtctgtgccgagccctgagcaaaacaccattgcaacaccagctacactccacatcctacagaaaagcattacccattttgcggccaagttcccgacgagaggctggacctcttcatcacattgacttacgccgttgcttttccagactgggcagaggggctgacttcgcagtgtgtgccaaagagccggtgtctgataatcccattttcctgcttatcacctgaactgtgtcagtatcacttttagttttgttggttggttggtttgttgtttgtttaatatgccctgttttctacttctgttggaaaatatttggggttgaaataaaccagtgggagcatgggagccagtttggtggttggcaaactaccagtgatagaaaacaaatgacaggttttctgtgagcgtacgtcacagtggctcgggcccacaaggagacagaggggtacgtttcaggacatcattccaagggtttctgttcacgtttgtttaacgaggaaggggaagttgttctcccataataccagtggtatttctagtgcaacccgggtgtttttctacgcctcttcccatgctgcttccccacccccccactgtgctccgccccttccaaatgccatgtcacaacagcacttggatgtgtttttctcaactgtcatcagctccagctggcaggaccaacttcttgaaacacaggaagcatccagcggaaaatattttaataaaacagactcctcataaaatattgttcgggggagggggaagaaaccggctccaccaatctgtcggcattgtattgggagatgtgagaagccaggctggcagcaggggcccgatcctaatgggcctttgtcaggtggtggttccgtgttgggcacacggacttggtgcctggccctttaatctggcctgggttttcttgaatcacagatcttcatctccactgggaatatcaaagtgcttgggaaacttagaagactggggcagcagaaggggatgcaggatctttgaagtggagaggagagattcattcctcctgacttcttgccccaactctcacttccaattgcacattaaataatcccagcactttgggaggccaaggcgagcggatcacctgaggtcaggggttcgagaccagcctgggcaacatggcgaaaccccgtctctactaaaaatacaaaaattagccgagtgtggtggcgcacccctgtaattccagctactcgggaggctgaggcatgagaatcacttgaacccaggaggcggaggctgccgtgagctgagatcacaccaccacactccagcctgtgcaacagagtgagactctgtctcaaaaataaaataaccagctttgtggacagcaagatggggctgattaagagtaagactgtctcctggagtagctgagcatcctgggactcatcagggcccagaaacactagccagccactctctggccagtccacccctgaagttcatttcttccttcccagctgatgtccatccctccatcattccatctgtccattcgtgcattcattcattcagcaagtatctttgaaaacctactaggcgcaagcacggacgatttttttaaaggaggccttaaaagggagtccccatgctgactcttggttgacttgcattttcccaaaatgaaattttcctgtgtcaaattttctttctgaatcaatgataggtttcctagtcccttaaaactggccgttggcaattggaagaagacttttttgaagatttgtgggggaaacattccctttacttttcaggtaacattacttggttaatattcagttactaaatctcttcaagaa

SEQ ID NO: 126219 - DNA, 5010 bp, Homo sapiens
  Payload ID: 4752
  Gene Symbol: DENND1A
  Gene Name: DENN/MADD domain containing 1A
  Uniprot ID: Q8TEH3
  ENST ID: ENST00000373624
  CDS Start-End: 203-3232
gcgttcgccgggctggagcgagtacattaacccctggaggcggcggcggcggcgagggagcgagcctcgagcgggcgggccccagcctgagggaagggaggaaggggcggggagagcgccagagggaggccggtcggccgcgggcgggcgggcagcgcagcgccgagcggggcccgcgggcccatgaggaggcctggggaccatgggctccaggatcaagcagaatccagagaccacatttgaagtatatgttgaagtggcctatcccaggacaggtggcactctttcagatcctgaggtgcagaggcaattcccggaggactacagtgaccaggaagttctacagactttgaccaagttttgtttccccttctatgtggacagcctcacagttagccaagttggccagaacttcacattcgtgctcactgacattgacagcaaacagagattcgggttctgccgcttatcttcaggagcgaagagctgcttctgtatcttaagctatctcccctggttcgaggtattttataagctgcttaacatcctggcagattacacgacaaaaagacaggaaaatcagtggaatgagcttcttgaaactctgcacaaacttcccatccctgacccaggagtgtctgtccatctcagcgtgcattcttattttactgtgcctgataccagagaacttcccagcatacctgagaatagaaatctgacagaatattttgtggctgtggatgttaacaacatgttgcatctgtacgccagtatgctgtacgaacgccggatactcatcatttgcagcaaactcagcactctgactgcctgcatccacgggtctgcggcgatgctctaccccatgtactggcagcacgtgtacatccccgtgctgccgccgcatctgctggactactgctgtgctcccatgccctacctcataggaatccatttaagtttaatggagaaagtcagaaacatggccctggatgatgtcgtgatcctgaatgtggacaccaacaccctggaaacccccttcgatgacctccagagcctcccaaacgacgtgatctcttccctgaagaacaggctgaaaaaggtctccacaaccactggggatggtgtggccagagcgttcctcaaggcccaggctgctttcttcggtagctaccgaaacgctctgaaaatcgagccggaggagccgatcactttctgtgaggaagccttcgtgtcccactaccgctccggagccatgaggcagttcctgcagaacgccacacagctgcagctcttcaagcagtttattgatggtcgattagatcttctcaattccggcgaaggtttcagtgatgtttttgaagaggaaatcaacatgggcgagtacgctggcagtgacaaactgtaccatcagtggctctccactgtccggaaaggaagtggagcaattctgaatactgtaaagaccaaagcaaatccggccatgaagactgtctacaagttcgcaaaagatcatgcaaaaatgggaataaaagaggtgaaaaaccgcttgaagcaaaaggacattgccgagaatggctgcgcccccaccccagaagagcagctgccaaagactgcaccgtccccactggtggaggccaaggaccccaagctccgagaagaccggcggccaatcacagtccactttggacaggtgcgcccacctcgtccacatgttgttaagagaccaaagagcaacatcgcagtggaaggccggaggacgtctgtgccgagccctgagcagccgcagccgtatcggacactcagggagtcagacagcgcggaaggcgacgaggcagagagtccagagcagcaagtgcggaagtccacaggccctgtcccagctccccctgaccgggctgccagcatcgaccttctggaagacgtcttcagcaacctggacatggaggccgcactgcagccactgggccaggccaagagcttagaggaccttcgtgcccccaaagacctgagggagcagccagggacctttgactatcagaggctggatctgggcgggagtgagaggagccgcggggtgacagtggccttgaagcttacccacccgtacaacaagctctggagcctgggccaggacgacatggccatccccagcaagcccccagctgcctcccctgagaagccctcagccctgctcggaaactccctggccctgcctcgaaggccccagaaccgggacagcatcctgaaccccagtgacaaggaggaggtgcccacccctactctgggcagcatcaccatcccccggccccaaggcaggaagaccccagagctgggcatcgtgcctccaccgcccattccccgcccggccaagctccaggctgccggcgccgcacttggtgacgtctcagagcggctgcagacggatcgggacaggcgagctgccctgagtccagggctcctgcctggtgttgtcccccaaggccccactgaactgctccagccgctcagccctggccccggggctgcaggcacgagcagtgacgccctgctcgccctcctggacccgctcagcacagcctggtcaggcagcaccctcccgtcacgccccgccaccccgaatgtagccaccccattcaccccccaattcagcttcccccctgcagggacacccaccccattcccacagccaccactcaacccctttgtcccatccatgccagcagccccacccaccctgcccctggtctccacaccagccgggcctttcggggcccctccagcttccctggggccggcttttgcgtccggcctcctgctgtccagtgctggcttctgtgcccctcacaggtctcagcccaacctctccgccctctccatgcccaacctctttggccagatgcccatgggcacccacacgagccccctacagccgctgggtcccccagcagttgccccgtcgaggatccgaacgttgcccctggcccgctcaagtgccagggctgctgagaccaagcaggggctggccctgaggcctggagaccccccgcttctgcctcccaggccccctcaaggcctggagccaacactgcagccctctgctcctcaacaggccagagacccctttgaggatttgttacagaaaaccaagcaagacgtgagcccgagtccggccctggccccggccccagactcggtggagcagctcaggaagcagtgggagaccttcgagtgagccgggccctgagggtgggggatgcaccgaggcccgagggtccgtccactgctgcggttccgaggctcccccgccactctctctctgcccaggttctgctggtgggaagggatgggacccctctctgctgccccctcctcccctccacactgcccatctctgatgtctggccctggggaatggcaccagttccagcctgggaatcaacccagttcctgagtgcccatcccaccccgcggttgcctctcctcggcacccttgattgggttttgcactaaagaggtcagctgggccaatgatattgctccagaccgagtcctacccaccttcccccggaagtgtcccaagaggctccgaaggcctcccctccgagcccagctctcctgtctcctccacagccaggccctgcacgcccacctcctcggacacaggtgacagggttaccctccagtttgagctcatctgcacgagacacaggtagcttggggttgaagttaggactcctcctgggctggaggatttacctggtggggcacttccagactgtttctagcaatatacacacacgttctttcctgtgtcttcaccccaaaacttcagttgattctgacctgggaggatctggggaccagggggtcttgggctgccttgtgatacacagccccagccaccctgcacgggggctgcgagcaccagcaactttgatttatagaaggaaaatggaaacccccatctgagtattttgggaggagcccccagccctcatccagctctggcacgctgatacctccaggtactcccctcactgtcaaagctggggctcagcctcttgtcatctggagctttgtgggcaaagctgagaagctgcaacccagatttcaacccaaaaaggtcaagctgaatgcctcagactgatgtggaaggcagctggccttcctgggttggaacgaggcagtggccctgagccccttctccagggccaggtagaaaggacaaacttggtctctgcctcggggaagcaggaggagggctagaagccagtccctccccacctgcccagagctccaggccagcacagaaattcctgaggccaacgtcaccaaagttagattgaatgtttattatctttctttttcctttttaccttattgatttgatgaatcttgaaatggattcatttccataaaccaagttaaagtatggcccgaccatttaagaaaacaaccatctgagacacgcaggaaattgtgagcatttcgacccgagctctcatttcctatttgtgaagggtcagacacagtctacccaggggtgtctgggggacaagggggtctctggagatgtcacccagggagccccctctatgtctgagaggctgccactgctgcacatgctcagtgaggcttggcggccatcctggcacatggctcttcctgggtcaaccgtgacctgtctggctcaggaatgggctctggctgctgggggagccgtgtcactcctgggccatgggggcacctcctgggcacttaggtgtttcagcatagattccagtttcgcaccctgggcagacccccaggccccatccgggatagggcagaggaggtgctggcggccccagggaaggagggtgtgtaccccaaggccccctggctgtgctgaggggctggggtgagcgctccatgttcacatgagcactgctgcctcttcacttgtgggactttttgcaaacccaaggatgaactttgtgtgcattcaataaaatcatcttggggaagagg

SEQ ID NO: 126220 - DNA, 1380 bp, Homo sapiens
  Payload ID: 4752
  Gene Symbol: DENND1A
  Gene Name: DENN/MADD domain containing 1A
  ENST ID: ENST00000394215
  CDS Start-End: 1-1380
agctatctcccctggttcgaggtattttataagctgcttaacatcctggcagattacacgacaaaaagacaggaaaatcagtggaatgagcttcttgaaactctgcacaaacttcccatccctgacccaggagtgtctgtccatctcagcgtgcattcttattttactgtgcctgataccagagaacttcccagcatacctgagaatagaaatctgacagaatattttgtggctgtggatgttaacaacatgttgcatctgtacgccagtatgctgtacgaacgccggatactcatcatttgcagcaaactcagcactctgactgcctgcatccacgggtctgcggcgatgctctaccccatgtactggcagcacgtgtacatccccgtgctgccgccgcatctgctggactactgctgtgctcccatgccctacctcataggaatccatttaagtttaatggagaaagtcagaaacatggccctggatgatgtcgtgatcctgaatgtggacaccaacaccctggaaacccccttcgatgacctccagagcctcccaaacgacgtgatctcttccctgaagaacaggctgaaaaaggtctccacaaccactggggatggtgtggccagagcgttcctcaaggcccaggctgctttcttcggtagctaccgaaacgctctgaaaatcgagccggaggagccgatcactttctgtgaggaagccttcgtgtcccactaccgctccggagccatgaggcagttcctgcagaacgccacacagctgcagctcttcaagcagtttattgatggtcgattagatcttctcaattccggcgaaggtttcagtgatgtttttgaagaggaaatcaacatgggcgagtacgctggcagtgacaaactgtaccatcagtggctctccactgtccggaaaggaagtggagcaattctgaatactgtaaagaccaaagcaaatccggccatgaagactgtctacaagttcgcaaaagatcatgcaaaaatgggaataaaagaggtgaaaaaccgcttgaagcaaaaggacattgccgagaatggctgcgcccccaccccagaagagcagctgccaaagactgcaccgtccccactggtggaggccaaggaccccaagctccgagaagaccggcggccaatcacagtccactttggacaggtgcgcccacctcgtccacatgttgttaagagaccaaagagcaacatcgcagtggaaggccggaggacgtctgtgccgagccctgagcaaaacaccattgcaacaccagctacactccacatcctacagaaaagcattacccattttgcggccaagttcccgacgagaggctggacctcttcatcacattga

SEQ ID NO: 126221 - DNA, 4508 bp, Homo sapiens
  Payload ID: 4752
  Gene Symbol: DENND1A
  Gene Name: DENN/MADD domain containing 1A
  ENST ID: ENST00000394219
  CDS Start-End: 1-2730
agctatctcccctggttcgaggtattttataagctgcttaacatcctggcagattacacgacaaaaagacaggaaaatcagtggaatgagcttcttgaaactctgcacaaacttcccatccctgacccaggagtgtctgtccatctcagcgtgcattcttattttactgtgcctgataccagagaacttcccagcatacctgagaatagaaatctgacagaatattttgtggctgtggatgttaacaacatgttgcatctgtacgccagtatgctgtacgaacgccggatactcatcatttgcagcaaactcagcactctgactgcctgcatccacgggtctgcggcgatgctctaccccatgtactggcagcacgtgtacatccccgtgctgccgccgcatctgctggactactgctgtgctcccatgccctacctcataggaatccatttaagtttaatggagaaagtcagaaacatggccctggatgatgtcgtgatcctgaatgtggacaccaacaccctggaaacccccttcgatgacctccagagcctcccaaacgacgtgatctcttccctgaagaacaggctgaaaaaggtctccacaaccactggggatggtgtggccagagcgttcctcaaggcccaggctgctttcttcggtagctaccgaaacgctctgaaaatcgagccggaggagccgatcactttctgtgaggaagccttcgtgtcccactaccgctccggagccatgaggcagttcctgcagaacgccacacagctgcagctcttcaagcagtttattgatggtcgattagatcttctcaattccggcgaaggtttcagtgatgtttttgaagaggaaatcaacatgggcgagtacgctggcagtgacaaactgtaccatcagtggctctccactgtccggaaaggaagtggagcaattctgaatactgtaaagaccaaagcaaatccggccatgaagactgtctacaagttcgcaaaagatcatgcaaaaatgggaataaaagaggtgaaaaaccgcttgaagcaaaaggacattgccgagaatggctgcgcccccaccccagaagagcagctgccaaagactgcaccgtccccactggtggaggccaaggaccccaagctccgagaagaccggcggccaatcacagtccactttggacaggtgcgcccacctcgtccacatgttgttaagagaccaaagagcaacatcgcagtggaaggccggaggacgtctgtgccgagccctgagcagccgcagccgtatcggacactcagggagtcagacagcgcggaaggcgacgaggcagagagtccagagcagcaagtgcggaagtccacaggccctgtcccagctccccctgaccgggctgccagcatcgaccttctggaagacgtcttcagcaacctggacatggaggccgcactgcagccactgggccaggccaagagcttagaggaccttcgtgcccccaaagacctgagggagcagccagggacctttgactatcagaggctggatctgggcgggagtgagaggagccgcggggtgacagtggccttgaagcttacccacccgtacaacaagctctggagcctgggccaggacgacatggccatccccagcaagcccccagctgcctcccctgagaagccctcagccctgctcggaaactccctggccctgcctcgaaggccccagaaccgggacagcatcctgaaccccagtgacaaggaggaggtgcccacccctactctgggcagcatcaccatcccccggccccaaggcaggaagaccccagagctgggcatcgtgcctccaccgcccattccccgcccggccaagctccaggctgccggcgccgcacttggtgacgtctcagagcggctgcagacggatcgggacaggcgagctgccctgagtccagggctcctgcctggtgttgtcccccaaggccccactgaactgctccagccgctcagccctggccccggggctgcaggcacgagcagtgacgccctgctcgccctcctggacccgctcagcacagcctggtcaggcagcaccctcccgtcacgccccgccaccccgaatgtagccaccccattcaccccccaattcagcttcccccctgcagggacacccaccccattcccacagccaccactcaacccctttgtcccatccatgccagcagccccacccaccctgcccctggtctccacaccagccgggcctttcggggcccctccagcttccctggggccggcttttgcgtccggcctcctgctgtccagtgctggcttctgtgcccctcacaggtctcagcccaacctctccgccctctccatgcccaacctctttggccagatgcccatgggcacccacacgagccccctacagccgctgggtcccccagcagttgccccgtcgaggatccgaacgttgcccctggcccgctcaagtgccagggctgctgagaccaagcaggggctggccctgaggcctggagaccccccgcttctgcctcccaggccccctcaaggcctggagccaacactgcagccctctgctcctcaacaggccagagacccctttgaggatttgttacagaaaaccaagcaagacgtgagcccgagtccggccctggccccggccccagactcggtggagcagctcaggaagcagtgggagaccttcgagtgagccgggccctgagggtgggggatgcaccgaggcccgagggtccgtccactgctgcggttccgaggctcccccgccactctctctctgcccaggttctgctggtgggaagggatgggacccctctctgctgccccctcctcccctccacactgcccatctctgatgtctggccctggggaatggcaccagttccagcctgggaatcaacccagttcctgagtgcccatcccaccccgcggttgcctctcctcggcacccttgattgggttttgcactaaagaggtcagctgggccaatgatattgctccagaccgagtcctacccaccttcccccggaagtgtcccaagaggctccgaaggcctcccctccgagcccagctctcctgtctcctccacagccaggccctgcacgcccacctcctcggacacaggtgacagggttaccctccagtttgagctcatctgcacgagacacaggtagcttggggttgaagttaggactcctcctgggctggaggatttacctggtggggcacttccagactgtttctagcaatatacacacacgttctttcctgtgtcttcaccccaaaacttcagttgattctgacctgggaggatctggggaccagggggtcttgggctgccttgtgatacacagccccagccaccctgcacgggggctgcgagcaccagcaactttgatttatagaaggaaaatggaaacccccatctgagtattttgggaggagcccccagccctcatccagctctggcacgctgatacctccaggtactcccctcactgtcaaagctggggctcagcctcttgtcatctggagctttgtgggcaaagctgagaagctgcaacccagatttcaacccaaaaaggtcaagctgaatgcctcagactgatgtggaaggcagctggccttcctgggttggaacgaggcagtggccctgagccccttctccagggccaggtagaaaggacaaacttggtctctgcctcggggaagcaggaggagggctagaagccagtccctccccacctgcccagagctccaggccagcacagaaattcctgaggccaacgtcaccaaagttagattgaatgtttattatctttctttttcctttttaccttattgatttgatgaatcttgaaatggattcatttccataaaccaagttaaagtatggcccgaccatttaagaaaacaaccatctgagacacgcaggaaattgtgagcatttcgacccgagctctcatttcctatttgtgaagggtcagacacagtctacccaggggtgtctgggggacaagggggtctctggagatgtcacccagggagccccctctatgtctgagaggctgccactgctgcacatgctcagtgaggcttggcggccatcctggcacatggctcttcctgggtcaaccgtgacctgtctggctcaggaatgggctctggctgctgggggagccgtgtcactcctgggccatgggggcacctcctgggcacttaggtgtttcagcatagattccagtttcgcaccctgggcagacccccaggccccatccgggatagggcagaggaggtgctggcggccccagggaaggagggtgtgtaccccaaggccccctggctgtgctgaggggctggggtgagcgctccatgttcacatgagcactgctgcctcttcacttgtgggactttttgcaaacccaaggatgaactttgtgtgcattcaataaaatcatcttggggaagagg

SEQ ID NO: 126222 - DNA, 2195 bp, Homo sapiens
  Payload ID: 4753
  Gene Symbol: DENND1B
  Gene Name: DENN/MADD domain containing 1B
  Uniprot ID: Q6P3S1
  ENST ID: ENST00000235453
  CDS Start-End: 279-1469
gggggccggacggacagccccacaccgacatgtaaccatggactgcaggaccaaggcaaatccagacagaacctttgacttggtgttgaaagtgaaatgtcatgcctctgaaaatgaagaggacagtccagcttatctgccgaggattccccctggaaaagtacgccgattcgcattttgcattaagaaactggaaaactttcctgtcggtcctggcgtagcgcctcccgtgtccggggtagaccttgtaccggctgaaaccgcatagctcgaccttcatggcggcagctccacgggaggagaaaagatggccccaacctgtattttcgaatcctgtggtattgtggaaattcccagaggactttggagaccaggaaatactacagagtgtgccaaagttctgttttccctttgacgttgaaagggtgtctcagaatcaagttggacagcactttacctttgtactgacagacattgaaagtaaacagagatttggattctgcagactgacgtcaggaggcacaatttgtttatgcatccttagttaccttccctggtttgaagtgtattacaagcttctaaatactcttgcagattacttggctaaggaactggaaaatgatttgaatgaaactctcagatcactgtataaccacccagtaccaaaggcaaatactcctgtaaatttgagtgtgcattcctacttcattgcccctgatgtaactggactcccaacaatacccgagagtagaaatcttacagaatattttgttgccgtggatgtgaacaacatgctgcagctgtatgccagtatgctgcatgaaaggcgcatcgtgattatctcgagcaaattaagcactttaactgcctgtatccatggatcagctgctcttctatacccaatgtattggcaacacatatacatcccagtgcttcctccacacctgctggactactgctgtgccccaatgccatacctgattggaatacactccagcctcatagagagagtgaaaaacaaatcattggaagatgttgttatgttaaatgttgatacaaacacattagaatcaccatttagtgacttgaacaacctaccaagtgatgtggtctcggccttgaaaaataaactgaagaagcagtctacagctacgggtgatggagtagctagggcctttcttagagcacaggctgctttgtttggatcctacagagatgcactgagatacaaacctggtgagcccatcactttctgtgaggagagttttgtaaagcaccgctcaagcgtgatgaaacagttcctggaaactgccattaacctccagctttttaagcagtttatcgatggtcgactggcaaaactaaatgcaggaaggggtttctctgatgtatttgaagaagagatcacttcaggtggcttttgtggaggtaaagacaagttacaatatgattatccattttctcaataacaattttcttggtctttgcacttgtgtctgataaaacctatttcataaacaactaatgatttcctcctaaatatgtaatgtcttaaatacatttttcatcttataaaagctatggaattagcttattttgcctgatacctgttactcaaggcattaagttggcctcctgaattggcagctgttggcctcgataatctcttaatattgctggaaattagtaatacagaaatccaatcaactcatatcttcctgtctttccttctgaatagtagtattctctgctagaaaactactagtgatggttattactgagtatgaatttaagaactgaggttatgattggtaatacaatccaaaaagaagggtctgaacaccaaaattctttatacatatttaagtaactgtattattattatacagatgtctttacctttttgactttatagatcactgcagcattaagaaagtttccagtttaccattccataagtacaattaatccttctagtgtaaatgttcaaatactgttataattatctaggcaattaataatttacaaactgatatttttgcacgattgtagtggtgtatagtcttgacttgcagagcattttgcttgagtccttgaaatgtcgtgttcattcattatttgctgagtgcttacaatgtattaggcactgttctaaatattaagtgtactaaataaacaaaaatccttgtattctg

SEQ ID NO: 126223 - DNA, 3043 bp, Homo sapiens
  Payload ID: 4753
  Gene Symbol: DENND1B
  Gene Name: DENN/MADD domain containing 1B
  ENST ID: ENST00000294737
  CDS Start-End: 153-1211
atgggcccgccgccacggctgctgtgagcagcctctttccctgtgtggccgccggcgtgggcggggacggcgcgaccctcgcgcggccgggctgcgggcttccaggccagcgcgcgggggccggacggacagccccacaccgacatgtaaccatggactgcaggaccaaggcaaatccagacagaacctttgacttggtgttgaaagtgaaatgtcatgcctctgaaaatgaagatcctgtggtattgtggaaattcccagaggactttggagaccaggaaatactacagagtgtgccaaagttctgttttccctttgacgttgaaagggtgtctcagaatcaagttggacagcactttacctttgtactgacagacattgaaagtaaacagagatttggattctgcagactgacgtcaggaggcacaatttgtttatgcatccttagttaccttccctggtttgaagtgtattacaagcttctaaatactcttgcagattacttggctaaggaactggaaaatgatttgaatgaaactctcagatcactgtataaccacccagtaccaaaggcaaatactcctgtaaatttgagtgtgcattcctacttcattgcccctgatgtaactggactcccaacaatacccgagagtagaaatcttacagaatattttgttgccgtggatgtgaacaacatgctgcagctgtatgccagtatgctgcatgaaaggcgcatcgtgattatctcgagcaaattaagcactttaactgcctgtatccatggatcagctgctcttctatacccaatgtattggcaacacatatacatcccagtgcttcctccacacctgctggactactgctgtgccccaatgccatacctgattggaatacactccagcctcatagagagagtgaaaaacaaatcattggaagatgttgttatgttaaatgttgatacaaacacattagaatcaccatttagtgacttgaacaacctaccaagtgatgtggtctcggccttgaaaaataaactgaagaagcagtctacagctacgggtgatggagtagctagggcctttcttagagcacaggctgctttgtttggatcctacagagatgcactgagatacaaacctggaacccgaggtcatatcaacaatgggtgcatacagtcaagaaaggaggtgcactgttcaacacagcaatgaccaaagcaacccctgctgtacggacagcatataaatttgcaaaaaatcatgcaaagctgggactaaaggaagtgaagagtaaactaaaacacaaggaaaatgaagaagattatgggacctgttctagttctgtacaatatacaccagtttacaaattacacaatgaaaagggaggaaactcagaaaagcgtaagcttgctcaggcacgcttaaaaaggcctcttaagagccttgatggtgctctatatgatgatgaagatgatgatgacattgaaagagcaagcaagttatcttctgaagatggtgaagaagcttctgcttatctctatgagagtgatgactctgttgaaacaagagtgaagactccttactcaggtgaaatggacttactaggagagattcttgatacattgagcacacacagctcagatcaggggaagctggcagctgcaaagagcttggatttctttagatcaatggatgacattgattacaaacctacgaataaatctaatgctcctagtgagaataacctggctttcctctgtggtggttctggtgaccaagcagagtggaatcttgggcaagacgatagtgccctccatggcaaacacctccctccatctcctaggaagcgggtttcctctagtggtttgacagattctctgtttatcctgaaagaggaaaacagtaacaagcacctcggtgctgacaatgtgagtgaccctacttcaggactggatttccaactcacttcccctgaagtttcccagactgataaaggaaaaacagaaaagagggaaacactaagccagatttcagatgatctgcttatacccggtcttgggcggcattcatcgacttttgttccttgggagaaagaagggaaagaagccaaagagacttcagaagatattggactgctccatgaagtagtgtcattatgtcatatgacatctgacttccaacaaagcttgaacatttcagacaaaaacacaaatggaaaccaaacttaaatcttgcatccaagcttctatggagacattttgagattcaatgcaatctgtataataaacagaattatttgtaggaatggcaactcatactatttaaatttttttttgcatttgcaacatttttctcacttgttcatttcgaggatatatgaaatgcattgatttttaaatataaagcgaattctactgtgcttttaaatcaggtactagtgtgtatgtatgtttaaagtatgtattgaccatgagatttcccagtgtttggtgcttaatgccgtttattttatttaagctaagaatgcatatgtaacccatgcacataaccagtagctactatactaatctggttgagcatgaactgatcaagatatcaaaacttatcaaaactagcctgaagctgatgaaactgttaacccactaattgccttaatcttaaagctgttttttaagcatacttaaataatgtatgaaagtatgtataaagtttgaaggataagttattagtgttctgcagagcaataatgcctttttctattcatcaaatcaaggtcaaaattcatcttttcaagattaaaaagctctcttaatggaaatatttaatttgcttatataaagcactatagccatgttttccaaaaagtataaaaatatacacttacctttcattcagtgaaatataggaagtgctgaattacaatgtgaagttaatgacttctgtttacaaatgagacactctaacgagttttcagtctctctgtatgcctttgctatttaggggtccaccccaagaaagccaaatacaacataaaccgtcctgac

SEQ ID NO: 126224 - DNA, 2177 bp, Homo sapiens
  Payload ID: 4753
  Gene Symbol: DENND1B
  Gene Name: DENN/MADD domain containing 1B
  Uniprot ID: Q6P3S1
  ENST ID: ENST00000367396
  CDS Start-End: 171-1451
gccgggggcgcagccgacatgggcccgccgccacggctgctgtgagcagcctctttccctgtgtggccgccggcgtgggcggggacggcgcgaccctcgcgcggccgggctgcgggcttccaggccagcgcgcgggggccggacggacagccccacaccgacatgtaaccatggactgcaggaccaaggcaaatccagacagaacctttgacttggtgttgaaagtgaaatgtcatgcctctgaaaatgaagatcctgtggtattgtggaaattcccagaggactttggagaccaggaaatactacagagtgtgccaaagttctgttttccctttgacgttgaaagggtgtctcagaatcaagttggacagcactttacctttgtactgacagacattgaaagtaaacagagatttggattctgcagactgacgtcaggaggcacaatttgtttatgcatccttagttaccttccctggtttgaagtgtattacaagcttctaaatactcttgcagattacttggctaaggaactggaaaatgatttgaatgaaactctcagatcactgtataaccacccagtaccaaaggcaaatactcctgtaaatttgagtgtgaaccaagagatatttattgcctgtgagcaagttctgaaagatcagcctgctctagtaccgcattcctacttcattgcccctgatgtaactggactcccaacaatacccgagagtagaaatcttacagaatattttgttgccgtggatgtgaacaacatgctgcagctgtatgccagtatgctgcatgaaaggcgcatcgtgattatctcgagcaaattaagcactttaactgcctgtatccatggatcagctgctcttctatacccaatgtattggcaacacatatacatcccagtgcttcctccacacctgctggactactgctgtgccccaatgccatacctgattggaatacactccagcctcatagagagagtgaaaaacaaatcattggaagatgttgttatgttaaatgttgatacaaacacattagaatcaccatttagtgacttgaacaacctaccaagtgatgtggtctcggccttgaaaaataaactgaagaagcagtctacagctacgggtgatggagtagctagggcctttcttagagcacaggctgctttgtttggatcctacagagatgcactgagatacaaacctggtgagcccatcactttctgtgaggagagttttgtaaagcaccgctcaagcgtgatgaaacagttcctggaaactgccattaacctccagctttttaagcagtttatcgatggtcgactggcaaaactaaatgcaggaaggggtttctctgatgtatttgaagaagagatcacttcaggtggcttttgtggaggtaaagacaagttacaatatgattatccattttctcaataacaattttcttggtctttgcacttgtgtctgataaaacctatttcataaacaactaatgatttcctcctaaatatgtaatgtcttaaatacatttttcatcttataaaagctatggaattagcttattttgcctgatacctgttactcaaggcattaagttggcctcctgaattggcagctgttggcctcgataatctcttaatattgctggaaattagtaatacagaaatccaatcaactcatatcttcctgtctttccttctgaatagtagtattctctgctagaaaactactagtgatggttattactgagtatgaatttaagaactgaggttatgattggtaatacaatccaaaaagaagggtctgaacaccaaaattctttatacatatttaagtaactgtattattattatacagatgtctttacctttttgactttatagatcactgcagcattaagaaagtttccagtttaccattccataagtacaattaatccttctagtgtaaatgttcaaatactgttataattatctaggcaattaataatttacaaactgatatttttgcacgattgtagtggtgtatagtcttgacttgcagagcattttgcttgagtccttgaaatgtcgtgttcattcattatttgctgagtgcttacaatgtattaggcactgttctaaatattaagtgtactaaataaacaaaaatccttgtattctg

SEQ ID NO: 126225 - DNA, 6960 bp, Homo sapiens
  Payload ID: 4753
  Gene Symbol: DENND1B
  Gene Name: DENN/MADD domain containing 1B
  ENST ID: ENST00000391979
  CDS Start-End: 1-1248
gtaaagcaccgctcaagcgtgatgaaacagttcctggaaactgccattaacctccagctttttaagcagtttatcgatggtcgactggcaaaactaaatgcaggaaggggtttctctgatgtatttgaagaagagatcacttcaggtggcttttgtggagggaacccgaggtcatatcaacaatgggtgcatacagtcaagaaaggaggtgcactgttcaacacagcaatgaccaaagcaacccctgctgtacggacagcatataaatttgcaaaaaatcatgcaaagctgggactaaaggaagtgaagagtaaactaaaacacaaggaaaatgaagaagattatgggacctgttctagttctgtacaatatacaccagtttacaaattacacaatgaaaagggaggaaactcagaaaagcgtaagcttgctcaggcacgcttaaaaaggcctcttaagagccttgatggtgctctatatgatgatgaagatgatgatgacattgaaagagcaagcaagttatcttctgaagatggtgaagaagcttctgcttatctctatgagagtgatgactctgttgaaacaagagtgaagactccttactcaggtgaaatggacttactaggagagattcttgatacattgagcacacacagctcagatcaggggaagctggcagctgcaaagagcttggatttctttagatcaatggatgacattgattacaaacctacgaataaatctaatgctcctagtgagaataacctggctttcctctgtggtggttctggtgaccaagcagagtggaatcttgggcaagacgatagtgccctccatggcaaacacctccctccatctcctaggaagcgggtttcctctagtggtttgacagattctctgtttatcctgaaagaggaaaacagtaacaagcacctcggtgctgacaatgtgagtgaccctacttcaggactggatttccaactcacttcccctgaagtttcccagactgataaaggaaaaacagaaaagagggaaacactaagccagatttcagatgatctgcttatacccggtcttgggcggcattcatcgacttttgttccttgggagaaagaagggaaagaagccaaagagacttcagaagatattggactgctccatgaagtagtgtcattatgtcatatgacatctgacttccaacaaagcttgaacatttcagacaaaaacacaaatggaaaccaaacttaaatcttgcatccaagcttctatggagacattttgagattcaatgcaatctgtataataaacagaattatttgtaggaatggcaactcatactatttaaatttttttttgcatttgcaacatttttctcacttgttcatttcgaggatatatgaaatgcattgatttttaaatataaagcgaattctactgtgcttttaaatcaggtactagtgtgtatgtatgtttaaagtatgtattgaccatgagatttcccagtgtttggtgcttaatgccgtttattttatttaagctaagaatgcatatgtaacccatgcacataaccagtagctactatactaatctggttgagcatgaactgatcaagatatcaaaacttatcaaaactagcctgaagctgatgaaactgttaacccactaattgccttaatcttaaagctgttttttaagcatacttaaataatgtatgaaagtatgtataaagtttgaaggataagttattagtgttctgcagagcaataatgcctttttctattcatcaaatcaaggtcaaaattcatcttttcaagattaaaaagctctcttaatggaaatatttaatttgcttatataaagcactatagccatgttttccaaaaagtataaaaatatacacttacctttcattcagtgaaatataggaagtgctgaattacaatgtgaagttaatgacttctgtttacaaatgagacactctaacgagttttcagtctctctgtatgcctttgctatttaggggtccaccccaagaaagccaaatacaacataaaccgtcctgacaaaaaaaaaaaaaaaaatctttttttaactaataattctctatcaaaatgcttcatatcatcatctcaaatttactttttaaaataattgactttgtattttagaagttttagatttacagaaaaattgcaaagatagtacagagagttcccatctacccctgttactaacatcttacgttactatggtacatctgccccaattagtgaaccaatattgatattccatactttattcagattttcttagttttctcctaatatccattttccacatcaagatcctattcagaataccacactatattgagttggaatgtctccttaggctcctcttgcctgtgacagtttcttagactttccttatttttgatgacattgacagctttgaagagtactgtcagataaattgtagcatgctcctctcttggagtttgttgggtatttttttcatgattagactgggattgtgggttttgaggagatgatcacagaagtaaagtgccattttcatcaggtcatatcaagggtacgtactgtcaacatgatttgtgaatgctgacagggaccttgataacctggctgaggtagcgtttgtcactctaaagttcttcctgccctttccatgctgtcatttttggaaggaagtcactacatgcaggagtgaggagtcataattccccttctttagggcagagaagtatctacataaataactgggaattctgtatagaaaatttgtttcttctttctcaaattcactgttgagctttggaattcatctgagaaggaatcatgtactaattacttcatgatagactagattaccaggcacaatcagggaaaaaagcagtgatagtatggttaaattgttattagcattttcagtatatccactttatacatccccaatcatgattttttttacatttctttttagaaaagatgttcaagaaatcattaaagaaccccaataagactatattctaaatatttattgaaagaatataatttcagctaaaatcctagaagagggtttgaaataatttaaagaaaatgaccaagtttttttaaaacctacgtttcaaaatctaaatggatatgtgttatttgggacacttattcattatgattatataagaagacaattcttgtttcccttataagtatggactgtatacattaaggaaaacaatgtttaatccttattttttaatacagaagtctcaaggttcttgtcaaattttgcctttataagcttattacaaaattacaacttactttactgaagtttataatggaagaagtccatatagcaaaagagctgttttaaatcagaaggaaaaaaggttactctggttgttaatctgcttggcaaatattccttcataatttgtgaaaagaatgcaaatcagcattttaatatgaattttgaaatgaggtatggttttttgtttgtttttttcagaactcagtctgaaaaacaactgtgagtgtagcatgggtcaaatttggtttttagtccatttgctttatcaacatcacggcttcagaaatccaaattttgttctacttttcagccacctttcaaggtgtttggttataatactgtgttgctttgaggatatttagccactcataaataattgtctcaaggtatttaaaagtgatttgtgccttattttaatgcaaaattagcagttttattctattttaaaaacaaaggcagaaaaacaattctgcatgttattctttaaaaacatccagaataatactaccaagtatttgtatttcaaaccagtaaaattttgaatattcaaagtctgctcttaaacttagacttcctagtattatggtggttatagtgagaatgaaattaaactgggtgagttccgaaataaaggaaagtgttatattctacagtgcccatattttctatggtaactaaatcaaatatttgtaagttcctctgctttttgaaattatttttcaaagaagcaacacctgttatacaacagaattgtataaactaaaaagacttttggccttggtacatagtctttatctggcctgcaatggagtcatggttctttctgaatcccactctcacttttttctttttacccttagatattgcatccgtggtatttcaggggtatagagaaataatattggaatttaggagctatttttttaagtgaaaatattactaagtggtatcttttgatgattacctactttaatgtgtcttagaaaagcaccaaaacatagcatgattattttttcagttaattaaaattagttaataacatgttcatttaaaaactattcattgactttttgtaccagtcatatgcagggtacagtaactgaggatatgggaaataaaataactgacatagtccctgctctgaaggaacaaaggaaaaggaattgcaaatttttattaaaataataataataataataataataataataataataataataatgtgttttgcctggaagttattagctgagattctaacacacaaaaagttcaaaaaaaaagaacaaaaactggctgcttaatttaaagcatgctctaagtatgaaccatagtatcatttctaatttcattaactttctcaattattatgctaagtatattatgctgctaagatacccacatttaaggggcagatttagagactcttttagaaactgagtgtctttatcttattatcagataaccaggctgcacagggctctctataatggaatgatgctccttttcaatacttagagccactgtactcagtttaggagtaactgaaggtgtggatgcatgttaatgggaatccaatttttactatttttatatgaataacagcgttctgtagaaacagtctctcccttctaaataaaaactatgtgactgctgttactagtgctattctatgcgaatatcctaataataggattcaggaattctaatgaattgtttcttaattaaggtgaacaagtagactcctgatcaagaggagaacactgtgaatgtctcataatcaatagaccttcattctcttgtagaaaatgtggattttcaggaaaagactgattattttcatgaataaattttcttatacaaattccattttgtttgacataaaagaccctgaatcttaagatatttgtaaatcagaatatttaagaatgtaaaatgaatccccaaatctagtttcctccaaagcacttcttaatgtaggaaatagtttttacaaaccctatgtcagtactaatgttcctgggtcaaacccagtaatattgttagtgtatgttgttacaccttatttaagaggcagagtggttttgagcaagtcagttaacgtgatttgatgaagaaataaggaattatatacatttagacagaagaatattttattttgaaaataggatttcgtgcaataatttttcttgcataacttagttcatataaatatgtacatctgtttttctggcagatgccttaaggtcatgtttttcagtatttgagtaaatctgtatgtagcaatgttctcattgatttcagaaaaaaatatattctttatattgttgccaggagaaatgtttttgtttatttaaaattattatggatattgtgttgttgtatcataactaactgcctcagcaacaataaatatgcaataagaaaatcctgtaccttagattagattgacaatactgttactttaaaagaaatatatacggtacaaattgctgattctacatgtgtacatttaacagatactcagttctgcaccacctaaatcaaaatggcatttgtatgctgatgattacatatgtggattgtagtatcctttgtgatgaatctttgataagatttataaagggcattgccaatactttttgactgtgtaaattaattttttgtatgatgtacagtttgtttaatcttagagcttctatagatttctactttattatacttgaatgaggcagaaaagcactgtggaaaatctgtagctctggatgcaacatgcagacataccaaaaaaataataataaagcaaggtactgaagagcaatgttaacagaatgctttatatccagaatgctatgtttttttcaagccacattttagttgaatgaagtaaagttattcaatcttttattttaaaatattggaaagtcacaaatgattacttctttgatatgatgaacctataagtctattcatctctgttatttcatttctcaaatgtgagccttgttgaggtccattatcaaatctacactttggttgattatatgatgtttaggacaaggcagaatttaaaacctgcatgtttagtgcatcacatgtcaagtcaccatccttctgacagtgtaacttccataacgttattttgagagccatttaataatcatatttgaaaaagtggatttcttgagtctgttgtagtttagtacttacagcagtgcctaaaacagcaactaatatgaactgcctgagtcctacaacataaatgcataaagcttttttatgtaaaagccacaggaggggttcaaaattgaacttttccaaagtttatttctcttgcgttagatgaaaaactatttaaaaggactgaaaaccctgagctttttgctcgtcttggtagcagatatctgtaaaaacctacccagaattgtgattttacttcattgttcttgcatccttgaggctacagtataaatcatctccaaacttgactactattgggaagatgtgtataaaagcatcgctttgggaatttttttaaaaatatgcaaaaataaatattgaataaaatctacattaccataaaacacccaaaaatgcagttctaaaataaaattggtcacaattaaa

SEQ ID NO: 126226 - DNA, 583 bp, Homo sapiens
  Payload ID: 4753
  Gene Symbol: DENND1B
  Gene Name: DENN/MADD domain containing 1B
  ENST ID: ENST00000422998
  CDS Start-End: 142-583
actagcgctccccctgcaccctctggccgcccgggcgcggggacctggcccccgcctcctccacagtctccgacttgcgagccgcacggcccagggcaaatccagacagaacctttgacttggtgttgaaagtgaaatgtcatgcctctgaaaatgaaggaaatactacagagtgtgccaaagttctgttttccctttgacgttgaaagggtgtctcagaatcaagttggacagcactttacctttgtactgacagacattgaaagtaaacagagatttggattctgcagactgacgtcaggaggcacaatttgtttatgcatccttagttaccttccctggtttgaagtgtattacaagcttctaaatactcttgcagattacttggctaaggaactggaaaatgatttgaatgaaactctcagatcactgtataaccacccagtaccaaaggcaaatactcctgtaaatttgagtgtgcattcctacttcattgcccctgatgtaactggactcccaacaatacccgagagtagaaatcttacagaatattttgttgccgtggatgtgaacaacatgctgc

SEQ ID NO: 126227 - DNA, 8375 bp, Homo sapiens
  Payload ID: 4753
  Gene Symbol: DENND1B
  Gene Name: DENN/MADD domain containing 1B
  Uniprot ID: Q6P3S1
  ENST ID: ENST00000620048
  CDS Start-End: 339-2666
gacttcctgatttgcaagaaggtgcaggagccgcagcgggcggccccggtcgcaggaactgagaggcctcagctttggtggcggctaccggcggagacgggggcggcggccacgccaccgctgctgtcacagaaaggctctggtgggtggggtgggaggcggggaagtgccgggggcgcagccgacatgggcccgccgccacggctgctgtgagcagcctctttccctgtgtggccgccggcgtgggcggggacggcgcgaccctcgcgcggccgggctgcgggcttccaggccagcgcgcgggggccggacggacagccccacaccgacatgtaaccatggactgcaggaccaaggcaaatccagacagaacctttgacttggtgttgaaagtgaaatgtcatgcctctgaaaatgaagatcctgtggtattgtggaaattcccagaggactttggagaccaggaaatactacagagtgtgccaaagttctgttttccctttgacgttgaaagggtgtctcagaatcaagttggacagcactttacctttgtactgacagacattgaaagtaaacagagatttggattctgcagactgacgtcaggaggcacaatttgtttatgcatccttagttaccttccctggtttgaagtgtattacaagcttctaaatactcttgcagattacttggctaaggaactggaaaatgatttgaatgaaactctcagatcactgtataaccacccagtaccaaaggcaaatactcctgtaaatttgagtgtgaaccaagagatatttattgcctgtgagcaagttctgaaagatcagcctgctctagtaccgcattcctacttcattgcccctgatgtaactggactcccaacaatacccgagagtagaaatcttacagaatattttgttgccgtggatgtgaacaacatgctgcagctgtatgccagtatgctgcatgaaaggcgcatcgtgattatctcgagcaaattaagcactttaactgcctgtatccatggatcagctgctcttctatacccaatgtattggcaacacatatacatcccagtgcttcctccacacctgctggactactgctgtgccccaatgccatacctgattggaatacactccagcctcatagagagagtgaaaaacaaatcattggaagatgttgttatgttaaatgttgatacaaacacattagaatcaccatttagtgacttgaacaacctaccaagtgatgtggtctcggccttgaaaaataaactgaagaagcagtctacagctacgggtgatggagtagctagggcctttcttagagcacaggctgctttgtttggatcctacagagatgcactgagatacaaacctggtgagcccatcactttctgtgaggagagttttgtaaagcaccgctcaagcgtgatgaaacagttcctggaaactgccattaacctccagctttttaagcagtttatcgatggtcgactggcaaaactaaatgcaggaaggggtttctctgatgtatttgaagaagagatcacttcaggtggcttttgtggagggaacccgaggtcatatcaacaatgggtgcatacagtcaagaaaggaggtgcactgttcaacacagcaatgaccaaagcaacccctgctgtacggacagcatataaatttgcaaaaaatcatgcaaagctgggactaaaggaagtgaagagtaaactaaaacacaaggaaaatgaagaagattatgggacctgttctagttctgtacaatatacaccagtttacaaattacacaatgaaaagggaggaaactcagaaaagcgtaagcttgctcaggcacgcttaaaaaggcctcttaagagccttgatggtgctctatatgatgatgaagatgatgatgacattgaaagagcaagcaagttatcttctgaagatggtgaagaagcttctgcttatctctatgagagtgatgactctgttgaaacaagagtgaagactccttactcaggtgaaatggacttactaggagagattcttgatacattgagcacacacagctcagatcaggggaagctggcagctgcaaagagcttggatttctttagatcaatggatgacattgattacaaacctacgaataaatctaatgctcctagtgagaataacctggctttcctctgtggtggttctggtgaccaagcagagtggaatcttgggcaagacgatagtgccctccatggcaaacacctccctccatctcctaggaagcgggtttcctctagtggtttgacagattctctgtttatcctgaaagaggaaaacagtaacaagcacctcggtgctgacaatgtgagtgaccctacttcaggactggatttccaactcacttcccctgaagtttcccagactgataaaggaaaaacagaaaagagggaaacactaagccagatttcagatgatctgcttatacccggtcttgggcggcattcatcgacttttgttccttgggagaaagaagggaaagaagccaaagagacttcagaagatattggactgctccatgaagtagtgtcattatgtcatatgacatctgacttccaacaaagcttgaacatttcagacaaaaacacaaatggaaaccaaacttaaatcttgcatccaagcttctatggagacattttgagattcaatgcaatctgtataataaacagaattatttgtaggaatggcaactcatactatttaaatttttttttgcatttgcaacatttttctcacttgttcatttcgaggatatatgaaatgcattgatttttaaatataaagcgaattctactgtgcttttaaatcaggtactagtgtgtatgtatgtttaaagtatgtattgaccatgagatttcccagtgtttggtgcttaatgccgtttattttatttaagctaagaatgcatatgtaacccatgcacataaccagtagctactatactaatctggttgagcatgaactgatcaagatatcaaaacttatcaaaactagcctgaagctgatgaaactgttaacccactaattgccttaatcttaaagctgttttttaagcatacttaaataatgtatgaaagtatgtataaagtttgaaggataagttattagtgttctgcagagcaataatgcctttttctattcatcaaatcaaggtcaaaattcatcttttcaagattaaaaagctctcttaatggaaatatttaatttgcttatataaagcactatagccatgttttccaaaaagtataaaaatatacacttacctttcattcagtgaaatataggaagtgctgaattacaatgtgaagttaatgacttctgtttacaaatgagacactctaacgagttttcagtctctctgtatgcctttgctatttaggggtccaccccaagaaagccaaatacaacataaaccgtcctgacaaaaaaaaaaaaaaaaatctttttttaactaataattctctatcaaaatgcttcatatcatcatctcaaatttactttttaaaataattgactttgtattttagaagttttagatttacagaaaaattgcaaagatagtacagagagttcccatctacccctgttactaacatcttacgttactatggtacatctgccccaattagtgaaccaatattgatattccatactttattcagattttcttagttttctcctaatatccattttccacatcaagatcctattcagaataccacactatattgagttggaatgtctccttaggctcctcttgcctgtgacagtttcttagactttccttatttttgatgacattgacagctttgaagagtactgtcagataaattgtagcatgctcctctcttggagtttgttgggtatttttttcatgattagactgggattgtgggttttgaggagatgatcacagaagtaaagtgccattttcatcaggtcatatcaagggtacgtactgtcaacatgatttgtgaatgctgacagggaccttgataacctggctgaggtagcgtttgtcactctaaagttcttcctgccctttccatgctgtcatttttggaaggaagtcactacatgcaggagtgaggagtcataattccccttctttagggcagagaagtatctacataaataactgggaattctgtatagaaaatttgtttcttctttctcaaattcactgttgagctttggaattcatctgagaaggaatcatgtactaattacttcatgatagactagattaccaggcacaatcagggaaaaaagcagtgatagtatggttaaattgttattagcattttcagtatatccactttatacatccccaatcatgattttttttacatttctttttagaaaagatgttcaagaaatcattaaagaaccccaataagactatattctaaatatttattgaaagaatataatttcagctaaaatcctagaagagggtttgaaataatttaaagaaaatgaccaagtttttttaaaacctacgtttcaaaatctaaatggatatgtgttatttgggacacttattcattatgattatataagaagacaattcttgtttcccttataagtatggactgtatacattaaggaaaacaatgtttaatccttattttttaatacagaagtctcaaggttcttgtcaaattttgcctttataagcttattacaaaattacaacttactttactgaagtttataatggaagaagtccatatagcaaaagagctgttttaaatcagaaggaaaaaaggttactctggttgttaatctgcttggcaaatattccttcataatttgtgaaaagaatgcaaatcagcattttaatatgaattttgaaatgaggtatggttttttgtttgtttttttcagaactcagtctgaaaaacaactgtgagtgtagcatgggtcaaatttggtttttagtccatttgctttatcaacatcacggcttcagaaatccaaattttgttctacttttcagccacctttcaaggtgtttggttataatactgtgttgctttgaggatatttagccactcataaataattgtctcaaggtatttaaaagtgatttgtgccttattttaatgcaaaattagcagttttattctattttaaaaacaaaggcagaaaaacaattctgcatgttattctttaaaaacatccagaataatactaccaagtatttgtatttcaaaccagtaaaattttgaatattcaaagtctgctcttaaacttagacttcctagtattatggtggttatagtgagaatgaaattaaactgggtgagttccgaaataaaggaaagtgttatattctacagtgcccatattttctatggtaactaaatcaaatatttgtaagttcctctgctttttgaaattatttttcaaagaagcaacacctgttatacaacagaattgtataaactaaaaagacttttggccttggtacatagtctttatctggcctgcaatggagtcatggttctttctgaatcccactctcacttttttctttttacccttagatattgcatccgtggtatttcaggggtatagagaaataatattggaatttaggagctatttttttaagtgaaaatattactaagtggtatcttttgatgattacctactttaatgtgtcttagaaaagcaccaaaacatagcatgattattttttcagttaattaaaattagttaataacatgttcatttaaaaactattcattgactttttgtaccagtcatatgcagggtacagtaactgaggatatgggaaataaaataactgacatagtccctgctctgaaggaacaaaggaaaaggaattgcaaatttttattaaaataataataataataataataataataataataataataataatgtgttttgcctggaagttattagctgagattctaacacacaaaaagttcaaaaaaaaagaacaaaaactggctgcttaatttaaagcatgctctaagtatgaaccatagtatcatttctaatttcattaactttctcaattattatgctaagtatattatgctgctaagatacccacatttaaggggcagatttagagactcttttagaaactgagtgtctttatcttattatcagataaccaggctgcacagggctctctataatggaatgatgctccttttcaatacttagagccactgtactcagtttaggagtaactgaaggtgtggatgcatgttaatgggaatccaatttttactatttttatatgaataacagcgttctgtagaaacagtctctcccttctaaataaaaactatgtgactgctgttactagtgctattctatgcgaatatcctaataataggattcaggaattctaatgaattgtttcttaattaaggtgaacaagtagactcctgatcaagaggagaacactgtgaatgtctcataatcaatagaccttcattctcttgtagaaaatgtggattttcaggaaaagactgattattttcatgaataaattttcttatacaaattccattttgtttgacataaaagaccctgaatcttaagatatttgtaaatcagaatatttaagaatgtaaaatgaatccccaaatctagtttcctccaaagcacttcttaatgtaggaaatagtttttacaaaccctatgtcagtactaatgttcctgggtcaaacccagtaatattgttagtgtatgttgttacaccttatttaagaggcagagtggttttgagcaagtcagttaacgtgatttgatgaagaaataaggaattatatacatttagacagaagaatattttattttgaaaataggatttcgtgcaataatttttcttgcataacttagttcatataaatatgtacatctgtttttctggcagatgccttaaggtcatgtttttcagtatttgagtaaatctgtatgtagcaatgttctcattgatttcagaaaaaaatatattctttatattgttgccaggagaaatgtttttgtttatttaaaattattatggatattgtgttgttgtatcataactaactgcctcagcaacaataaatatgcaataagaaaatcctgtaccttagattagattgacaatactgttactttaaaagaaatatatacggtacaaattgctgattctacatgtgtacatttaacagatactcagttctgcaccacctaaatcaaaatggcatttgtatgctgatgattacatatgtggattgtagtatcctttgtgatgaatctttgataagatttataaagggcattgccaatactttttgactgtgtaaattaattttttgtatgatgtacagtttgtttaatcttagagcttctatagatttctactttattatacttgaatgaggcagaaaagcactgtggaaaatctgtagctctggatgcaacatgcagacataccaaaaaaataataataaagcaaggtactgaagagcaatgttaacagaatgctttatatccagaatgctatgtttttttcaagccacattttagttgaatgaagtaaagttattcaatcttttattttaaaatattggaaagtcacaaatgattacttctttgatatgatgaacctataagtctattcatctctgttatttcatttctcaaatgtgagccttgttgaggtccattatcaaatctacactttggttgattatatgatgtttaggacaaggcagaatttaaaacctgcatgtttagtgcatcacatgtcaagtcaccatccttctgacagtgtaacttccataacgttattttgagagccatttaataatcatatttgaaaaagtggatttcttgagtctgttgtagtttagtacttacagcagtgcctaaaacagcaactaatatgaactgcctgagtcctacaacataaatgcataaagcttttttatgtaaaagccacaggaggggttcaaaattgaacttttccaaagtttatttctcttgcgttagatgaaaaactatttaaaaggactgaaaaccctgagctttttgctcgtcttggtagcagatatctgtaaaaacctacccagaattgtgattttacttcattgttcttgcatccttgaggctacagtataaatcatctccaaacttgactactattgggaagatgtgtataaaagcatcgctttgggaatttttttaaaaatatgcaaaaataaatattgaataaaatctacattaccataaaacacccaaaaatgcagttctaaaataaaattggtcacaatt

SEQ ID NO: 126228 - DNA, 2816 bp, Homo sapiens
  Payload ID: 4754
  Gene Symbol: DENND1C
  Gene Name: DENN/MADD domain containing 1C
  Uniprot ID: Q8IV53
  ENST ID: ENST00000381480
  CDS Start-End: 114-2519
gttaaacttcctctctcagccacacaggaagctgagccggcttggggcccagcatacacaggcccccaggacccctggggagagggccccgctgggctggccctgcagggaccatggaatccagagctgaagggggctcccctgctgtgtttgattggttcttcgaagcggcctgccctgcctccctgcaggaggatccccccatcctgcggcagttccctccagacttcagggaccaggaagctatgcagatggtgcctaaattctgcttcccttttgatgtggaaagggagccccccagccccgccgtgcagcatttcaccttcgccctcacagaccttgccggcaaccgcagatttggtttctgccgcctgcgggcgggtacccagagctgtctctgcatcctcagccacctgccttggttcgaggtgttttacaagctattgaacacagtgggagacctcctagcccaggaccaagtcaccgaggcagaggaacttcttcaaaatctgtttcagcagtccctgtctgggccccaggcctcagtggggcttgagctgggcagcggagtgacggtctccagcgggcagggtatccccccccctacccgggggaatagcaagccgctttcctgcttcgtggccccggactccggccgcctgccatccatccctgagaacaggaacctaacggagctggtggtggccgtgactgacgagaacatcgtggggctgttcgcggcgctcctggccgagagaagagtcctgctcaccgccagcaaactcagcaccctgacctcgtgcgtccacgcgtcctgcgcgctcctgtaccccatgcgctgggagcacgtgctgatccccacgctgcccccacacctgctggactactgctgcgcgcccatgccctacctcattggagtgcacgccagtctcgccgagagagtacgagaaaaagccctggaggacgtcgtggtgctgaacgtggacgccaataccttggagacgacctttaacgacgtgcaggcgctgcctccagacgtggtgtccctgctgaggctccggctcaggaaggtcgccctggcccccggggaaggggtgtcccgtctcttcctcaaagcccaggccctgctcttcggggggtaccgcgacgcactcgtctgcagcccgggccagccagtgaccttcagtgaggaagtcttcttggcccagaagcctggggcacctctgcaggccttccaccggcgggctgtgcacctgcagctgttcaaacagttcatcgaagcccggctggagaagctcaacaagggggagggcttctcagatcaattcgagcaggagatcactggctgcggggcctcctcaggggcccttcgatcctatcagctctgggccgacaatctaaagaaaggtggtggcgccctcctgcactcagtcaaggccaagacccaaccagccgtcaagaacatgtaccgctcggccaagagtggcttgaagggggtgcagagccttctaatgtataaggatggggactctgtcctgcagagggggggctctctgagggccccagccctccccagccgctcagaccgcctgcagcaacgcctcccaatcactcagcactttggaaagaaccggccccttcgccccagcaggagacgccagctggaagagggaacttccgagcccccaggggcggggacacccccactgagccctgaggatgaggggtgcccgtgggcagaagaagctctggacagcagcttcttggggtctggagaagaactggatttgttgagcgagattctggacagtcttagcatgggagccaagagcgcaggcagcctgagaccgagccagagtttagactgctgtcacagaggagacctggacagctgcttcagcctgcccaacataccaagatggcaaccagacgataagaaactaccagagccggagccccagcccctttccctgccatccctgcaaaatgcctcgtctttggatgccaccagctcttcaaaggactccaggtcccagctgataccctcagagtccgaccaagaagtcacgtctccatcccagtcctcaacagcttctgcagacccaagcatctggggggaccccaaaccctctcctctcacagagcccctaattcttcatctcaccccttcccacaaggcagctgaagattctacagcccaggaaaaccccactccctggctctccactgcacccactgagcccagccctccagaaagcccccaaattctggcccccacaaagcccaactttgatatagcctggacgtcccagccccttgatccttcctcagaccccagttctctggaggaccccagagcccggcctcccaaagccctgctggcagagcgcgctcacctccagccacgggaggaaccaggagccctgaattcccctgctacacccaccagcaactgtcaaaagtcccagcccagcagccggcccagagtcgctgatcttaagaagtgctttgagggttaagaatcaggggtccaagagagaccccagtccctcaataaagccacaagagcccaaaaaagctggtttttttcctggtgaatttctctggtgccctcactctgctcggaaatccatcccacccacctctgtccctccaagggcagcctctctaactggctcctagcagggaattccaggaagcctcctggtcttctagaatcctggcaaccttacaattcctctcggcatttgtcacttccatctcagctaatgcacccaccagctcaaacacaccaataaagcttttgttacatctca

SEQ ID NO: 126229 - DNA, 2395 bp, Homo sapiens
  Payload ID: 4754
  Gene Symbol: DENND1C
  Gene Name: DENN/MADD domain containing 1C
  Uniprot ID: Q8IV53
  ENST ID: ENST00000543576
  CDS Start-End: 116-2389
acacaggaagctgagccggcttggggcccagcatacacaggcccccaggacccctggggagagggccccgctgggctggccctgcagggaccatggaatccagagctgagaagctatgcagatggtgcctaaattctgcttcccttttgatgtggaaagggagccccccagccccgccgtgcagcatttcaccttcgccctcacagaccttgccggcaaccgcagatttggtttctgccgcctgcgggcgggtacccagagctgtctctgcatcctcagccacctgccttggttcgaggtgttttacaagctattgaacacagtgggagacctcctagcccaggaccaagtcaccgaggcagaggaacttcttcaaaatctgtttcagcagtccctgtctgggccccaggcctcagtggggcttgagctgggcagcggagtgacggtctccagcgggcagggtatccccccccctacccgggggaatagcaagccgctttcctgcttcgtggccccggactccggccgcctgccatccatccctgagaacaggaacctaacggagctggtggtggccgtgactgacgagaacatcgtggggctgttcgcggcgctcctggccgagagaagagtcctgctcaccgccagcaaactcagcaccctgacctcgtgcgtccacgcgtcctgcgcgctcctgtaccccatgcgctgggagcacgtgctgatccccacgctgcccccacacctgctggactactgctgcgcgcccatgccctacctcattggagtgcacgccagtctcgccgagagagtacgagaaaaagccctggaggacgtcgtggtgctgaacgtggacgccaataccttggagacgacctttaacgacgtgcaggcgctgcctccagacgtggtgtccctgctgaggctccggctcaggaaggtcgccctggcccccggggaaggggtgtcccgtctcttcctcaaagcccaggccctgctcttcggggggtaccgcgacgcactcgtctgcagcccgggccagccagtgaccttcagtgaggaagtcttcttggcccagaagcctggggcacctctgcaggccttccaccggcgggctgtgcacctgcagctgttcaaacagttcatcgaagcccggctggagaagctcaacaagggggagggcttctcagatcaattcgagcaggagatcactggctgcggggcctcctcaggggcccttcgatcctatcagctctgggccgacaatctaaagaaaggtggtggcgccctcctgcactcagtcaaggccaagacccaaccagccgtcaagaacatgtaccgctcggccaagagtggcttgaagggggtgcagagccttctaatgtataaggatggggactctgtcctgcagagggggggctctctgagggccccagccctccccagccgctcagaccgcctgcagcaacgcctcccaatcactcagcactttggaaagaaccggccccttcgccccagcaggagacgccagctggaagagggaacttccgagcccccaggggcggggacacccccactgagccctgaggatgaggggtgcccgtgggcagaagaagctctggacagcagcttcttggggtctggagaagaactggatttgttgagcgagattctggacagtcttagcatgggagccaagagcgcaggcagcctgagaccgagccagagtttagactgctgtcacagaggagacctggacagctgcttcagcctgcccaacataccaagatggcaaccagacgataagaaactaccagagccggagccccagcccctttccctgccatccctgcaaaatgcctcgtctttggatgccaccagctcttcaaaggactccaggtcccagctgataccctcagagtccgaccaagaagtcacgtctccatcccagtcctcaacagcttctgcagacccaagcatctggggggaccccaaaccctctcctctcacagagcccctaattcttcatctcaccccttcccacaaggcagctgaagattctacagcccaggaaaaccccactccctggctctccactgcacccactgagcccagccctccagaaagcccccaaattctggcccccacaaagcccaactttgatatagcctggacgtcccagccccttgatccttcctcagaccccagttctctggaggaccccagagcccggcctcccaaagccctgctggcagagcgcgctcacctccagccacgggaggaaccaggagccctgaattcccctgctacacccaccagcaactgtcaaaagtcccagcccagcagccggcccagagtcgctgatcttaagaagtgctttgagggttaagaatca

SEQ ID NO: 126230 - DNA, 2933 bp, Homo sapiens
  Payload ID: 4754
  Gene Symbol: DENND1C
  Gene Name: DENN/MADD domain containing 1C
  ENST ID: ENST00000590867
  CDS Start-End: 354-1001
cacagccacacacacacagtcacactttctcactccatcctgtacttgtgtgttcaattaacactgctgcacacacagcctcacacaaccacacactcacagccacaaacccccagagtcatgcacatgccgacgcaccttgtggcacatgcacacacaaccacacttgtgtgcaaagtggcagacacaaccacacatgcatagaagcaagtctctggaccccttctgcatcccacagagggggctcccctgctgtgtttgattggttcttcgaagcggcctgccctgcctccctgcaggaggatccccccatcctgcggcagttccctccagacttcagggaccaggaagctatgcagatggtgcctaaattctgcttcccttttgatgtggaaagggagccccccagccccgccgtgcagcatttcaccttcgccctcacagaccttgccggcaaccgcagatttggtttctgccgcctgcgggcgggtacccagagctgtctctgcatcctcagccacctgccttggttcgaggtgttttacaagctattgaacacagtgggagacctcctagcccaggaccaagtcaccgaggcagaggaacttcttcaaaatctgtttcagcagtccctgtctgggccccaggcctcagtggggcttgagctgggcagcggagtgacggtctccagcgggcagggtatccccccccctacccgggggaatagcaagccgctttcctgcttcgtggccccggactccggccgcctgccatccatccctgagaacaggaacctaacggagctggtggtggccgtgactgacgagaacatcgtggggctgttcgcggcgctcctggccgagagaagagtcctgctcaccgccagcaaactcagcaccctgacctcgtgcgtccacgcgtcctgcgcgctcctgtaccccatgcgctgggagcacgtgctgatccccacgctgcccccacacctgctggactactgctgatgccctcctctgccaaggactcccgggctctgagcggccgaccccgcttttccgcagagagtacgagaaaaagccctggaggacgtcgtggtgctgaacgtggacgccaataccttggagacgacctttaacgacgtgcaggcgctgcctccagacgtggtgtccctgctgaggctccggctcaggaaggtcgccctggcccccggggaaggggtgtcccgtctcttcctcaaagcccaggccctgctcttcggggggtaccgcgacgcactcgtctgcagcccgggccagccagtgaccttcagtgaggaagtcttcttggcccagaagcctggggcacctctgcaggccttccaccggcgggctgtgcacctgcagctgttcaaacagttcatcgaagcccggctggagaagctcaacaagggggagggcttctcagatcaattcgagcaggagatcactggctgcggggcctcctcaggggcccttcgatcctatcagctctgggccgacaatctaaagaaaggtggtggcgccctcctgcactcagtcaaggccaagacccaaccagccgtcaagaacatgtaccgctcggccaagagtggcttgaagggggtgcagagccttctaatgtataaggatggggactctgtcctgcagagggggggctctctgagggccccagccctccccagccgctcagaccgcctgcagcaacgcctcccaatcactcagcactttggaaagaaccggccccttcgccccagcaggagacgccagctggaagagggaacttccgagcccccaggggcggggacacccccactgagccctgaggatgaggggtgcccgtgggcagaagaagctctggacagcagcttcttggggtctggagaagaactggatttgttgagcgagattctggacagtcttagcatgggagccaagagcgcaggcagcctgagaccgagccagagtttagactgctgtcacagaggagacctggacagctgcttcagcctgcccaacataccaagatggcaaccagacgataagaaactaccagagccggagccccagcccctttccctgccatccctgcaaaatgcctcgtctttggatgccaccagctcttcaaaggactccaggtcccagctgataccctcagagtccgaccaagaagtcacgtctccatcccagtcctcaacagcttctgcagacccaagcatctggggggaccccaaaccctctcctctcacagagcccctaattcttcatctcaccccttcccacaaggcagctgaagattctacagcccaggaaaaccccactccctggctctccactgcacccactgagcccagccctccagaaagcccccaaattctggcccccacaaagcccaactttgatatagcctggacgtcccagccccttgatccttcctcagaccccagttctctggaggaccccagagcccggcctcccaaagccctgctggcagagcgcgctcacctccagccacgggaggaaccaggagccctgaattcccctgctacacccaccagcaactgtcaaaagtcccagcccagcagccggcccagagtcgctgatcttaagaagtgctttgagggttaagaatcaggggtccaagagagaccccagtccctcaataaagccacaagagcccaaaaaagctggtttttttcctggtgaatttctctggtgccctcactctgctcggaaatccatcccacccacctctgtccctccaagggcagcctctctaactggctcctagcagggaattccaggaagcctcctggtcttctagaatcctggcaaccttacaattcctctcggcatttgtcacttccatctcagctaatgcacccaccagctcaaacacaccaataaagcttttgttacatc

SEQ ID NO: 126231 - DNA, 590 bp, Homo sapiens
  Payload ID: 4754
  Gene Symbol: DENND1C
  Gene Name: DENN/MADD domain containing 1C
  ENST ID: ENST00000586046
  CDS Start-End: 104-376
ctctctcagccacacaggaagctgagccggcttggggcccagcatacacaggcccccaggacccctggggagagggccccgctgggctggccctgcagggaccatggaatccagagctgagaggatccccccatcctgcggcagttccctccagacttcagggaccaggaagctatgcagatggtgcctaaattctgcttcccttttgatgtggaaagggagccccccagccccgccgtgcagcatttcaccttcgccctcacagaccttgccggcaaccgcagatttggtttctgccgcctgcgggcgggtacccagagctgtctctgcatcctcagccacctgccttggttcgaggtgttttacaagctattgaacacagtgggagacctcctagcccaggaccaagtcaccgaggcagaggaacttcttcaaaatctgtttcagcagtccctgtctgggccccaggcctcagtggggcttgagctgggcagcggagtgacggtctccagcgggcagggtatccccccccctacccgggggaatagcaagccgctttcctgcttcgtggccccggactccggccgcct

SEQ ID NO: 126232 - DNA, 484 bp, Homo sapiens
  Payload ID: 4754
  Gene Symbol: DENND1C
  Gene Name: DENN/MADD domain containing 1C
  ENST ID: ENST00000588421
  CDS Start-End: 220-484
acacaggcccccaggacccctggggagagggccccgctgggctggccctgcagggaccatggaatccagagctgagtaagagccaccccatccctcattctctgagggggctcccctgctgtgtttgattggttcttcgaagcggcctgccctgcctccctgcaggaggatccccccatcctgcggcagttccctccagacttcagggaccaggaagctatgcagatggtgcctaaattctgcttcccttttgatgtggaaagggagccccccagccccgccgtgcagcatttcaccttcgccctcacagaccttgccggcaaccgcagatttggtttctgccgcctgcgggcgggtacccagagctgtctctgcatcctcagccacctgccttggttcgaggtgttttacaagctattgaacacagtgggagacctcctagcccaggaccaagtcaccgaggcagaggaacttcttcaaaatc

SEQ ID NO: 126233 - DNA, 571 bp, Homo sapiens
  Payload ID: 4754
  Gene Symbol: DENND1C
  Gene Name: DENN/MADD domain containing 1C
  ENST ID: ENST00000590473
  CDS Start-End: 191-571
acagtagtgcaatcttggttcactatggcctcaaactccccaggctcaggcgatcctcctgactcagcctcctggagggggctcccctgctgtgtttgattggttcttcgaagcggcctgccctgcctccctgcaggaggatccccccatcctgcggcagttccctccagacttcagggaccaggaagctatgcagatggtgcctaaattctgcttcccttttgatgtggaaagggagccccccagccccgccgtgcagcatttcaccttcgccctcacagaccttgccggcaaccgcagatttggtttctgccgcctgcgggcgggtacccagagctgtctctgcatcctcagccacctgccttggttcgaggtgttttacaagctattgaacacagtgggagacctcctagcccaggaccaagtcaccgaggcagaggaacttcttcaaaatctgtttcagcagtccctgtctgggccccaggcctcagtggggcttgagctgggcagcggagtgacggtctccagcgggcagggtatccccccccctacccgggggaatagcaagccg

SEQ ID NO: 126234 - DNA, 582 bp, Homo sapiens
  Payload ID: 4754
  Gene Symbol: DENND1C
  Gene Name: DENN/MADD domain containing 1C
  ENST ID: ENST00000590173
  CDS Start-End: 160-582
acacaggaagctgagccggcttggggcccagcatacacaggcccccaggacccctggggagagggccccgctgggctggccctgcagggaccatggaatccagagctgaatccccccatcctgcggcagttccctccagacttcagggaccaggaagctatgcagatggtgcctaaattctgcttcccttttgatgtggaaagggagccccccagccccgccgtgcagcatttcaccttcgccctcacagaccttgccggcaaccgcagatttggtttctgccgcctgcgggcgggtacccagagctgtctctgcatcctcagccacctgccttggttcgaggtgttttacaagctattgaacacagtgggagacctcctagcccaggaccaagtcaccgaggcagaggaacttcttcaaaatctgtttcagcagtccctgtctgggccccaggcctcagtggggcttgagctgggcagcggagtgacggtctccagcgggcagggtatccccccccctacccgggggaatagcaagccgctttcctgcttcgtggccccggactccggccgcctgccatcc

SEQ ID NO: 126235 - DNA, 3735 bp, Homo sapiens
  Payload ID: 4755
  Gene Symbol: DENND2A
  Gene Name: DENN/MADD domain containing 2A
  Uniprot ID: Q9ULE3
  ENST ID: ENST00000275884
  CDS Start-End: 419-3448
gccgcgggcgagcctgcgctgggccggccgagggaagcgcgccgctggggccgggggcggcggggaccccacgggagcgcgcgcggcggggacccccaggggcttgcgggcggccgggggaggctcggcggacaaaggggcggagggcggagggccatggcgtccccggcacccgccgccgcccgcccccgagccgcgccgccagccgtcccggcccgccccggagcccccaagatgcgccccagagcccgcggagccgccgcccgcggggagggtcaaggtggaaggtccaaggactgagaaagaccctcgaaggcatccactttagtcctccattccattcctagagactgatcaggagtcaggcttcagaaggagtcccctggaaggcctccacaacctcacgctagagtcaagaatggatatgttcagcttggatatgatcatcagtgacccagctgcagaagccagcagggctgggaagaagcagctcagaggtgttcagaacccttgcccatctgccagagccagaccccggcacaagtccctcaacataaaggacaagatatcagaatgggaagggaagaaagaggtgcccactcctgcacccagcaggagagcagacggacaggaggattatctgccgtcctctacggtggagaggaggagtagtgatggggtgagaactcaggtcacagaggctaagaatggaatgaggccaggaacagagagcacagagaaggagaggaataaaggagcagtgaacgtcgggggacaggacccagagccggggcaagacctaagccagccagaacgggaagtggatcctagctggggccgaggccgagagccaagacttggcaagctacgctttcagaacgatcccctctccgtgctgaagcaggtcaagaaactcgagcaggctttgaaggatgggtcggcagggctggatccccagttaccagggacttgttactccccacactgccctcctgacaaggcagaggcagggtccacccttcctgagaacctgggaggcgggagtggctcagaagtcagccagagggtccacccctcggacctggaaggcagggagcccacccctgagcttgtggaggacaggaaaggttcatgcagaaggccctgggaccggagccttgagaacgtgtataggggctcggagggttcccccacaaagcccttcatcaaccctctgccaaaaccccggagaacgttcaaacatgccggagaaggggacaaagatgggaagcctggcatcggcttcaggaaagagaaaagaaatctgcctcctctgccctctctacctcccccgcctctgccctcctctcccccaccttcctctgtgaacagaagactgtggaccgggagacagaaatccagtgcagaccacagaaagtcctatgagtttgaagatttactgcagtcttcctctgagagcagcagggtggactggtacgcgcagactaagctggggctgacacgcactttatcggaggagaacgtctatgaagacattctagatccgccaatgaaggagaacccttatgaggacatcgagttacatggtcgctgcctgggaaagaagtgtgtcttgaattttcctgcttctcccacctcttccatccctgacacactcaccaagcagtcattgtccaaacctgcttttttccgacaaaattcagagaggaggaacttcaagctgctggacactaggaagctgagtcgggatggaactgggtccccttccaaaatcagccctccctccactcccagcagccctgatgacattttctttaaccttggagacccacagaacggcaggaagaagagaaagatacccaagctggtgttgcgaatcaacgccatttatgaggtccggagaggaaagaaacgggtgaagaggctgtcccagtcaatggagagcaactcaggaaaagtgacagatgagaacagtgagtctgacagtgacacagaggagaagctgaaagctcacagccagcgcctggtcaacgtgaagtcccggctgaagcaggcgcctcggtacccatcacttgcccgggaactcatcgagtaccaggagaggcagctcttcgagtactttgtggttgtgtctttgcacaagaagcaggccggggctgcctacgtgccagaactcacccaacagttccctctgaagttggaaaggtctttcaagttcatgagagaagctgaggaccaactgaaggccattccccagttctgttttcccgatgccaaggattgggttcctgtccagcagttcaccagtgaaacattctcatttgtcttaactggagaagatgggagcagaaggttcggttactgccgaagactgctgcctggaggcaaagggaagcgccttcctgaagtttactgcattgtgagccgcctgggatgcttcagcctcttttcaaggatcttggatgaggtggaaaaaagacgaggcatctctcctgccctggttcagccactcatgagaagtgtcatggaagcccctttcccagccctgggcaaaaccatccttgtcaagaacttcctgccaggttcaggaactgaggtgatcgaactgtgccgcccgctggactcccggctcgagcacgtggactttgagtctctcttctcctccctcagcgtccgccacctggtctgtgtgtttgcctccctgcttctggagaggagggtcatcttcattgcagacaagctcagcatcctgtccaagtgctgccacgcgatggtggcgctgatctaccccttcgcctggcagcacacctacatcccggtgctgccacccgccatggtcgacatcgtgtgctcgccgacgcccttcctcatcgggctgctctccagctcgctgccactgctcagggagctgccgctggaagaggtccttgtggttgacctcgtcaacagccggttcctcagacagatggacgatgaggactccatcctgccccggaagcttcaggtggccctggaacacattctggaacagaggaacgagctggcttgtgagcaggacgaagggcccctagacggcaggcacggtccagagtccagccccttgaacgaggtggtgtctgaagcctttgtccgcttcttcgtggagattgtgggacactactctttgttcctgacgtcgggcgagcgtgaggagagaaccctgcagcgggaggccttccgcaaagctgtctcctccaagagcctccgccacttcctggaggtcttcatggagactcagatgtttcggggcttcatccaggagcgggagctgcgccggcaggatgccaaaggtctgtttgaggtccgagcccaagagtatctggaaacactccccagtggagagcacagcggtgtcaataagttcctgaagggactaggcaataaaatgaaatttctccacaagaaataactctcagcctcaagggaaaacttcctcctagtgcagccctatgctttaaaaacagttcctggtggcctttctgaaaggctgggtcccaggttgtcacggtgcggaactggaggccgcggtggcttctggccgaggctgggctcttccctggatgaggacctgggagccgcctgggaggacagccccagaaagggagcccgagaccaggcgtgtcgccgacatgcaaatgggttgttttggtggttgggtttttttttttatcttagatattaaaagtaagaaaaatg

SEQ ID NO: 126236 - DNA, 3334 bp, Homo sapiens
  Payload ID: 4755
  Gene Symbol: DENND2A
  Gene Name: DENN/MADD domain containing 2A
  ENST ID: ENST00000461883
  CDS Start-End: 116-2710
agaccctcgaaggcatccactttagtcctccattccattcctagagactgatcaggagtcaggcttcagaaggagtcccctggaaggcctccacaacctcacgctagagtcaagaatggatatgttcagcttggatatgatcatcagtgacccagctgcagaagccagcagggctgggaagaagcagctcagaggtgttcagaacccttgcccatctgccagagccagaccccggcacaagtccctcaacataaaggacaagatatcagaatgggaagggaagaaagaggtgcccactcctgcacccagcaggagagcagacggacaggaggattatctgccgtcctctacggtggagaggaggagtagtgatggggtgagaactcaggtcacagaggctaagaatggaatgaggccaggaacagagagcacagagaaggagaggaataaaggagcagtgaacgtcgggggacaggacccagagccggggcaagacctaagccagccagaacgggaagtggatcctagctggggccgaggccgagagccaagacttggcaagctacgctttcagaacgatcccctctccgtgctgaagcaggtcaagaaactcgagcaggctttgaaggatgggtcggcagggctggatccccagttaccagggacttgttactccccacactgccctcctgacaaggcagaggcagggtccacccttcctgagaacctgggaggcgggagtggctcagaagtcagccagagggtccacccctcggacctggaaggcagggagcccacccctgagcttgtggaggacaggaaaggttcatgcagaaggccctgggaccggagccttgagaacgtgtataggggctcggagggttcccccacaaagcccttcatcaaccctctgccaaaaccccggagaacgttcaaacatgccggagaaggggacaaagatgggaagcctggcatcggcttcaggaaagagaaaagaaatctgcctcctctgccctctctacctcccccgcctctgccctcctctcccccaccttcctctgtgaacagaagactgtggaccgggagacagaaatccagtgcagaccacagaaagtcctatgagtttgaagatttactgcagtcttcctctgagagcagcagggtggactggtacgcgcagactaagctggggctgacacgcactttatcggaggagaacgtctatgaagacattctagatccgccaatgaaggagaacccttatgaggacatcgagttacatggtcgctgcctgggaaagaagtgtgtcttgaattttcctgcttctcccacctcttccatccctgacacactcaccaagcagtcattgtccaaacctgcttttttccgacaaaattcagagaggaggaacttcaagctgctggacactaggaagctgagtcgggatggaactgggtccccttccaaaatcagccctccctccactcccagcagccctgatgacattttctttaaccttggagacccacagaacggcaggaagaagagaaagatacccaagctggtgttgcgaatcaacgccatttatgaggtccggagaggaaagaaacgggtgaagaggctgtcccagtcaatggagagcaactcaggaaaagtgacagatgagaacagtgagtctgacagtgacacagaggagaagctgaaagctcacagccagcgcctggtcaacgtgaagtcccggctgaagcaggcgcctcggtacccatcacttgcccgggaactcatcgagtaccaggagaggcagctcttcgagtactttgtggttgtgtctttgcacaagaagcaggccggggctgcctacgtgccagaactcacccaacagttccctctgaagttggaaaggtctttcaagttcatgagagaagctgaggaccaactgaaggccattccccagttctgttttcccgatgccaaggattgggttcctgtccagcagttcaccagtgaaacattctcatttgtcttaactggagaagatgggagcagaaggttcggttactgccgaagactgctgcctggaggcaaagggaagcgccttcctgaagtttactgcattgtgagccgcctgggatgcttcagcctcttttcaaggatcttggatgaggtggaaaaaagacgaggcatctctcctgccctggttcagccactcatgagaagtgtcatggaagcccctttcccagccctgggcaaaaccatccttgtcaagaacttcctgccaggttcaggaactgaggtgatcgaactgtgccgcccgctggactcccggctcgagcacgtggactttgagtctctcttctcctccctcagcgtccgccacctggtctgtgtgtttgcctccctgcttctggagaggagggtcatcttcattgcagacaagctcagcacacctacatcccggtgctgccacccgccatggtcgacatcgtgtgctcgccgacgcccttcctcatcgggctgctctccagctcgctgccactgctcagggagctgccgctggaagaggtccttgtggttgacctcgtcaacagccggttcctcagacagatggacgatgaggactccatcctgccccggaagcttcaggtggccctggaacacattctggaacagaggaacgagctggcttgtgagcaggacgaagggcccctagacggcaggcacggtccagagtccagccccttgaacgaggtggtgtctgaagcctttgtccgcttcttcgtggagattgtgggacactactctttgttcctgacgtcgggcgagcgtgaggagagaaccctgcagcgggaggccttccgcaaagctgtctcctccaagagcctccgccacttcctggaggtcttcatggagactcagatgtttcggggcttcatccaggagcgggagctgcgccggcaggatgccaaaggtctgtttgaggtccgagcccaagagtatctggaaacactccccagtggagagcacagcggtgtcaataagttcctgaagggactaggcaataaaatgaaatttctccacaagaaataactctcagcctcaagggaaaacttcctcctagtgcagccctatgctttaaaaacagttcctggtggcctttctgaaaggctgggtcccaggttgtcacggtgcggaactggaggccgcggtggcttctggccgaggctgggctcttccctggatgaggacctgggagccgcctgggaggacagccccagaaagggagcccgagaccaggcgtgtcgccgacatgcaaatgggttgttttggtggttgg

SEQ ID NO: 126237 - DNA, 537 bp, Homo sapiens
  Payload ID: 4755
  Gene Symbol: DENND2A
  Gene Name: DENN/MADD domain containing 2A
  ENST ID: ENST00000489552
  CDS Start-End: 266-537
agtgttggcgtatgctttgtacacctgggccacgcagcctgagcccacaggttcccggttctcaaaagagaggatgctcccccagtcatccccaaaagcctgccgaaggaagcgctcagtggtcaaggtggaaggtccaaggactgagaaagaccctcgaaggcatccactttagtcctccattccattcctagagactgatcaggagtcaggcttcagaaggagtcccctggaaggcctccacaacctcacgctagagtcaagaatggatatgttcagcttggatatgatcatcagtgacccagctgcagaagccagcagggctgggaagaagcagctcagaggtgttcagaacccttgcccatctgccagagccagaccccggcacaagtccctcaacataaaggacaagatatcagaatgggaagggaagaaagaggtgcccactcctgcacccagcaggagagcagacggacaggaggattatctgccgtcctctacggtggagaggaggagtagtgatggggtgagaactca

SEQ ID NO: 126238 - DNA, 542 bp, Homo sapiens
  Payload ID: 4755
  Gene Symbol: DENND2A
  Gene Name: DENN/MADD domain containing 2A
  ENST ID: ENST00000477488
  CDS Start-End: 307-542
actcccaggactgagcccggacgccgccgtctcgcgcctcggggacctgcagaaagccggtgacctggaactcccctcggtactgacatgatgacagtgtgcaggccggccaagggcagccacagccagactgaaaacctgagctacaaattggctgacaaggtcaaggtggaaggtccaaggactgagaaagaccctcgaaggcatccactttagtcctccattccattcctagagactgatcaggagtcaggcttcagaaggagtcccctggaaggcctccacaacctcacgctagagtcaagaatggatatgttcagcttggatatgatcatcagtgacccagctgcagaagccagcagggctgggaagaagcagctcagaggtgttcagaacccttgcccatctgccagagccagaccccggcacaagtccctcaacataaaggacaagatatcagaatgggaagggaagaaagaggtgcccactcctgcacccagcaggagagcagacggacaggaggattatctgccgtcctctac

SEQ ID NO: 126239 - DNA, 800 bp, Homo sapiens
  Payload ID: 4755
  Gene Symbol: DENND2A
  Gene Name: DENN/MADD domain containing 2A
  ENST ID: ENST00000491728
  CDS Start-End: 328-800
cagacccgccttccccgcagcccacggcatttccctgcggacttctgctgtgcagcctgtgttccttgacggtgtcctgcgtgacctggaactcccctcggtactgacatgatgacagtgtgcaggccggccaagggcagccacagccagactgaaaacctgagctacaaattggctgacaaggtcaaggtggaaggtccaaggactgagaaagaccctcgaaggcatccactttagtcctccattccattcctagagactgatcaggagtcaggcttcagaaggagtcccctggaaggcctccacaacctcacgctagagtcaagaatggatatgttcagcttggatatgatcatcagtgacccagctgcagaagccagcagggctgggaagaagcagctcagaggtgttcagaacccttgcccatctgccagagccagaccccggcacaagtccctcaacataaaggacaagatatcagaatgggaagggaagaaagaggtgcccactcctgcacccagcaggagagcagacggacaggaggattatctgccgtcctctacggtggagaggaggagtagtgatggggtgagaactcaggtcacagaggctaagaatggaatgaggccaggaacagagagcacagagaaggagaggaataaaggagcagtgaacgtcgggggacaggacccagagccggggcaagacctaagccagccagaacgggaagtggatcctagctggggccgaggccgagagccaagacttggcaagctacgctttcagaacgatcccctctc

SEQ ID NO: 126240 - DNA, 3614 bp, Homo sapiens
  Payload ID: 4755
  Gene Symbol: DENND2A
  Gene Name: DENN/MADD domain containing 2A
  Uniprot ID: Q9ULE3
  ENST ID: ENST00000492720
  CDS Start-End: 248-2635
gtgacctggaactcccctcggtactgacatgatgacagtgtgcaggccggccaagggcagccacagccagactgaaaacctgagctacaaattggctgacaaggtcaaggtggaaggtccaaggactgagaaagaccctcgaaggcatccactttagtcctccattccattcctagagactgatcaggagtcaggcttcagaaggagtcccctggaaggcctccacaacctcacgctagagtcaagaatggatatgttcagcttggatatgatcatcagtgacccagctgcagaagccagcagggctgggaagaagcagctcagaggtgttcagaacccttgcccatctgccagagccagaccccggcacaagtccctcaacataaaggacaagatatcagaatgggaagggaagaaagaggtgcccactcctgcacccagcaggagagcagacggacaggaggattatctgccgtcctctacggtggagaggaggagtagtgatggggtgagaactcaggtcacagaggctaagaatggaatgaggccaggaacagagagcacagagaaggagaggaataaaggagcagtgaacgtcgggggacaggacccagagccggggcaagacctaagccagccagaacgggaagtggatcctagctggggccgaggccgagagccaagacttggcaagctacgctttcagaacgatcccctctccgtgctgaagcaggtcaagaaactcgagcaggctttgaaggatgggtcggcagggctggatccccagttaccagggacttgttactccccacactgccctcctgacaaggcagaggcagggtccacccttcctgagaacctgggaggcgggagtggctcagaagtcagccagagggtccacccctcggacctggaaggcagggagcccacccctgagcttgtggaggacaggaaaggttcatgcagaaggccctgggaccggagccttgagaacgtgtataggggctcggagggttcccccacaaagcccttcatcaaccctctgccaaaaccccggagaacgttcaaacatgccggagaaggggacaaagatgggaagcctggcatcggcttcaggaaagagaaaagaaatctgcctcctctgccctctctacctcccccgcctctgccctcctctcccccaccttcctctgtgaacagaagactgtggaccgggagacagaaatccagtgcagaccacagaaagtcctatgagtttgaagatttactgcagtcttcctctgagagcagcagggtggactggtacgcgcagactaagctggggctgacacgcactttatcggaggagaacgtctatgaagacattctagatccgccaatgaaggagaacccttatgaggacatcgagttacatggtcgctgcctgggaaagaagtgtgtcttgaattttcctgcttctcccacctcttccatccctgacacactcaccaagcagtcattgtccaaacctgcttttttccgacaaaattcagagaggaggaacttcaagctgctggacactaggaagctgagtcgggatggaactgggtccccttccaaaatcagccctccctccactcccagcagccctgatgacattttctttaaccttggagacccacagaacggcaggaagaagagaaagatacccaagctggtgttgcgaatcaacgccatttatgaggtccggagaggaaagaaacgggtgaagaggctgtcccagtcaatggagagcaactcaggaaaagtgacagatgagaacagtgagtctgacagtgacacagaggagaagctgaaagctcacagccagcgcctggtcaacgtgaagtcccggctgaagcaggcgcctcggtacccatcacttgcccgggaactcatcgagtaccaggagaggcagctcttcgagtactttgtggttgtgtctttgcacaagaagcaggccggggctgcctacgtgccagaactcacccaacagttccctctgaagttggaaaggtctttcaagttcatgagagaagctgaggaccaactgaaggccattccccagttctgttttcccgatgccaaggattgggttcctgtccagcagttcaccagtgaaacattctcatttgtcttaactggagaagatgggagcagaaggttcggttactgccgaagactgctgcctggaggcaaagggaagcgccttcctgaagtttactgcattgtgagccgcctgggatgcttcagcctcttttcaaggatcttggatgaggtggaaaaaagacgaggcatctctcctgccctggttcagccactcatgagaagtgtcatggaagcccctttcccagccctgggcaaaaccatccttgtcaagaacttcctgccaggttcaggaactgaggtgatcgaactgtgccgcccgctggactcccggctcgagcacgtggactttgagtctctcttctcctccctcagcgtccgccacctggtctgtgtgtttgcctccctgcttctggagaggagggtcatcttcattgcagacaagctcaggtacccgccttggctacttctgctaaagcgtttgaatgacagtcgctcttggaccctctagtctgtagagcaggtgaccgcctagcattgaagagtaagcccttctgagataaggatggaataggctgggcgcggtgactcacacctgtaatctcagcactttgagaggctgaggtgggtggatcacttgagaccaggagttcgaggccagcctgtgcaacatggtgaaactccgtctctactaaaaatagaaaaattagccagccatggtggcccacgcttgttatcccagctacttgggaggctgaggcacgggaatcgattgaacctgggaggtggacattgcagtgagctgagatctcaccactgcactccagcttgggcaacagagggagaccttccctcctgcccccacaaataaaggatggccaggcacggtggctcatgcctgtaatcctagcacttcgggaggccgaggcaggcggatcacctgaggtcaggagttcaagaccagcctggccaacatgatgaaactcagtctctactaaagatacaaaaatcagccagtcatggtggctcgtgcttgtaacaccagctacttgagaggctgaggtacaagaatcgcttgaacccaggaggcagaggctgcagtgagctgagatcgcaccattgcactccagcctgagcaacagaatgacattccatctcaaaaataaaaataaaataggccaggcgcagtggctcacacttgtaatcccagcactttgggaggccgaggcgggtggatcacaaggtcaagagattgagaccatcctggccaacatggtgaaactccgtctctgctaaaaatacaaaaattagctgggcatggtggcgtgtgcctgtagtcccagctactcaagaggctgaggcaggagaattgcttgaacccaggaggcagaggttgcagtgagccgagatcatgccactgcactccagcctggtgacagagcgagactccatctcaaaaaataaaaaataaaataaaataaaggatggaa

SEQ ID NO: 126241 - DNA, 3562 bp, Homo sapiens
  Payload ID: 4755
  Gene Symbol: DENND2A
  Gene Name: DENN/MADD domain containing 2A
  Uniprot ID: Q9ULE3
  ENST ID: ENST00000496613
  CDS Start-End: 290-3319
aagatgcgccccagagcccgcggagccgccgcccgcggggaggtgacctggaactcccctcggtactgacatgatgacagtgtgcaggccggccaagggcagccacagccagactgaaaacctgagctacaaattggctgacaaggtcaaggtggaaggtccaaggactgagaaagaccctcgaaggcatccactttagtcctccattccattcctagagactgatcaggagtcaggcttcagaaggagtcccctggaaggcctccacaacctcacgctagagtcaagaatggatatgttcagcttggatatgatcatcagtgacccagctgcagaagccagcagggctgggaagaagcagctcagaggtgttcagaacccttgcccatctgccagagccagaccccggcacaagtccctcaacataaaggacaagatatcagaatgggaagggaagaaagaggtgcccactcctgcacccagcaggagagcagacggacaggaggattatctgccgtcctctacggtggagaggaggagtagtgatggggtgagaactcaggtcacagaggctaagaatggaatgaggccaggaacagagagcacagagaaggagaggaataaaggagcagtgaacgtcgggggacaggacccagagccggggcaagacctaagccagccagaacgggaagtggatcctagctggggccgaggccgagagccaagacttggcaagctacgctttcagaacgatcccctctccgtgctgaagcaggtcaagaaactcgagcaggctttgaaggatgggtcggcagggctggatccccagttaccagggacttgttactccccacactgccctcctgacaaggcagaggcagggtccacccttcctgagaacctgggaggcgggagtggctcagaagtcagccagagggtccacccctcggacctggaaggcagggagcccacccctgagcttgtggaggacaggaaaggttcatgcagaaggccctgggaccggagccttgagaacgtgtataggggctcggagggttcccccacaaagcccttcatcaaccctctgccaaaaccccggagaacgttcaaacatgccggagaaggggacaaagatgggaagcctggcatcggcttcaggaaagagaaaagaaatctgcctcctctgccctctctacctcccccgcctctgccctcctctcccccaccttcctctgtgaacagaagactgtggaccgggagacagaaatccagtgcagaccacagaaagtcctatgagtttgaagatttactgcagtcttcctctgagagcagcagggtggactggtacgcgcagactaagctggggctgacacgcactttatcggaggagaacgtctatgaagacattctagatccgccaatgaaggagaacccttatgaggacatcgagttacatggtcgctgcctgggaaagaagtgtgtcttgaattttcctgcttctcccacctcttccatccctgacacactcaccaagcagtcattgtccaaacctgcttttttccgacaaaattcagagaggaggaacttcaagctgctggacactaggaagctgagtcgggatggaactgggtccccttccaaaatcagccctccctccactcccagcagccctgatgacattttctttaaccttggagacccacagaacggcaggaagaagagaaagatacccaagctggtgttgcgaatcaacgccatttatgaggtccggagaggaaagaaacgggtgaagaggctgtcccagtcaatggagagcaactcaggaaaagtgacagatgagaacagtgagtctgacagtgacacagaggagaagctgaaagctcacagccagcgcctggtcaacgtgaagtcccggctgaagcaggcgcctcggtacccatcacttgcccgggaactcatcgagtaccaggagaggcagctcttcgagtactttgtggttgtgtctttgcacaagaagcaggccggggctgcctacgtgccagaactcacccaacagttccctctgaagttggaaaggtctttcaagttcatgagagaagctgaggaccaactgaaggccattccccagttctgttttcccgatgccaaggattgggttcctgtccagcagttcaccagtgaaacattctcatttgtcttaactggagaagatgggagcagaaggttcggttactgccgaagactgctgcctggaggcaaagggaagcgccttcctgaagtttactgcattgtgagccgcctgggatgcttcagcctcttttcaaggatcttggatgaggtggaaaaaagacgaggcatctctcctgccctggttcagccactcatgagaagtgtcatggaagcccctttcccagccctgggcaaaaccatccttgtcaagaacttcctgccaggttcaggaactgaggtgatcgaactgtgccgcccgctggactcccggctcgagcacgtggactttgagtctctcttctcctccctcagcgtccgccacctggtctgtgtgtttgcctccctgcttctggagaggagggtcatcttcattgcagacaagctcagcatcctgtccaagtgctgccacgcgatggtggcgctgatctaccccttcgcctggcagcacacctacatcccggtgctgccacccgccatggtcgacatcgtgtgctcgccgacgcccttcctcatcgggctgctctccagctcgctgccactgctcagggagctgccgctggaagaggtccttgtggttgacctcgtcaacagccggttcctcagacagatggacgatgaggactccatcctgccccggaagcttcaggtggccctggaacacattctggaacagaggaacgagctggcttgtgagcaggacgaagggcccctagacggcaggcacggtccagagtccagccccttgaacgaggtggtgtctgaagcctttgtccgcttcttcgtggagattgtgggacactactctttgttcctgacgtcgggcgagcgtgaggagagaaccctgcagcgggaggccttccgcaaagctgtctcctccaagagcctccgccacttcctggaggtcttcatggagactcagatgtttcggggcttcatccaggagcgggagctgcgccggcaggatgccaaaggtctgtttgaggtccgagcccaagagtatctggaaacactccccagtggagagcacagcggtgtcaataagttcctgaagggactaggcaataaaatgaaatttctccacaagaaataactctcagcctcaagggaaaacttcctcctagtgcagccctatgctttaaaaacagttcctggtggcctttctgaaaggctgggtcccaggttgtcacggtgcggaactggaggccgcggtggcttctggccgaggctgggctcttccctggatgaggacctgggagccgcctgggaggacagccccagaaagggagcccgagaccaggcgtgtcgccgacatgcaaatgggttgttttggtgg

SEQ ID NO: 126242 - DNA, 490 bp, Homo sapiens
  Payload ID: 4755
  Gene Symbol: DENND2A
  Gene Name: DENN/MADD domain containing 2A
  ENST ID: ENST00000469373
  CDS Start-End: 1-490
cctggaggcaaagggaagcgccttcctgaagtttactgcattgtgagccgcctgggatgcttcagcctcttttcaaggatcttggatgaggtggaaaaaagacgaggcatctctcctgccctggttcagccactcatgagaagtgtcatggaagcccctttcccagccctgggcaaaaccatccttgtcaagaacttcctgccaggttcaggaactgaggtgatcgaactgtgccgcccgctggactcccggctcgagcacgtggactttgagtctctcttctcctccctcagcgtccgccacctggtctgtgtgtttgcctccctgcttctggagaggagggtcatcttcattgcagacaagctcagcacacctacatcccggtgctgccacccgccatggtcgacatcgtgtgctcgccgacgcccttcctcatcgggctgctctccagctcgctgccactgctcagggagctgccgctggaagaggt

SEQ ID NO: 126243 - DNA, 828 bp, Homo sapiens
  Payload ID: 4755
  Gene Symbol: DENND2A
  Gene Name: DENN/MADD domain containing 2A
  ENST ID: ENST00000475837
  CDS Start-End: 420-735
ggaggcaggggccgcgggcgagcctgcgctgggccggccgagggaagcgcgccgctggggccgggggcggcggggaccccacgggagcgcgcgcggcggggacccccaggggcttgcgggcggccgggggaggctcggcggacaaaggggcggagggcggagggccatggcgtccccggcacccgccgccgcccgcccccgagccgcgccgccagccgtcccggcccgccccggagcccccaagatgcgccccagagcccgcggagccgccgcccgcggggagaaagtcctatgagtttgaagatttactgcagtcttcctctgagagcagcagggtggactggtacgcgcagactaagctggggctgacacgcactttatcggaggagaacgtctatgaagacattctagatccgccaatgaaggagaacccttatgaggacatcgagttacatggtcgctgcctgggaaagaagtgtgtcttgaattttcctgcttctcccacctcttccatccctgacacactcaccaagcagtcattgtccaaacctgcttttttccgacaaaattcagagaggaggaacttcaagctgctggacactaggaagctgagtcgggatggaactgggtccccttccaaaatcagccctccctccactcccagcagccctgatgacattttctttaaccttggagacccacagaacggcaggaagaagagaaagatacccaagctggtgttgcgaatcaacgccatttatgaggtccggagaggaaagaaacgggtgaagaggctgtcccagtcaatggagagcaactcaggaaaag

SEQ ID NO: 126244 - DNA, 3452 bp, Homo sapiens
  Payload ID: 4755
  Gene Symbol: DENND2A
  Gene Name: DENN/MADD domain containing 2A
  Uniprot ID: Q9ULE3
  ENST ID: ENST00000537639
  CDS Start-End: 146-3175
ggtcaaggtggaaggtccaaggactgagaaagaccctcgaaggcatccactttagtcctccattccattcctagagactgatcaggagtcaggcttcagaaggagtcccctggaaggcctccacaacctcacgctagagtcaagaatggatatgttcagcttggatatgatcatcagtgacccagctgcagaagccagcagggctgggaagaagcagctcagaggtgttcagaacccttgcccatctgccagagccagaccccggcacaagtccctcaacataaaggacaagatatcagaatgggaagggaagaaagaggtgcccactcctgcacccagcaggagagcagacggacaggaggattatctgccgtcctctacggtggagaggaggagtagtgatggggtgagaactcaggtcacagaggctaagaatggaatgaggccaggaacagagagcacagagaaggagaggaataaaggagcagtgaacgtcgggggacaggacccagagccggggcaagacctaagccagccagaacgggaagtggatcctagctggggccgaggccgagagccaagacttggcaagctacgctttcagaacgatcccctctccgtgctgaagcaggtcaagaaactcgagcaggctttgaaggatgggtcggcagggctggatccccagttaccagggacttgttactccccacactgccctcctgacaaggcagaggcagggtccacccttcctgagaacctgggaggcgggagtggctcagaagtcagccagagggtccacccctcggacctggaaggcagggagcccacccctgagcttgtggaggacaggaaaggttcatgcagaaggccctgggaccggagccttgagaacgtgtataggggctcggagggttcccccacaaagcccttcatcaaccctctgccaaaaccccggagaacgttcaaacatgccggagaaggggacaaagatgggaagcctggcatcggcttcaggaaagagaaaagaaatctgcctcctctgccctctctacctcccccgcctctgccctcctctcccccaccttcctctgtgaacagaagactgtggaccgggagacagaaatccagtgcagaccacagaaagtcctatgagtttgaagatttactgcagtcttcctctgagagcagcagggtggactggtacgcgcagactaagctggggctgacacgcactttatcggaggagaacgtctatgaagacattctagatccgccaatgaaggagaacccttatgaggacatcgagttacatggtcgctgcctgggaaagaagtgtgtcttgaattttcctgcttctcccacctcttccatccctgacacactcaccaagcagtcattgtccaaacctgcttttttccgacaaaattcagagaggaggaacttcaagctgctggacactaggaagctgagtcgggatggaactgggtccccttccaaaatcagccctccctccactcccagcagccctgatgacattttctttaaccttggagacccacagaacggcaggaagaagagaaagatacccaagctggtgttgcgaatcaacgccatttatgaggtccggagaggaaagaaacgggtgaagaggctgtcccagtcaatggagagcaactcaggaaaagtgacagatgagaacagtgagtctgacagtgacacagaggagaagctgaaagctcacagccagcgcctggtcaacgtgaagtcccggctgaagcaggcgcctcggtacccatcacttgcccgggaactcatcgagtaccaggagaggcagctcttcgagtactttgtggttgtgtctttgcacaagaagcaggccggggctgcctacgtgccagaactcacccaacagttccctctgaagttggaaaggtctttcaagttcatgagagaagctgaggaccaactgaaggccattccccagttctgttttcccgatgccaaggattgggttcctgtccagcagttcaccagtgaaacattctcatttgtcttaactggagaagatgggagcagaaggttcggttactgccgaagactgctgcctggaggcaaagggaagcgccttcctgaagtttactgcattgtgagccgcctgggatgcttcagcctcttttcaaggatcttggatgaggtggaaaaaagacgaggcatctctcctgccctggttcagccactcatgagaagtgtcatggaagcccctttcccagccctgggcaaaaccatccttgtcaagaacttcctgccaggttcaggaactgaggtgatcgaactgtgccgcccgctggactcccggctcgagcacgtggactttgagtctctcttctcctccctcagcgtccgccacctggtctgtgtgtttgcctccctgcttctggagaggagggtcatcttcattgcagacaagctcagcatcctgtccaagtgctgccacgcgatggtggcgctgatctaccccttcgcctggcagcacacctacatcccggtgctgccacccgccatggtcgacatcgtgtgctcgccgacgcccttcctcatcgggctgctctccagctcgctgccactgctcagggagctgccgctggaagaggtccttgtggttgacctcgtcaacagccggttcctcagacagatggacgatgaggactccatcctgccccggaagcttcaggtggccctggaacacattctggaacagaggaacgagctggcttgtgagcaggacgaagggcccctagacggcaggcacggtccagagtccagccccttgaacgaggtggtgtctgaagcctttgtccgcttcttcgtggagattgtgggacactactctttgttcctgacgtcgggcgagcgtgaggagagaaccctgcagcgggaggccttccgcaaagctgtctcctccaagagcctccgccacttcctggaggtcttcatggagactcagatgtttcggggcttcatccaggagcgggagctgcgccggcaggatgccaaaggtctgtttgaggtccgagcccaagagtatctggaaacactccccagtggagagcacagcggtgtcaataagttcctgaagggactaggcaataaaatgaaatttctccacaagaaataactctcagcctcaagggaaaacttcctcctagtgcagccctatgctttaaaaacagttcctggtggcctttctgaaaggctgggtcccaggttgtcacggtgcggaactggaggccgcggtggcttctggccgaggctgggctcttccctggatgaggacctgggagccgcctgggaggacagccccagaaagggagcccgagaccaggcgtgtcgccgacatgcaaatgggttgttttggtggttgggtttttttttttatcttagatattaaaagt

SEQ ID NO: 126245 - DNA, 6163 bp, Homo sapiens
  Payload ID: 4756
  Gene Symbol: DENND2C
  Gene Name: DENN/MADD domain containing 2C
  Uniprot ID: Q68D51
  ENST ID: ENST00000393274
  CDS Start-End: 627-3413
tgatacccgggagactagcttggccacaggagacaacgttgaggtacagacaggtggcagagaaacaaacatcggtattgcttaaaccacttgctatttccagttccggctgtatgtaccaaaacttaatcttatatagtaccccaaagaggtgctatgaaaattaattgtgatagtgtgattgaagtgattggcacatagtatttaacaaaatatttaatgaagtgtaatcactgttcttgctgttttaattctcacaatactctgtatgaagtgggtgttcaataagtatttgatgaatctttaaaaatttgctaggtctaccataaccaaataccgcagattgagtggttcaaacgccagagattgatattctcacaagtctggaggctgtagaaatctaacatcaaggtgccaacagggattattcaagatcaggttgtagccattttcaacaaggatcactgatcaaaattttctttttacaaagagatttacaagttaaacatgaagggaaaatactggaatcatttggattctgacaggataaagaatacaatatttcacatttacttgtaatggaacctttgtaagattcatcacttgtcattcacccagttgggaacatggatgttggtttttctcgtactactgttcagacactgtcaagaagccactgcaaaaacatcaaacaaaaaatttctcaatgggaaggaagggctaatggtatatctaatccagaaaagtggtgtccaaaggactttggagtgagatataactgtcaccaagagatccgtcttaagaaaaatcctatagctgagagaaagagcaaaaacttggatgtaaccagccgtgaaaatgtgggtctagatataaatgaaaataccaaaagccatgatcaaagtgagaatgaaaataagaaacatgaatatgacgatacacacttctttaaaaatgaatcagaatccaactgggtatgttctcgggtcaaagaaattgaaagctgtaaagaagatgtcttagatccagagacttcattacctccaggaaacttctatacctcacaaatactgtggaagaaaatagaagcacttcccccagataaactcttaaatttggctttagaacattgtgactcttcagaaaaagaactgaacttcagagttctggatagttcatacggaataaccaagagcttagaaaatatttactctgaacctgaggggcaagaatgtggaccttccataaatcctttgccaaaacctcgtaggacattcagatatttatccgaatctggtgttacgccgtataaagaaagaaactgtgacaaaaaatactgtgaaaataactcttgtgcacaatcttctttggcctcttctcaggaacctgaaccaaagaaatatggtggaaaaatcagaggaagatctaaaaggaaatcctttgaatttgaggatattcagcactttcgaaatcggaactcacagacgattcgtgaagaacttggaagaaattctgggtcagcactttattacacacagtctgaggacaatatctatgaagatatcatatatcccaccaaagaaaatccatatgaagatattccagtgcagcctttacctatgtggagatccccttcagcatggaagctaccacccgctaaaagtgcttttaaagcacccaagctccctccaaaacctcagttccttcaccggaagactatggaagtaaagaactcacaggcttatttgcggtcaaagcttacaaaagatacaactttgccggtcactttaacggaatggaagcttttccgagctggtgaagttgcaaacacgaaaaggaaaaatcttccaaggcttgtattgaaaatagatgacatatttgaatctaaaagagggaagaagaaggtaaagttacattcttacactggaaaggaattacctccgacaaaaggtgaaaccagtgggaacgaaagtgatgccgagtatctgccaaagaatcgccataaacgcttagcacaactgcaaccgtcttccaagaggaatcctcactaccagaccttggagcgggatcttattgaattacaggagcagcagctgtttgaactttttgtggtggtgtctctacagaagaaaccatcaggaataagctatattccccaggtcatacaacaattccctggcaaggatgatcatggctataagcagtccaaagacatggaagagagacttaaagttattccaaaattttgttttcctgattcaaaggactggatgccaacctcagaactcaagagtgaaacattctcctttgtcttgactggtgaagatggaagccggtggtttggttactgtaagaagctcttgccagtaggcaaaggaaagcgactccctgaggtatactgcatggttagtcgcctaggctgcttcaatcttttttcaaagattctggatgaagtagagaagagaagagaaatgtctccagcccttgtttacccattcatgcgaagtgtcatggaagctcctttcccagctcctggacgcaccatcacagttaagagttacctccctggggctggagatgagtccattgaactctgccgaccactagattcccgattggaacatgttgattttaaatgtctctttaagtgcctgagtgtgtgtcatctcatccgggtctgtgcctctctccttttggagcgtagggtaatctttgttgccaacagcctaagcaccctgtcaaaatgtggccatgctgtggtagctacactgtatccgttcacctggcagcatacctatatcccagtcctgccagcatctatgattgacatcgtgtgctcacctacaccattccttattggaatcctgtcttgctccttaccacagctccaggacctacccattgaagaggtgctgatagttgatctctgtgcagacaagttcttacaggaggtatctgatgaggatgaaattctaccaccaaaacttcaagctgccctgatgcagattttggaagaacgaaatgaaatcttgactcaggagcagaatttttcacaagatgtgacactcaactctctggtgtccgaagcatttgtcaggttttttgtggagttggtaggacattattctttgaacatgactgtcactgagcgtggggagcgtgttttccaaagggaaccattccgtaagtcccacacctcccgaagtgtacgccacttcctggatctcttcatggaaactcagatgtttgcaggattcatccaggaccgagagcttcggaaaagtggagttaaaggtttgtttgagatccgggccatccagtatttggaaacaattcctgagtcggagcccagtgggatgaatagaattttgcggagtcttggaagcaaaatgaaatttctgcaaaagaaatgaaatctctgattgtctccatcctgaatatacaacagaaagtgccaaagaaaatatttttctaagggtcaggatcccatgaagtattctacaaaattcttgaaattttaaaaggttaaagagcgagtcaggctgttagaggaggattctcctgttgctgctgtagtaatcactggagaattgttgggaatggtctggcaccatgccatctttactctgtctccattttttttttatagcagccttttctatgtgattcttgggctcattctctgttttgtgctttgtctgtgaaagtagttgtgtttcacaaggaaaagccttgttgttgttacatttaaaaaatagctcaaagatgagaataatgagagaaatgctgagtttaaggtagtagagagacatgatggaaatggagaacactagccttatacacataattctcatcactgaactatcatggcccctttaaacccatgggctgtttgacctgggctaaggaatagactcatcacatatctccattgttttgccttatattatatctaggggaatctcacttaggaggaagccctacttgtaatattataaggtactgttattaagtaccttataaaattagacatcttgcaactcctcctccaaattatgtggcatttgagtagtttgcttgtgcctcacatgtcaacattaaactttgtggaggctggatgcagtggctcacacctgtaatctccaccactttgggaggctaaggcaggagtttgagggtgggagtttgagactagcctgggcaacatagcaagatcccatctctacaaaaacattttaaaaataagtaaataaatttaaactttgtgaaattatagctaatatgaaaatgtcctttcaagggcatgggagccacctttattttttagtgtccaccatgtgccatgcactgtggtatatgtatgcatatcatctcaaccaatccttaaatcaaccttatgagatagatatttgcatctccattttactaataaactgaggctgggtgctatggctcacgtctgtaatcccagcactatgggagtccaaggcgagtggatcatttgaggtcaggagttcgagaccagcctggcaacatggtgaaactctgtctctactaaaaatacacacaaaaaattagctgggtgtggtggcaggtgcctgtaatcctggctgctcgggaggctgagccatgagaatcgcttgagcccaggaggcagaggttgcagtgagccgagatcgcgccactgcattccagccagggtgacagagcgagactccatctcaaaaaaaagaaaaaaggaaaagaaaaaagaaaaaaacaaattcaaagaagttaaatacgttgcccaaagttgtacaacacagaactgaagccaagacttttatggacacagaaaaagttggttagtcctacagatggaaatttcatctcagtaggattatatagctatttcttttattaataaaaattttctattaagtgtaccagagccacttttcagctctgaggataaggaactttataggtgcctagatgagactctttttattcccctagaaatgttgaaatttttgctctaattaaattagactcaaaatatgaacattccttgaacatataccacttagtcatccagacctttaatatctaaagtagtagtagtagtgattggaaagagaaagttttcagtgatggtgcagtgttttttttgtgtgtgtatgtgtgtgtgtgtgtgttttgtttcggttttttttttttttttttgagatggagtttcgctctttttgcccaggctggagtgcaatggtgtgatctcggctcactgcaacctccgcctcccggcttcaagcaattctcctgcctcagcctcctgagtagctggaattataggcacccgccaccacacctggctaattttgtacttttagtggagacgggggtttcaccatgttggccaggctggtctcgaactcctgacctcaggtgatccacccaccttggcctcccaaagtgctgggattacaggcatgagtcactgcacccggcctgtgtgtgtgtgtgtgtgtgtgtgtgtgtgttttcaaactcatgggcaaattcaagttcagatggtgcacttttcattgattaatgttatagcaaatgtcagtttgttttcttcagtttctgctgatggttttaactggcacagaaagtatttattcaaccttacaaaactgtgtaagttgtattgtgatacagtttattgacttgtacagtattgtcattacaacccattcaggtatgcatgaatctgaagcagaacaccatttaagactggtgctgtataatataattcctacagatgtgggtccagggaatagaactgagcctgtcttttttttaatgttaagcaggttacccccagtggggcttctactagacatctctccatttggtctcttcttacactccaacccagcaggaacagttaataattggatgtttataaaatgggggtaaaagggtttactgtgatggatcctggctatccctctaggaggagacctttgcttcagcaatggtgtcttcatcctcgcagcctgaagctgcttcatttccttaggtctgttgtgttttctgtaaagtgttaggaattctggatatttttgtaaaagaatcaagatttgtataaaatgttgtttacagatcttttaatgaataaatacataaaccccccaca

SEQ ID NO: 126246 - DNA, 5701 bp, Homo sapiens
  Payload ID: 4756
  Gene Symbol: DENND2C
  Gene Name: DENN/MADD domain containing 2C
  Uniprot ID: Q68D51
  ENST ID: ENST00000393276
  CDS Start-End: 334-2949
ggggctagggggtggggctgcagccgggacggggccttcggcagggcctgcgggggcgggacggagcggacccgagtgatacccgggagactagcttggccacaggagacaacgttgaggtacagacaggattattcaagatcaggttgtagccattttcaacaaggatcactgatcaaaattttctttttacaaagagatttacaagttaaacatgaagggaaaatactggaatcatttggattctgacaggataaagaatacaatatttcacatttacttgtaatggaacctttgtaagattcatcacttgtcattcacccagttgggaacatggatgttggtttttctcgtactactgttcagacactgtcaagaagccactgcaaaaacatcaaacaaaaaatttctcaatgggaaggaagggctaatggtatatctaatccagaaaagtggtgtccaaaggactttggagtgagatataactgtcaccaagagatccgtcttaagaaaaatcctatagctgagagaaagagcaaaaacttggatgtaaccagccgtgaaaatgtgggtctagatataaatgaaaataccaaaagccatgatcaaagtgagaatgaaaataagaaacatgaatatgacgatacacacttctttaaaaatgaatcagaatccaactgggtatgttctcgggtcaaagaaattgaaagctgtaaagaagatgtcttagatccagagacttcattacctccaggaaacttctatacctcacaaatactgtggaagaaaatagaagcacttcccccagataaactcttaaatttggctttagaacattgtgactcttcagaaaaagaactgaacttcagagttctggatagttcatacggaataaccaagagcttagaaaatatttactctgaacctgaggggcaagaatgtggaccttccataaatcctttgccaaaacctcgtaggacattcagatatttatccgaatctggtgttacgccgtataaagaaagaaactgtgacaaaaaatactgtgaaaataactcttgtgcacaatcttctttggcctcttctcaggaacctgaaccaaagaaatatggtggaaaaatcagaggaagatctaaaaggaaatcctttgaatttgaggatattcagcactttcgaaatcggaactcacagacgattcgtgaagaacttggaagaaattctgggtcagcactttattacacacagtctgaggacaatatctatgaagatatcatatatcccaccaaagaaaatccatatgaagatattccagtgcagcctttacctatgtggagatccccttcagcatggaagctaccacccgctaaaagtgcttttaaagcacccaagcttgtattgaaaatagatgacatatttgaatctaaaagagggaagaagaaggtaaagttacattcttacactggaaaggaattacctccgacaaaaggtgaaaccagtgggaacgaaagtgatgccgagtatctgccaaagaatcgccataaacgcttagcacaactgcaaccgtcttccaagaggaatcctcactaccagaccttggagcgggatcttattgaattacaggagcagcagctgtttgaactttttgtggtggtgtctctacagaagaaaccatcaggaataagctatattccccaggtcatacaacaattccctggcaaggatgatcatggctataagcagtccaaagacatggaagagagacttaaagttattccaaaattttgttttcctgattcaaaggactggatgccaacctcagaactcaagagtgaaacattctcctttgtcttgactggtgaagatggaagccggtggtttggttactgtaagaagctcttgccagtaggcaaaggaaagcgactccctgaggtatactgcatggttagtcgcctaggctgcttcaatcttttttcaaagattctggatgaagtagagaagagaagagaaatgtctccagcccttgtttacccattcatgcgaagtgtcatggaagctcctttcccagctcctggacgcaccatcacagttaagagttacctccctggggctggagatgagtccattgaactctgccgaccactagattcccgattggaacatgttgattttaaatgtctctttaagtgcctgagtgtgtgtcatctcatccgggtctgtgcctctctccttttggagcgtagggtaatctttgttgccaacagcctaagcaccctgtcaaaatgtggccatgctgtggtagctacactgtatccgttcacctggcagcatacctatatcccagtcctgccagcatctatgattgacatcgtgtgctcacctacaccattccttattggaatcctgtcttgctccttaccacagctccaggacctacccattgaagaggtgctgatagttgatctctgtgcagacaagttcttacaggaggtatctgatgaggatgaaattctaccaccaaaacttcaagctgccctgatgcagattttggaagaacgaaatgaaatcttgactcaggagcagaatttttcacaagatgtgacactcaactctctggtgtccgaagcatttgtcaggttttttgtggagttggtaggacattattctttgaacatgactgtcactgagcgtggggagcgtgttttccaaagggaaccattccgtaagtcccacacctcccgaagtgtacgccacttcctggatctcttcatggaaactcagatgtttgcaggattcatccaggaccgagagcttcggaaaagtggagttaaaggtttgtttgagatccgggccatccagtatttggaaacaattcctgagtcggagcccagtgggatgaatagaattttgcggagtcttggaagcaaaatgaaatttctgcaaaagaaatgaaatctctgattgtctccatcctgaatatacaacagaaagtgccaaagaaaatatttttctaagggtcaggatcccatgaagtattctacaaaattcttgaaattttaaaaggttaaagagcgagtcaggctgttagaggaggattctcctgttgctgctgtagtaatcactggagaattgttgggaatggtctggcaccatgccatctttactctgtctccattttttttttatagcagccttttctatgtgattcttgggctcattctctgttttgtgctttgtctgtgaaagtagttgtgtttcacaaggaaaagccttgttgttgttacatttaaaaaatagctcaaagatgagaataatgagagaaatgctgagtttaaggtagtagagagacatgatggaaatggagaacactagccttatacacataattctcatcactgaactatcatggcccctttaaacccatgggctgtttgacctgggctaaggaatagactcatcacatatctccattgttttgccttatattatatctaggggaatctcacttaggaggaagccctacttgtaatattataaggtactgttattaagtaccttataaaattagacatcttgcaactcctcctccaaattatgtggcatttgagtagtttgcttgtgcctcacatgtcaacattaaactttgtggaggctggatgcagtggctcacacctgtaatctccaccactttgggaggctaaggcaggagtttgagggtgggagtttgagactagcctgggcaacatagcaagatcccatctctacaaaaacattttaaaaataagtaaataaatttaaactttgtgaaattatagctaatatgaaaatgtcctttcaagggcatgggagccacctttattttttagtgtccaccatgtgccatgcactgtggtatatgtatgcatatcatctcaaccaatccttaaatcaaccttatgagatagatatttgcatctccattttactaataaactgaggctgggtgctatggctcacgtctgtaatcccagcactatgggagtccaaggcgagtggatcatttgaggtcaggagttcgagaccagcctggcaacatggtgaaactctgtctctactaaaaatacacacaaaaaattagctgggtgtggtggcaggtgcctgtaatcctggctgctcgggaggctgagccatgagaatcgcttgagcccaggaggcagaggttgcagtgagccgagatcgcgccactgcattccagccagggtgacagagcgagactccatctcaaaaaaaagaaaaaaggaaaagaaaaaagaaaaaaacaaattcaaagaagttaaatacgttgcccaaagttgtacaacacagaactgaagccaagacttttatggacacagaaaaagttggttagtcctacagatggaaatttcatctcagtaggattatatagctatttcttttattaataaaaattttctattaagtgtaccagagccacttttcagctctgaggataaggaactttataggtgcctagatgagactctttttattcccctagaaatgttgaaatttttgctctaattaaattagactcaaaatatgaacattccttgaacatataccacttagtcatccagacctttaatatctaaagtagtagtagtagtgattggaaagagaaagttttcagtgatggtgcagtgttttttttgtgtgtgtatgtgtgtgtgtgtgtgttttgtttcggttttttttttttttttttgagatggagtttcgctctttttgcccaggctggagtgcaatggtgtgatctcggctcactgcaacctccgcctcccggcttcaagcaattctcctgcctcagcctcctgagtagctggaattataggcacccgccaccacacctggctaattttgtacttttagtggagacgggggtttcaccatgttggccaggctggtctcgaactcctgacctcaggtgatccacccaccttggcctcccaaagtgctgggattacaggcatgagtcactgcacccggcctgtgtgtgtgtgtgtgtgtgtgtgtgtgtgttttcaaactcatgggcaaattcaagttcagatggtgcacttttcattgattaatgttatagcaaatgtcagtttgttttcttcagtttctgctgatggttttaactggcacagaaagtatttattcaaccttacaaaactgtgtaagttgtattgtgatacagtttattgacttgtacagtattgtcattacaacccattcaggtatgcatgaatctgaagcagaacaccatttaagactggtgctgtataatataattcctacagatgtgggtccagggaatagaactgagcctgtcttttttttaatgttaagcaggttacccccagtggggcttctactagacatctctccatttggtctcttcttacactccaacccagcaggaacagttaataattggatgtttataaaatgggggtaaaagggtttactgtgatggatcctggctatccctctaggaggagacctttgcttcagcaatggtgtcttcatcctcgcagcctgaagctgcttcatttccttaggtctgttgtgttttctgtaaagtgttaggaattctggatatttttgtaaaagaatcaagatttgtataaaatgttgtttacagatcttttaatgaataaatacataaaccccccacaga

SEQ ID NO: 126247 - DNA, 4730 bp, Homo sapiens
  Payload ID: 4756
  Gene Symbol: DENND2C
  Gene Name: DENN/MADD domain containing 2C
  Uniprot ID: Q68D51
  ENST ID: ENST00000393277
  CDS Start-End: 210-2996
aacaggattattcaagatcaggttgtagccattttcaacaaggatcactgatcaaaattttctttttacaaagagatttacaagttaaacatgaagggaaaatactggaatcatttggattctgacaggataaagaatacaatatttcacatttacttgtaatggaacctttgtaagattcatcacttgtcattcacccagttgggaacatggatgttggtttttctcgtactactgttcagacactgtcaagaagccactgcaaaaacatcaaacaaaaaatttctcaatgggaaggaagggctaatggtatatctaatccagaaaagtggtgtccaaaggactttggagtgagatataactgtcaccaagagatccgtcttaagaaaaatcctatagctgagagaaagagcaaaaacttggatgtaaccagccgtgaaaatgtgggtctagatataaatgaaaataccaaaagccatgatcaaagtgagaatgaaaataagaaacatgaatatgacgatacacacttctttaaaaatgaatcagaatccaactgggtatgttctcgggtcaaagaaattgaaagctgtaaagaagatgtcttagatccagagacttcattacctccaggaaacttctatacctcacaaatactgtggaagaaaatagaagcacttcccccagataaactcttaaatttggctttagaacattgtgactcttcagaaaaagaactgaacttcagagttctggatagttcatacggaataaccaagagcttagaaaatatttactctgaacctgaggggcaagaatgtggaccttccataaatcctttgccaaaacctcgtaggacattcagatatttatccgaatctggtgttacgccgtataaagaaagaaactgtgacaaaaaatactgtgaaaataactcttgtgcacaatcttctttggcctcttctcaggaacctgaaccaaagaaatatggtggaaaaatcagaggaagatctaaaaggaaatcctttgaatttgaggatattcagcactttcgaaatcggaactcacagacgattcgtgaagaacttggaagaaattctgggtcagcactttattacacacagtctgaggacaatatctatgaagatatcatatatcccaccaaagaaaatccatatgaagatattccagtgcagcctttacctatgtggagatccccttcagcatggaagctaccacccgctaaaagtgcttttaaagcacccaagctccctccaaaacctcagttccttcaccggaagactatggaagtaaagaactcacaggcttatttgcggtcaaagcttacaaaagatacaactttgccggtcactttaacggaatggaagcttttccgagctggtgaagttgcaaacacgaaaaggaaaaatcttccaaggcttgtattgaaaatagatgacatatttgaatctaaaagagggaagaagaaggtaaagttacattcttacactggaaaggaattacctccgacaaaaggtgaaaccagtgggaacgaaagtgatgccgagtatctgccaaagaatcgccataaacgcttagcacaactgcaaccgtcttccaagaggaatcctcactaccagaccttggagcgggatcttattgaattacaggagcagcagctgtttgaactttttgtggtggtgtctctacagaagaaaccatcaggaataagctatattccccaggtcatacaacaattccctggcaaggatgatcatggctataagcagtccaaagacatggaagagagacttaaagttattccaaaattttgttttcctgattcaaaggactggatgccaacctcagaactcaagagtgaaacattctcctttgtcttgactggtgaagatggaagccggtggtttggttactgtaagaagctcttgccagtaggcaaaggaaagcgactccctgaggtatactgcatggttagtcgcctaggctgcttcaatcttttttcaaagattctggatgaagtagagaagagaagagaaatgtctccagcccttgtttacccattcatgcgaagtgtcatggaagctcctttcccagctcctggacgcaccatcacagttaagagttacctccctggggctggagatgagtccattgaactctgccgaccactagattcccgattggaacatgttgattttaaatgtctctttaagtgcctgagtgtgtgtcatctcatccgggtctgtgcctctctccttttggagcgtagggtaatctttgttgccaacagcctaagcaccctgtcaaaatgtggccatgctgtggtagctacactgtatccgttcacctggcagcatacctatatcccagtcctgccagcatctatgattgacatcgtgtgctcacctacaccattccttattggaatcctgtcttgctccttaccacagctccaggacctacccattgaagaggtgctgatagttgatctctgtgcagacaagttcttacaggaggtatctgatgaggatgaaattctaccaccaaaacttcaagctgccctgatgcagattttggaagaacgaaatgaaatcttgactcaggagcagaatttttcacaagatgtgacactcaactctctggtgtccgaagcatttgtcaggttttttgtggagttggtaggacattattctttgaacatgactgtcactgagcgtggggagcgtgttttccaaagggaaccattccgtaagtcccacacctcccgaagtgtacgccacttcctggatctcttcatggaaactcagatgtttgcaggattcatccaggaccgagagcttcggaaaagtggagttaaaggtttgtttgagatccgggccatccagtatttggaaacaattcctgagtcggagcccagtgggatgaatagaattttgcggagtcttggaagcaaaatgaaatttctgcaaaagaaatgaaatctctgattgtctccatcctgaatatacaacagaaagtgccaaagaaaatatttttctaagggtcaggatcccatgaagtattctacaaaattcttgaaattttaaaaggttaaagagcgagtcaggctgttagaggaggattctcctgttgctgctgtagtaatcactggagaattgttgggaatggtctggcaccatgccatctttactctgtctccattttttttttatagcagccttttctatgtgattcttgggctcattctctgttttgtgctttgtctgtgaaagtagttgtgtttcacaaggaaaagccttgttgttgttacatttaaaaaatagctcaaagatgagaataatgagagaaatgctgagtttaaggtagtagagagacatgatggaaatggagaacactagccttatacacataattctcatcactgaactatcatggcccctttaaacccatgggctgtttgacctgggctaaggaatagactcatcacatatctccattgttttgccttatattatatctaggggaatctcacttaggaggaagccctacttgtaatattataaggtactgttattaagtaccttataaaattagacatcttgcaactcctcctccaaattatgtggcatttgagtagtttgcttgtgcctcacatgtcaacattaaactttgtggaggctggatgcagtggctcacacctgtaatctccaccactttgggaggctaaggcaggagtttgagggtgggagtttgagactagcctgggcaacatagcaagatcccatctctacaaaaacattttaaaaataagtaaataaatttaaactttgtgaaattatagctaatatgaaaatgtcctttcaagggcatgggagccacctttattttttagtgtccaccatgtgccatgcactgtggtatatgtatgcatatcatctcaaccaatccttaaatcaaccttatgagatagatatttgcatctccattttactaataaactgaggctgggattacaggcatgagtcactgcacccggcctgtgtgtgtgtgtgtgtgtgtgtgtgtgtgttttcaaactcatgggcaaattcaagttcagatggtgcacttttcattgattaatgttatagcaaatgtcagtttgttttcttcagtttctgctgatggttttaactggcacagaaagtatttattcaaccttacaaaactgtgtaagttgtattgtgatacagtttattgacttgtacagtattgtcattacaacccattcaggtatgcatgaatctgaagcagaacaccatttaagactggtgctgtataatataattcctacagatgtgggtccagggaatagaactgagcctgtcttttttttaatgttaagcaggttacccccagtggggcttctactagacatctctccatttggtctcttcttacactccaacccagcaggaacagttaataattggatgtttataaaatgggggtaaaagggtttactgtgatggatcctggctatccctctaggaggagacctttgcttcagcaatggtgtcttcatcctcgcagcctgaagctgcttcatttccttaggtctgttgtgttttctgtaaagtgttaggaattctggatatttttgtaaaagaatcaagatttgtataaaatgttgtttacagatcttttaatgaataaatacataaaccccccac

SEQ ID NO: 126248 - DNA, 2077 bp, Homo sapiens
  Payload ID: 4757
  Gene Symbol: DENND2D
  Gene Name: DENN/MADD domain containing 2D
  Uniprot ID: Q9H6A0
  ENST ID: ENST00000357640
  CDS Start-End: 231-1646
gactctgttggtgctggcttctgctgccttcctgggtcccgtcacatccttcttgctcaaccactgggtgcacaggatggaaacttctattccctctctggaagacagcgcgtggcttggcttcacagagttgtggctggagaccgaagcagcccctttctcaggcttactgtcaccagtctgtctgtgttaggggagaggggagtccgctctgtcctgaaggcccagagatggaaggacaagtggtaggccgggtgttcaggctcttccaacgccgactgcttcaactccgagcaggaccaccccaggacaattcaggggaagctttaaaggaaccagaaagggcccaggagcactctttgcccaactttgctggggggcagcacttctttgaataccttcttgtggtttctctcaaaaagaagcgttcagaggatgattacgagcctataatcacctaccaatttcccaagcgggagaacctgcttcggggtcagcaggaggaggaggagcggctgctcaaagctatccccttgttctgcttcccagatgggaatgagtgggcatcactcaccgagtatcccagggagaccttctccttcgttctgaccaatgtggatgggagcagaaagattggatactgcaggcgcctcttgcctgccggccctggccctcgccttcccaaagtgtactgcatcatcagctgcatcggctgcttcggcttgttctccaagatcctggatgaagtggagaagagacatcagatctccatggctgtcatctacccgttcatgcagggcctccgagaggcagccttccctgctcctgggaagactgtcactctcaagagcttcatccccgactcaggcactgagttcatttcactgacacggcccctggactcccacctagaacatgtggattttagttctctattgcactgtctcagttttgaacagatacttcagatctttgcctctgccgtgctggagagaaaaatcatcttcctggcggaaggtctcagcaccttgtctcagtgcatccatgctgctgccgcactgctctaccccttcagctgggcgcacacctacatccctgttgtccctgagagccttctggccaccgtctgctgccccacccccttcatggttggagtacaaatgcgcttccagcaggaggtcatggacagccctatggaagaggtcctgctggtcaatctttgtgaaggaaccttcttaatgtcggttggtgatgaaaaagacatcctgccaccgaagcttcaggatgacatcttagactctcttggtcaggggatcaatgagttaaagactgcagaacaaatcaacgagcatgtttcaggcccctttgtgcagttctttgtcaagattgtgggccattatgcttcctatatcaagcgggaggcaaatgggcaaggccacttccaagaaagatccttctgtaaggctctgacctccaagaccaaccgccgatttgtgaagaagtttgtgaagacacagctcttctcacttttcatccaggaagccgagaagagcaagaatcctcctgcaggctatttccaacagaaaatacttgaatatgaggaacagaagaaacagaagaaaccaagggaaaaaactgtgaaataagagctgtggtgaataagaatgactagagctacacaccatttctggacttcagcccctgccagtgtggcaggatcagcaaaactgtcagctcccaaaatccatatcctcactctgagtcttggtatccaggtattgcttcaaactggtgtctgagatttggatccctggtattgatttctcaggactttggagggctctgacaccatgctcacagaactgggctcagagctccattttttgcagaggtgacacaggtaggaaacagtagtacatgtgttgtagacacttggttagaagctgctgcaactgccctctcccatcattataacatcttcaacacagaacacactttgtggtcgaaaggctcagcctctctacatgaagtctgtggacatgtaaggacgagagtaaagaggaaaatcttattttta

SEQ ID NO: 126249 - DNA, 1894 bp, Homo sapiens
  Payload ID: 4757
  Gene Symbol: DENND2D
  Gene Name: DENN/MADD domain containing 2D
  Uniprot ID: Q9H6A0
  ENST ID: ENST00000369752
  CDS Start-End: 57-1463
ataggggggcggggccagcgcggagctgggagcgggagccgggcactccaggggccatggatgggctcggccgccgccttcgagccagcctgagactgaagcgcggccatgggggaccaccccaggacaattcaggggaagctttaaaggaaccagaaagggcccaggagcactctttgcccaactttgctggggggcagcacttctttgaataccttcttgtggtttctctcaaaaagaagcgttcagaggatgattacgagcctataatcacctaccaatttcccaagcgggagaacctgcttcggggtcagcaggaggaggaggagcggctgctcaaagctatccccttgttctgcttcccagatgggaatgagtgggcatcactcaccgagtatcccagggagaccttctccttcgttctgaccaatgtggatgggagcagaaagattggatactgcaggcgcctcttgcctgccggccctggccctcgccttcccaaagtgtactgcatcatcagctgcatcggctgcttcggcttgttctccaagatcctggatgaagtggagaagagacatcagatctccatggctgtcatctacccgttcatgcagggcctccgagaggcagccttccctgctcctgggaagactgtcactctcaagagcttcatccccgactcaggcactgagttcatttcactgacacggcccctggactcccacctagaacatgtggattttagttctctattgcactgtctcagttttgaacagatacttcagatctttgcctctgccgtgctggagagaaaaatcatcttcctggcggaaggtctcagcaccttgtctcagtgcatccatgctgctgccgcactgctctaccccttcagctgggcgcacacctacatccctgttgtccctgagagccttctggccaccgtctgctgccccacccccttcatggttggagtacaaatgcgcttccagcaggaggtcatggacagccctatggaagaggtcctgctggtcaatctttgtgaaggaaccttcttaatgtcggttggtgatgaaaaagacatcctgccaccgaagcttcaggatgacatcttagactctcttggtcaggggatcaatgagttaaagactgcagaacaaatcaacgagcatgtttcaggcccctttgtgcagttctttgtcaagattgtgggccattatgcttcctatatcaagcgggaggcaaatgggcaaggccacttccaagaaagatccttctgtaaggctctgacctccaagaccaaccgccgatttgtgaagaagtttgtgaagacacagctcttctcacttttcatccaggaagccgagaagagcaagaatcctcctgcaggctatttccaacagaaaatacttgaatatgaggaacagaagaaacagaagaaaccaagggaaaaaactgtgaaataagagctgtggtgaataagaatgactagagctacacaccatttctggacttcagcccctgccagtgtggcaggatcagcaaaactgtcagctcccaaaatccatatcctcactctgagtcttggtatccaggtattgcttcaaactggtgtctgagatttggatccctggtattgatttctcaggactttggagggctctgacaccatgctcacagaactgggctcagagctccattttttgcagaggtgacacaggtaggaaacagtagtacatgtgttgtagacacttggttagaagctgctgcaactgccctctcccatcattataacatcttcaacacagaacacactttgtggtcgaaaggctcagcctctctacatgaagtctgtggacatgtaaggacgagagtaaagaggaaaatcttattttta

SEQ ID NO: 126250 - DNA, 5438 bp, Homo sapiens
  Payload ID: 4758
  Gene Symbol: DENND3
  Gene Name: DENN/MADD domain containing 3
  Uniprot ID: A2RUS2
  ENST ID: ENST00000262585
  CDS Start-End: 279-3875
ggcggcgcggctggtccccaggggtctgcgggcgactgcgcggctgaggcgcccgagtgcggtactggcggcgggcggcgggcagccatggcggaggccgcgtcgccgcacttgtcgctgccctcggggctgctggagctctgcgcgctgctgggcgccccccgggacagtctccgaagtctcgagcagaggtcctgtccattttcgtgcctccttttatcagtaaagaggacagtcaaatggccggtgccaactgcggcactctcggtaaaacccggatgcgctccttgagaaagaagagagagaagcccagaccagagcagtggaagggcctcccggggccccccagagcgccagagcctgaggatgtcgccgtcccgggcggcgtggacctcctcaccctgccgcagctgtgcttcccagggggtgtgtgcgtggccactgaacctaaggaggattgcgtccacttcctggtgctgaccgatgtctgcgggaataggacctatggcgtggtggcccagtactaccggcccctgcatgatgagtactgtttctacaatggcaaaacgcaccgggagtgtcctggctgcttcgtgcccttcgcggtgtgcgtggtctccaggtttccctattacaactccctcaaggactgcctttcctgtttattggctcttctgaagccctgtaaagattttgaagtggacagtcatataaaagatttcgctgcgaagctgtctttaatacccagcccgccacctggaccgctccatttggtatttaacatgaagtcgctccagattgtgttacctgcccgagcagaccccgaaagccccatcctggacctggaccttcacctgcccttgctgtgcttcaggcctgagaaggtgctacagatcctgacatgcatcctgacggaacagcggatcgtcttcttctcctcggactgggctctgctgacgctggtcactgagtgcttcatggcctacctgtatccgctgcagtggcagcaccccttcgtgcccatcctgtcggaccagatgctggatttcgtcatggcccccacgtccttcctgatgggctgccatctcgaccacttcgaagaagtcagcaaggaagccgacggtttagttctgataaatattgatcatgggagcatcacctactccaagtccacggacgataacgtggacattcctgatgtccccctcctggcagcccagacgtttattcagagggtgcagagcctccagctccaccatgagctgcacgccgcccacctcctctccagcacagacctgaaggagggccgagcccaccggcggtcctggcagcagaaactcaactgccagatacagcagaccaccctgcagctgctcgtgagcatcttcagggatgtaaagaatcatttaaactatgaacacagagtctttaatagtgaagaatttctcaaaaccagggctccaggggaccatcagttttataagcaggtcttagacacctacatgttccattcttttcttaaagcccggctcaataggaggatggacgcctttgctcagatggacctcgacacccagtcggaggaggacagaataaatggaatgcttctaagtccaaggagaccgaccgttgagaaaagagcctcccggaagtcctcgcacctgcatgtcacccacaggcgcatggtggtcagcatgcccaacctgcaggacattgccatgcctgagctggcacccaggaactcctcgctccggctgacggacaccgcaggctgtaggggcagcagcgcagttctgaatgtcacgccgaagtccccgtatacattcaagattcccgaaatccactttccgctggagagcaagtgcgtgcaggcataccatgcccactttgtctccatgctgagcgaggccatgtgctttctggcccccgataactctctgctcctggcccgctatttgtacctccgagggctcgtttatctgatgcagggacagctgctgaacgccctcttggacttccagaatctgtataaaacagacatacggatctttcccactgatttggtgaagaggacggtggaatccatgtctgcccctgagtgggagggggctgagcaggcgccggagctgatgaggctcatcagcgagatcctggacaagccgcacgaggcctcgaagctggacgaccacgtgaagaagttcaagctgcccaagaagcacatgcagctgggcgacttcatgaagcgggtccaggagtcagggatcgtgaaggacgccagcatcatacaccggctgttcgaggccttgactgtaggacaggagaaacaaatcgacccagaaacattcaaagatttctacaactgctggaaggagacggaagcagaagcccaggaggtcagtctgccgtggctggtgatggaacacctggataaaaacgagtgtgtgtgtaagttgtccagctccgtcaagacaaacctaggcgttggcaagatcgccatgacccagaagcgcctgttcctcctaaccgaaggaaggccaggctacttggagatttccaccttcagaaatatagaggaggtcaggagaaccactactacatttctacttcggagaatacccactttaaaaatcagagtggcgtccaagaaagaagtcttcgaagccaacctgaaaaccgagtgtgacctttggcacctgatggtgaaggagatgtgggctgggaagaagctggccgatgaccacaaggaccctcactacgtccagcaggcgctgaccaacgtcttgctgatggacgccgtcgtgggcacactgcagtcaccaggcgccatctacgctgcctccaagttatcctactttgataagatgagtaacgaaatgcccatgacgcttccggagacaaccctggaaacactgaagcataaaatcaacccctcggcgggggaggcgttcccacaagcggtggacgtgctgctctacactccagggcatcttgacccagccgaaaaagttgaagatgctcaccccaagttatggtgtgctctgagcgaaggcaaggtgaccgtgttcaatgcttcttcatggaccatccaccagcactcctttaaagtgggcactgcaaaagtgaactgcatggtgatggccgaccagaaccaggtgtgggttggctcggaagactccgtcatctacatcatcaacgtccacagcatgtcctgcaacaagcagctcacagcccactgctccagtgtcacggatttgattgtgcaggacggacaggaggcacccagcaacgtgtactcgtgcagcatggacggcatggtgctggtgtggaatgtgagcacactgcaggtgaccagccgcttccagctgccgcgaggtggcctgacgtccatcagactgcacggcggccgcctgtggtgctgcacaggtaacagcatcatggtcatgaaaatgaatggatccctccatcaagaattgaagattgaggagaacttcaaagacaccagtacctccttcctggccttccagctccttcctgaggaggagcagctgtgggcggcctgtgcaggacgcagcgaggtttacatctggagcctgaaggacctggcccagcccccgcagagggtgcccctcgaggactgctctgagatcaactgcatgatccgggtgaagaagcaggtctgggtgggcagccgagggctggggcagggaacacccaaggggaaaatctacgtgattgacgccgagaggaagaccgtggagaaggagctggtggcgcacatggacaccgtgaggacgctgtgctcggctgaggacagatacgtgctgagtgggtcgggcagggaggaggggaaagtcgccatttggaaaggcgaataaacgtggctgagtctgccaagtggaactgtgccctatgtgtggggactggctgccccctagagcctgccaggagcagaagcctggaggggtggcagggcagagcagcccaggctcagcatggagcccacttaccgtgtggccagccgcgagacccatggccacgcaccttctctcaggccttcgggccccctggttaaactgcaccaagggtgtttcctgttggggtgtgtctcaggcaggcagctgcgtcttgttggtgataacctctgctgggaggttactttgttgcctagaaagttctggaatccacaaccaggggctggcactggagccagcagcttggccgagtcacaggtgacccgtggccctcacgtctctggttttacctttccttacttcattcattcactcacccagtccttacgaatcaccgaggaacactgggctgagcacatgacagggagcctggagccccggggcctccagcgaggcctgagaagggtggttcgggtaaccactgtgggctctctcccatcacagaaggtggacagggcctacccaggtggaggggaccaccctgcgatcaggtgtttgcgacaggggttgggccagctgaggcaagctgtcttttttcccttttctttttaatagatgcaacatttttataataatcctagagaccttttttctaccaaagatcacagaccagaaaaagttccatctaaaatatcatgcccaggaaagcacatgggatcaaaagtaaaatagcatcatgtgtgatctcgtcttccagcgtgccgctcagttccccgaatccgtgtgcacacgtgtgatctcgtcttcagtgtgccgctcagttccctgaatccgtgtgcacactgcgtatgtgtacgcgcagcatgctatactgaactcaacaagatcttggctgtacataaatatttgtaaaagagaccctttgcacctttttactgtaatgttgagacttcattacttaaatgttctacggaaggttctggtgtggttgttggagccggagggagcgtgtcagcacgtgctgagggcatggggcctgccccctgggcacccatccacaagctgggccacggagctccagcttctcaggacaaagccccggggctggcgcatcctgagggtctctgggggtgtttgccaggctcctgggatgggccgctttcagaagccctgcagtgcctccagatggaaaggcgggcccggcctccggttgggtctgcattttggagagtccacaccacggaccaggttttcccccaaggcttggctttgtgtagctactaacttcttggggcattctgagagtgtgggcagagagaattatgtggcctcatcctcccccaaggctgtgcttgcagcccgggcaccttcccactttctagctctggagaggttggattttgcttttgtaaacacatgaatccttatgataaaagtctgtcagtcaaaaatacatttataaattatttaatgccagtcctcatgtaacctcaggtatcttcagcttgtggagaataaatctggttt

SEQ ID NO: 126251 - DNA, 4740 bp, Homo sapiens
  Payload ID: 4758
  Gene Symbol: DENND3
  Gene Name: DENN/MADD domain containing 3
  Uniprot ID: A2RUS2
  ENST ID: ENST00000424248
  CDS Start-End: 22-3462
ggcactctcggtaaaacccggatgcgctccttgagaaagaagagagagaagcccagaccagagcagtggaagggcctcccggggccccccagagcgccagagcctgaggatgtcgccgtcccgggcggcgtggacctcctcaccctgccgcagctgtgcttcccagggggtgtgtgcgtggccactgaacctaaggaggattgcgtccacttcctggtgctgaccgatgtctgcgggaataggacctatggcgtggtggcccagtactaccggcccctgcatgatgagtactgtttctacaatggcaaaacgcaccgggagtgtcctggctgcttcgtgcccttcgcggtgtgcgtggtctccaggtttccctattacaactccctcaaggactgcctttcctgtttattggctcttctgaagccctgtaaagattttgaagtggacagtcatataaaagatttcgctgcgaagctgtctttaatacccagcccgccacctggaccgctccatttggtatttaacatgaagtcgctccagattgtgttacctgcccgagcagaccccgaaagccccatcctggacctggaccttcacctgcccttgctgtgcttcaggcctgagaaggtgctacagatcctgacatgcatcctgacggaacagcggatcgtcttcttctcctcggactgggctctgctgacgctggtcactgagtgcttcatggcctacctgtatccgctgcagtggcagcaccccttcgtgcccatcctgtcggaccagatgctggatttcgtcatggcccccacgtccttcctgatgggctgccatctcgaccacttcgaagaagtcagcaaggaagccgacggtttagttctgataaatattgatcatgggagcatcacctactccaagtccacggacgataacgtggacattcctgatgtccccctcctggcagcccagacgtttattcagagggatgtaaagaatcatttaaactatgaacacagagtctttaatagtgaagaatttctcaaaaccagggctccaggggaccatcagttttataagcaggtcttagacacctacatgttccattcttttcttaaagcccggctcaataggaggatggacgcctttgctcagatggacctcgacacccagtcggaggaggacagaataaatggaatgcttctaagtccaaggagaccgaccgttgagaaaagagcctcccggaagtcctcgcacctgcatgtcacccacaggcgcatggtggtcagcatgcccaacctgcaggacattgccatgcctgagctggcacccaggaactcctcgctccggctgacggacaccgcaggctgtaggggcagcagcgcagttctgaatgtcacgccgaagtccccgtatacattcaagattcccgaaatccactttccgctggagagcaagtgcgtgcaggcataccatgcccactttgtctccatgctgagcgaggccatgtgctttctggcccccgataactctctgctcctggcccgctatttgtacctccgagggctcgtttatctgatgcagggacagctgctgaacgccctcttggacttccagaatctgtataaaacagacatacggatctttcccactgatttggtgaagaggacggtggaatccatgtctgcccctgagtgggagggggctgagcaggcgccggagctgatgaggctcatcagcgagatcctggacaagccgcacgaggcctcgaagctggacgaccacgtgaagaagttcaagctgcccaagaagcacatgcagctgggcgacttcatgaagcgggtccaggagtcagggatcgtgaaggacgccagcatcatacaccggctgttcgaggccttgactgtaggacaggagaaacaaatcgacccagaaacattcaaagatttctacaactgctggaaggagacggaagcagaagcccaggaggtcagtctgccgtggctggtgatggaacacctggataaaaacgagtgtgtgtgtaagttgtccagctccgtcaagacaaacctaggcgttggcaagatcgccatgacccagaagcgcctgttcctcctaaccgaaggaaggccaggctacttggagatttccaccttcagaaatatagaggaggtcaggagaaccactactacatttctacttcggagaatacccactttaaaaatcagagtggcgtccaagaaagaagtcttcgaagccaacctgaaaaccgagtgtgacctttggcacctgatggtgaaggagatgtgggctgggaagaagctggccgatgaccacaaggaccctcactacgtccagcaggcgctgaccaacgtcttgctgatggacgccgtcgtgggcacactgcagtcaccaggcgccatctacgctgcctccaagttatcctactttgataagatgagtaacgaaatgcccatgacgcttccggagacaaccctggaaacactgaagcataaaatcaacccctcggcgggggaggcgttcccacaagcggtggacgtgctgctctacactccagggcatcttgacccagccgaaaaagttgaagatgctcaccccaagttatggtgtgctctgagcgaaggcaaggtgaccgtgttcaatgcttcttcatggaccatccaccagcactcctttaaagtgggcactgcaaaagtgaactgcatggtgatggccgaccagaaccaggtgtgggttggctcggaagactccgtcatctacatcatcaacgtccacagcatgtcctgcaacaagcagctcacagcccactgctccagtgtcacggatttgattgtgcaggacggacaggaggcacccagcaacgtgtactcgtgcagcatggacggcatggtgctggtgtggaatgtgagcacactgcaggtgaccagccgcttccagctgccgcgaggtggcctgacgtccatcagactgcacggcggccgcctgtggtgctgcacaggtaacagcatcatggtcatgaaaatgaatggatccctccatcaagaattgaagattgaggagaacttcaaagacaccagtacctccttcctggccttccagctccttcctgaggaggagcagctgtgggcggcctgtgcaggacgcagcgaggtttacatctggagcctgaaggacctggcccagcccccgcagagggtgcccctcgaggactgctctgagatcaactgcatgatccgggtgaagaagcaggtctgggtgggcagccgagggctggggcagggaacacccaaggggaaaatctacgtgattgacgccgagaggaagaccgtggagaaggagctggtggcgcacatggacaccgtgaggacgctgtgctcggctgaggacagatacgtgctgagtgggtcgggcagggaggaggggaaagtcgccatttggaaaggcgaataaacgtggctgagtctgccaagtggaactgtgccctatgtgtggggactggctgccccctagagcctgccaggagcagaagcctggaggggtggcagggcagagcagcccaggctcagcatggagcccacttaccgtgtggccagccgcgagacccatggccacgcaccttctctcaggccttcgggccccctggttaaactgcaccaagggtgtttcctgttggggtgtgtctcaggcaggcagctgcgtcttgttggtgataacctctgctgggaggttactttgttgcctagaaagttctggaatccacaaccaggggctggcactggagccagcagcttggccgagtcacaggtgacccgtggccctcacgtctctggttttacctttccttacttcattcattcactcacccagtccttacgaatcaccgaggaacactgggctgagcacatgacagggagcctggagccccggggcctccagcgaggcctgagaagggtggttcgggtaaccactgtgggctctctcccatcacagaaggtggacagggcctacccaggtggaggggaccaccctgcgatcaggtgtttgcgacaggggttgggccagctgaggcaagctgtcttttttcccttttctttttaatagatgcaacatttttataataatcctagagaccttttttctaccaaagatcacagaccagaaaaagttccatctaaaatatcatgcccaggaaagcacatgggatcaaaagtaaaatagcatcatgtgtgatctcgtcttccagcgtgccgctcagttccccgaatccgtgtgcacacgtgtgatctcgtcttcagtgtgccgctcagttccctgaatccgtgtgcacactgcgtatgtgtacgcgcagcatgctatactgaactcaacaagatcttggctgtacataaatatttgtaaaagagaccctttgcacctttttactgtaatgttgagacttcattacttaaatgttctacggaaggttctggtgtggttgttggagccggagggagcgtgtcagcacgtgctgagggcatggggcctgccccctgggcacccatccacaagctgggccacggagctccagcttctcaggacaaagccccggggctggcgcatcctgagggtctctgggggtgtttgccaggctcctgggatgggccgctttcagaagccctgcagtgcctccagatggaaaggcgggcccggcctccggttgggtctgcattttggagagtccacaccacg

SEQ ID NO: 126252 - DNA, 831 bp, Homo sapiens
  Payload ID: 4758
  Gene Symbol: DENND3
  Gene Name: DENN/MADD domain containing 3
  ENST ID: ENST00000518249
  CDS Start-End: 1-309
gatgagtactgtttctacaatggcaaaacgcaccgggagtgtcctggctgcttcgtgcccttcgcggtgtgcgtggtctccaggtttccctattacaactccctcaaggactgcctttcctggccgaggagaaagcagttaacaacagttcccttttgtgtcatcatgctggagaatgagccacggcaaatcgctgaattggtgctgttcttgcttcttgcaaagcacagtcatttgagaccttctgccttgaccagagggacgagccccatggagagtgagcaggaaccttactgttcaaatcaatgactcgtaattcaaatcccagcactttagtggtttacttcttaaaatataactggcttttggacatagtttgggtctagcctacattttattgccatagacataaaatatcgttgagaacagagaggtgacttggtcgtagccaatgagcaggtgaattgagcacatgcatgtttgttgactgtctgtcaccagcgcccaggaagtgacagaatgccaagcctgtacatggtccccttttattcactaactgatgatcttcattacttgaaggtaaacagcgttttcactaatctctagtttcctcttctgtaaaatgtagatggttatttccaccttttgtttgctgaaatgaatgggtggtcgccagacacatgcccttggaagacaggaagaaaggaggtgttttctccgcctcctggtcgatgttatgtgtgtttattcagcaactgacctttcatagtgtgattggcaacagatatcctcctgctagacattaaagcaaacacatatttaacttgaaaa

SEQ ID NO: 126253 - DNA, 5185 bp, Homo sapiens
  Payload ID: 4758
  Gene Symbol: DENND3
  Gene Name: DENN/MADD domain containing 3
  ENST ID: ENST00000518668
  CDS Start-End: 1-3610
cccccgggacagtctccgaagtctcgagcaggttgcttataaaaagggagtcaaacatctttctgctcttcttgatccagaggtcctgtccattttcgtgcctccttttatcagtaaagaggacagtcaaatggccggtgccaactgcggcactctcggtaaaacccggatgcgctccttgagaaagaagagagagaagcccagaccagagcagtggaagggcctcccggggccccccagagcgccagagcctgaggatgtcgccgtcccgggcggcgtggacctcctcaccctgccgcagctgtgcttcccagggggtgtgtgcgtggccactgaacctaaggaggattgcgtccacttcctggtgctgaccgatgtctgcgggaataggacctatggcgtggtggcccagtactaccggcccctgcatgatgagtactgtttctacaatggcaaaacgcaccgggagtgtcctggctgcttcgtgcccttcgcggtgtgcgtggtctccaggtttccctattacaactccctcaaggactgcctttcctgtttattggctcttctgaagccctgtaaagattttgaagtggacagtcatataaaagatttcgctgcgaagctgtctttaatacccagcccgccacctggaccgctccatttggtatttaacatgaagtcgctccagattgtgttacctgcccgagcagaccccgaaagccccatcctggacctggaccttcacctgcccttgctgtgcttcaggcctgagaaggtgctacagatcctgacatgcatcctgacggaacagcggatcgtcttcttctcctcggactgggctctgctgacgctggtcactgagtgcttcatggcctacctgtatccgctgcagtggcagcaccccttcgtgcccatcctgtcggaccagatgctggatttcgtcatggcccccacgtccttcctgatgggctgccatctcgaccacttcgaagaagtcagcaaggaagccgacggtttagttctgataaatattgatcatgggagcatcacctactccaagtccacggacgataacgtggacattcctgatgtccccctcctggcagcccagacgtttattcagagggatgtaaagaatcatttaaactatgaacacagagtctttaatagtgaagaatttctcaaaaccagggctccaggggaccatcagttttataagcaggtcttagacacctacatgttccattcttttcttaaagcccggctcaataggaggatggacgcctttgctcagatggacctcgacacccagtcggaggaggacagaataaatggaatgcttctaagtccaaggagaccgaccgttgagaaaagagcctcccggaagtcctcgcacctgcatgtcacccacaggcgcatggtggtcagcatgcccaacctgcaggacattgccatgcctgagctggcacccaggaactcctcgctccggctgacggacaccgcaggctgtaggggcagcagcgcagttctgaatgtcacgccgaagtccccgtatacattcaagattcccgaaatccactttccgctggagagcaagtgcgtgcaggcataccatgcccactttgtctccatgctgagcgaggccatgtgctttctggcccccgataactctctgctcctggcccgctatttgtacctccgagggctcgtttatctgatgcagggacagctgctgaacgccctcttggacttccagaatctgtataaaacagacatacggatctttcccactgatttggtgaagaggacggtggaatccatgtctgcccctgagtgggagggggctgagcaggcgccggagctgatgaggctcatcagcgagatcctggacaagccgcacgaggcctcgaagctggacgaccacgtgaagaagttcaagctgcccaagaagcacatgcagctgggcgacttcatgaagcgggtccaggagtcagggatcgtgaaggacgccagcatcatacaccggctgttcgaggccttgactgtaggacaggagaaacaaatcgacccagaaacattcaaagatttctacaactgctggaaggagacggaagcagaagcccaggaggtcagtctgccgtggctggtgatggaacacctggataaaaacgagtgtgtgtgtaagttgtccagctccgtcaagacaaacctaggcgttggcaagatcgccatgacccagaagcgcctgttcctcctaaccgaaggaaggccaggctacttggagatttccaccttcagaaatatagaggaggtcaggagaaccactactacatttctacttcggagaatacccactttaaaaatcagagtggcgtccaagaaagaagtcttcgaagccaacctgaaaaccgagtgtgacctttggcacctgatggtgaaggagatgtgggctgggaagaagctggccgatgaccacaaggaccctcactacgtccagcaggcgctgaccaacgtcttgctgatggacgccgtcgtgggcacactgcagtcaccaggcgccatctacgctgcctccaagttatcctactttgataagatgagtaacgaaatgcccatgacgcttccggagacaaccctggaaacactgaagcataaaatcaacccctcggcgggggaggcgttcccacaagcggtggacgtgctgctctacactccagggcatcttgacccagccgaaaaagttgaagatgctcaccccaagttatggtgtgctctgagcgaaggcaaggtgaccgtgttcaatgcttcttcatggaccatccaccagcactcctttaaagtgggcactgcaaaagtgaactgcatggtgatggccgaccagaaccaggtgtgggttggctcggaagactccgtcatctacatcatcaacgtccacagcatgtcctgcaacaagcagctcacagcccactgctccagtgtcacggatttgattgtgcaggacggacaggaggcacccagcaacgtgtactcgtgcagcatggacggcatggtgctggtgtggaatgtgagcacactgcaggtgaccagccgcttccagctgccgcgaggtggcctgacgtccatcagactgcacggcggccgcctgtggtgctgcacaggtaacagcatcatggtcatgaaaatgaatggatccctccatcaagaattgaagattgaggagaacttcaaagacaccagtacctccttcctggccttccagctccttcctgaggaggagcagctgtgggcggcctgtgcaggacgcagcgaggtttacatctggagcctgaaggacctggcccagcccccgcagagggtgcccctcgaggactgctctgagatcaactgcatgatccgggtgaagaagcaggtctgggtgggcagccgagggctggggcagggaacacccaaggggaaaatctacgtgattgacgccgagaggaagaccgtggagaaggagctggtggcgcacatggacaccgtgaggacgctgtgctcggctgaggacagatacgtgctgagtgggtcgggcagggaggaggggaaagtcgccatttggaaaggcgaataaacgtggctgagtctgccaagtggaactgtgccctatgtgtggggactggctgccccctagagcctgccaggagcagaagcctggaggggtggcagggcagagcagcccaggctcagcatggagcccacttaccgtgtggccagccgcgagacccatggccacgcaccttctctcaggccttcgggccccctggttaaactgcaccaagggtgtttcctgttggggtgtgtctcaggcaggcagctgcgtcttgttggtgataacctctgctgggaggttactttgttgcctagaaagttctggaatccacaaccaggggctggcactggagccagcagcttggccgagtcacaggtgacccgtggccctcacgtctctggttttacctttccttacttcattcattcactcacccagtccttacgaatcaccgaggaacactgggctgagcacatgacagggagcctggagccccggggcctccagcgaggcctgagaagggtggttcgggtaaccactgtgggctctctcccatcacagaaggtggacagggcctacccaggtggaggggaccaccctgcgatcaggtgtttgcgacaggggttgggccagctgaggcaagctgtcttttttcccttttctttttaatagatgcaacatttttataataatcctagagaccttttttctaccaaagatcacagaccagaaaaagttccatctaaaatatcatgcccaggaaagcacatgggatcaaaagtaaaatagcatcatgtgtgatctcgtcttccagcgtgccgctcagttccccgaatccgtgtgcacacgtgtgatctcgtcttcagtgtgccgctcagttccctgaatccgtgtgcacactgcgtatgtgtacgcgcagcatgctatactgaactcaacaagatcttggctgtacataaatatttgtaaaagagaccctttgcacctttttactgtaatgttgagacttcattacttaaatgttctacggaaggttctggtgtggttgttggagccggagggagcgtgtcagcacgtgctgagggcatggggcctgccccctgggcacccatccacaagctgggccacggagctccagcttctcaggacaaagccccggggctggcgcatcctgagggtctctgggggtgtttgccaggctcctgggatgggccgctttcagaagccctgcagtgcctccagatggaaaggcgggcccggcctccggttgggtctgcattttggagagtccacaccacggaccaggttttcccccaaggcttggctttgtgtagctactaacttcttggggcattctgagagtgtgggcagagagaattatgtggcctcatcctcccccaaggctgtgcttgcagcccgggcaccttcccactttctagctctggagaggttggattttgcttttgtaaacacatgaatccttatgataaaagtctgtcagtcaaaaatacatttataaattatttaatgccagtcctcatgtaacctcaggtatcttcagcttgtggagaataaatctggtttaataaacactga

SEQ ID NO: 126254 - DNA, 1848 bp, Homo sapiens
  Payload ID: 4758
  Gene Symbol: DENND3
  Gene Name: DENN/MADD domain containing 3
  ENST ID: ENST00000518198
  CDS Start-End: 88-291
ggcggcgcggctggtccccaggggtctgcgggcgactgcgcggctgaggcgcccgagtgcggtactggcggcgggcggcgggcagccatggcggaggccgcgtcgccgcacttgtcgctgccctcggggctgctggagctctgcgcgctgctgggcgccccccgggacagtctccgaagtctcgagcagaggtcctgtccattttcgtgcctccttttatcagtaaagaggacagtcaaatggccggtgccaactgcggcactctcggtaaaacccggatgcgctccttgagaaagaagagagagaagcccagaccagagcagtggaagggcctcccggggccccccagagcgccagagcctgaggatgtcgccgtcccgggcggcgtggacctcctcaccctgccgcagctgtgcttcccagggggtgtgtgcgtggccactgaacctaaggaggattgcgtccacttcctggtgctgaccgatgtctgcgggaataggacctatggcgtggtggcccagtactaccggcccctgcatgatgagtactgtttctacaatggcaaaacgcaccgggagtgtcctggctgcttcgtgcccttcgcggtgtgcgtggtctccaggtttccctattacaactccctcaaggactgcctttcctggtgagctggggcaccgggggccaggggtggtagggggcagctctttgtgcctctccaggtgagccaagggaccagggggctggaggtggtgggggggcagctctctgttcctctcctggtgagccgggggaccgggcgctgggggcagtaggaggggcagttctctgtgcctcttaggctgttgcttaaggctgggggcagtgggcagggggtgtggcagcgggcgctcctctctgtgactggtaacatacggtaatggcatggtaggaaagggatgaagccacactgtcggaagtaaggttgatgttcaggattttcattttgtttagtttttcacaaaaaggcatatattaggaaaaactcttttcctagctgagaatattaggaggctgctgtttgttccaatgagttttattgacattttaaagatgaccttggctgggtgtggtggctcacacctgtaatcccagcatattgggagactaagatgggaggactgcttgagccgaggggtttgagacaagcctagggaacatagcaataccctgtctctaaaaaacaatttaaaaactagttgggcatggtggtgtgtgcctgtagtcccagctactgggaaggctaacgcaggaggatggcttaagcctaggagttcaaggctgcagtgagctgtgattgcaccaccacactccagcctaggttacagagcaggaccctgtcatcttgttttgtagaatctgtaactgtctccctgctgatggtgagtagaaaggctgaggacgtaaagaacttttgaaaaatcagaaagacatcgtatagaacccagtgggctctcattatcaaaggatgcttttgtgatgttgggggctgtagcccaagttcagacatggtcagtcccagtgggcacttgtgcacggagccgtttcttttgagtctcataaagttacagtctgagaatttatatttgtttgattaaaggccgaggagaaagcagttaacaacagttcccttttgtgtcatcatgctggagaatgagccacggcaaatcgctgaattggtgctgttcttgcttcttgcaaagcacagtcatttgagaccttctgccttgaccagagggacgagccccatggagagtgagcaggaaccttactgttcaaatcaatgactcgtaattcaaatcccagcacttt

SEQ ID NO: 126255 - DNA, 5482 bp, Homo sapiens
  Payload ID: 4758
  Gene Symbol: DENND3
  Gene Name: DENN/MADD domain containing 3
  ENST ID: ENST00000519811
  CDS Start-End: 71-3907
ccaggggtctgcgggcgactgcgcggctgaggcgcccgagtgcggtactggcggcgggcggcgggcagccatggcggaggccgcgtcgccgcacttgtcgctgccctcggggctgctggagctctgcgcgctgctgggcgccccccgggacagtctccgaagtctcgagcaggttgcttataaaaagggagtcaaacatctttctgctcttcttgatccagaggtcctgtccattttcgtgcctccttttatcagtaaagaggacagtcaaatggccggtgccaactgcggcactctcggtaaaacccggatgcgctccttgagaaagaagagagagaagcccagaccagagcagtggaagggcctcccggggccccccagagcgccagagcctgaggatgtcgccgtcccgggcggcgtggacctcctcaccctgccgcagctgtgcttcccagggggtgtgtgcgtggccactgaacctaaggaggattgcgtccacttcctggtgctgaccgatgtctgcgggaataggacctatggcgtggtggcccagtactaccggcccctgcatgatgagtactgtttctacaatggcaaaacgcaccgggagtgtcctggctgcttcgtgcccttcgcggtgtgcgtggtctccaggtttccctattacaactccctcaaggactgcctttcctgtttattggctcttctgaagccctgtaaagattttgaagtggacagtcatataaaagatttcgctgcgaagctgtctttaatacccagcccgccacctggaccgctccatttggtatttaacatgaagtcgctccagattgtgttacctgcccgagcagaccccgaaagccccatcctggacctggaccttcacctgcccttgctgtgcttcaggcctgagaaggtgctacagatcctgacatgcatcctgacggaacagcggatcgtcttcttctcctcggactgggctctgctgacgctggtcactgagtgcttcatggcctacctgtatccgctgcagtggcagcaccccttcgtgcccatcctgtcggaccagatgctggatttcgtcatggcccccacgtccttcctgatgggctgccatctcgaccacttcgaagaagtcagcaaggaagccgacggtttagttctgataaatattgatcatgggagcatcacctactccaagtccacggacgataacgtggacattcctgatgtccccctcctggcagcccagacgtttattcagagggtgcagagcctccagctccaccatgagctgcacgccgcccacctcctctccagcacagacctgaaggagggccgagcccaccggcggtcctggcagcagaaactcaactgccagatacagcagaccaccctgcagctgctcgtgagcatcttcagggatgtaaagaatcatttaaactatgaacacagagtctttaatagtgaagaatttctcaaaaccagggctccaggggaccatcagttttataagcaggtcttagacacctacatgttccattcttttcttaaagcccggctcaataggaggatggacgcctttgctcagatggacctcgacacccagtcggaggaggacagaataaatggaatgcttctaagtccaaggagaccgaccgttgagaaaagagcctcccggaagtcctcgcacctgcatgtcacccacaggcgcatggtggtcagcatgcccaacctgcaggacattgccatgcctgagctggcacccaggaactcctcgctccggctgacggacaccgcaggctgtaggggcagcagcgcagttctgaatgtcacgccgaagtccccgtatacattcaagattcccgaaatccactttccgctggagagcaagtgcgtgcaggcataccatgcccactttgtctccatgctgagcgaggccatgtgctttctggcccccgataactctctgctcctggcccgctatttgtacctccgagggctcgtttatctgatgcagggacagctgctgaacgccctcttggacttccagaatctgtataaaacagacatacggatctttcccactgatttggtgaagaggacggtggaatccatgtctgcccctgagtgggagggggctgagcaggcgccggagctgatgaggctcatcagcgagatcctggacaagccgcacgaggcctcgaagctggacgaccacgtgaagaagttcaagctgcccaagaagcacatgcagctgggcgacttcatgaagcgggtccaggagtcagggatcgtgaaggacgccagcatcatacaccggctgttcgaggccttgactgtaggacaggagaaacaaatcgacccagaaacattcaaagatttctacaactgctggaaggagacggaagcagaagcccaggaggtcagtctgccgtggctggtgatggaacacctggataaaaacgagtgtgtgtgtaagttgtccagctccgtcaagacaaacctaggcgttggcaagatcgccatgacccagaagcgcctgttcctcctaaccgaaggaaggccaggctacttggagatttccaccttcagaaatatagaggaggtcaggagaaccactactacatttctacttcggagaatacccactttaaaaatcagagtggcgtccaagaaagaagtcttcgaagccaacctgaaaaccgagtgtgacctttggcacctgatggtgaaggagatgtgggctgggaagaagctggccgatgaccacaaggaccctcactacgtccagcaggcgctgaccaacgtcttgctgatggacgccgtcgtgggcacactgcagtcaccaggcgccatctacgctgcctccaagttatcctactttgataagatgagtaacgaaatgcccatgacgcttccggagacaaccctggaaacactgaagcataaaatcaacccctcggcgggggaggcgttcccacaagcggtggacgtgctgctctacactccagggcatcttgacccagccgaaaaagttgaagatgctcaccccaagttatggtgtgctctgagcgaaggcaaggtgaccgtgttcaatgcttcttcatggaccatccaccagcactcctttaaagtgggcactgcaaaagtgaactgcatggtgatggccgaccagaaccaggtgtgggttggctcggaagactccgtcatctacatcatcaacgtccacagcatgtcctgcaacaagcagctcacagcccactgctccagtgtcacggatttgattgtgcaggacggacaggaggcacccagcaacgtgtactcgtgcagcatggacggcatggtgctggtgtggaatgtgagcacactgcaggtgaccagccgcttccagctgccgcgaggtggcctgacgtccatcagactgcacggcggccgcctgtggtgctgcacaggtaacagcatcatggtcatgaaaatgaatggatccctccatcaagaattgaagattgaggagaacttcaaagacaccagtacctccttcctggccttccagctccttcctgaggaggagcagctgtgggcggcctgtgcaggacgcagcgaggtttacatctggagcctgaaggacctggcccagcccccgcagagggtgcccctcgaggactgctctgagatcaactgcatgatccgggtgaagaagcaggtctgggtgggcagccgagggctggggcagggaacacccaaggggaaaatctacgtgattgacgccgagaggaagaccgtggagaaggagctggtggcgcacatggacaccgtgaggacgctgtgctcggctgaggacagatacgtgctgagtgggtcgggcagggaggaggggaaagtcgccatttggaaaggcgaataaacgtggctgagtctgccaagtggaactgtgccctatgtgtggggactggctgccccctagagcctgccaggagcagaagcctggaggggtggcagggcagagcagcccaggctcagcatggagcccacttaccgtgtggccagccgcgagacccatggccacgcaccttctctcaggccttcgggccccctggttaaactgcaccaagggtgtttcctgttggggtgtgtctcaggcaggcagctgcgtcttgttggtgataacctctgctgggaggttactttgttgcctagaaagttctggaatccacaaccaggggctggcactggagccagcagcttggccgagtcacaggtgacccgtggccctcacgtctctggttttacctttccttacttcattcattcactcacccagtccttacgaatcaccgaggaacactgggctgagcacatgacagggagcctggagccccggggcctccagcgaggcctgagaagggtggttcgggtaaccactgtgggctctctcccatcacagaaggtggacagggcctacccaggtggaggggaccaccctgcgatcaggtgtttgcgacaggggttgggccagctgaggcaagctgtcttttttcccttttctttttaatagatgcaacatttttataataatcctagagaccttttttctaccaaagatcacagaccagaaaaagttccatctaaaatatcatgcccaggaaagcacatgggatcaaaagtaaaatagcatcatgtgtgatctcgtcttccagcgtgccgctcagttccccgaatccgtgtgcacacgtgtgatctcgtcttcagtgtgccgctcagttccctgaatccgtgtgcacactgcgtatgtgtacgcgcagcatgctatactgaactcaacaagatcttggctgtacataaatatttgtaaaagagaccctttgcacctttttactgtaatgttgagacttcattacttaaatgttctacggaaggttctggtgtggttgttggagccggagggagcgtgtcagcacgtgctgagggcatggggcctgccccctgggcacccatccacaagctgggccacggagctccagcttctcaggacaaagccccggggctggcgcatcctgagggtctctgggggtgtttgccaggctcctgggatgggccgctttcagaagccctgcagtgcctccagatggaaaggcgggcccggcctccggttgggtctgcattttggagagtccacaccacggaccaggttttcccccaaggcttggctttgtgtagctactaacttcttggggcattctgagagtgtgggcagagagaattatgtggcctcatcctcccccaaggctgtgcttgcagcccgggcaccttcccactttctagctctggagaggttggattttgcttttgtaaacacatgaatccttatgataaaagtctgtcagtcaaaaatacatttataaattatttaatgccagtcctcatgtaacctcaggtatcttcagcttgtggagaataaatctggtttaataaacactga

SEQ ID NO: 126256 - DNA, 504 bp, Homo sapiens
  Payload ID: 4758
  Gene Symbol: DENND3
  Gene Name: DENN/MADD domain containing 3
  ENST ID: ENST00000517985
  CDS Start-End: 1-369
gtgggcacactgcagtcaccaggcgccatctacgctgcctccaagttatcctactttgataagatgagtaacgaaatgcccatgacgcttccggagacaaccctggaaacactgaagcataaaatcaacccctcggcgggggaggcgttcccacaagcggtggacgtgctgctctacactccagggcatcttgacccagccgaaaaagttgaagatgctcaccccaagttatggtgtgctctgagcgaaggcaaggtgaccgtgttcaatgcttcttcatggaccatccaccagcactcctttaaagtgggcactgcaaaagtggtgagtacacgaagcgtcaggaaagaagcctctgaattcacgtgatttctgaaacccaagtgtgttcatccatattcgacagtaggatacaagctattccacagcctcactcggtttctgtaaacagggggtcttaactttcacctggagttttcaaattaaatgtaagcttgttccaaa

SEQ ID NO: 126257 - DNA, 664 bp, Homo sapiens
  Payload ID: 4758
  Gene Symbol: DENND3
  Gene Name: DENN/MADD domain containing 3
  ENST ID: ENST00000520725
  CDS Start-End: 1-512
gcacaggtaacagcatcatggtcatgaaaatgaatggatccctccatcaagaattgaagattgaggagaacttcaaagacaccagtacctccttcctggccttccagctccttcctgaggaggagcagctgtgggcggcctgtgcaggacgcagcgaggtttacatctggagcctgaaggacctggcccagcccccgcagagggtgcccctcgaggactgctctgagatcaactgcatgatccgggtgaagaagcaggtagggtggagggcccgccatccccagcatccccggcaggtctcgcttgccctggccgcatccccatgctcccgagagccagccgcacgccctcgtgccctcctgccttcgcctctcagggttcccctcctaacaggcacgtgcagggttggtgccaacgggcccacaggtcaccatgtgctggtttcatggtgtggtccaagcactccacagcgcattcccccaaactggatggcttcaaatgacagaacttaattttctcacagttctcgacgctggaggtccaaaaccaaggtgtcggcagagccgcttccctcgggggctcggggggagcgtgcactccaggcccttctctcccccacccgctcatgtggccgccgtccttggcgtgccctggctgtggacgt

SEQ ID NO: 126258 - DNA, 899 bp, Homo sapiens
  Payload ID: 4758
  Gene Symbol: DENND3
  Gene Name: DENN/MADD domain containing 3
  ENST ID: ENST00000520986
  CDS Start-End: 60-899
cgggcgactgcgcggctgaggcgcccgagtgcggtactggcggcgggcggcgggcagccatggcggaggccgcgtcgccgcacttgtcgctgccctcggggctgctggagctctgcgcgctgctgggcgccccccgggacagtctccgaagtctcgagcaggttgcttataaaaagggagtcaaacatctttctgctcttcttgatccagaggtcctgtccattttcgtgcctccttttatcagtaaagaggacagtcaaatggccggtgccaactgcggcactctcggtaaaacccggatgcgctccttgagaaagaagagagagaagcccagaccagagcagtggaagggcctcccggggccccccagagcgccagagcctgaggatgtcgccgtcccgggcggcgtggacctcctcaccctgccgcagctgtgcttcccagggggtgtgtgcgtggccactgaacctaaggaggattgcgtccacttcctggtgctgaccgatgtctgcgggaataggacctatggcgtggtggcccagtactaccggcccctgcatgtatttaacatgaagtcgctccagattgtgttacctgcccgagcagaccccgaaagccccatcctggacctggaccttcacctgcccttgctgtgcttcaggcctgagaaggtgctacagatcctgacatgcatcctgacggaacagcggatcgtcttcttctcctcggactgggctctgctgacgctggtcactgagtgcttcatggcctacctgtatccgctgcagtggcagcaccccttcgtgcccatcctgtcggaccagatgctggatttcgtcatggcccccacgtccttcctgatgggctgccatctcgaccacttcgaagaagtcagcaag

SEQ ID NO: 126259 - DNA, 560 bp, Homo sapiens
  Payload ID: 4758
  Gene Symbol: DENND3
  Gene Name: DENN/MADD domain containing 3
  ENST ID: ENST00000519291
  CDS Start-End: 187-560
cttttcctggtggcgccgtgaagatctgtgtgtgtagttcttggaaagattccaggtgcttgaaaacgacgtctcagtgggtcaagggttgcttataaaaagggagtcaaacatctttctgctcttcttgatccagaggtcctgtccattttcgtgcctccttttatcagtaaagaggacagtcaaatggccggtgccaactgcggcactctcggtaaaacccggatgcgctccttgagaaagaagagagagaagcccagaccagagcagtggaagggcctcccggggccccccagagcgccagagcctgaggatgtcgccgtcccgggcggcgtggacctcctcaccctgccgcagctgtgcttcccagggggtgtgtgcgtggccactgaacctaaggaggattgcgtccacttcctggtgctgaccgatgtctgcgggaataggacctatggcgtggtggcccagtactaccggcccctgcatgatgagtactgtttctacaatggcaaaacgcaccgggagtgtcctggctgcttcgtgcccttcgcggtgtgcgt

SEQ ID NO: 126260 - DNA, 850 bp, Homo sapiens
  Payload ID: 4758
  Gene Symbol: DENND3
  Gene Name: DENN/MADD domain containing 3
  ENST ID: ENST00000518347
  CDS Start-End: 97-723
cggcccccaggcggcgcggctggtccccaggggtctgcgggcgactgcgcggctgaggcgcccgagtgcggtactggcggcgggcggcgggcagccatggcggaggccgcgtcgccgcacttgtcgctgccctcggggctgctggagctctgcgcgctgctgggcgccccccgggacagtctccgaagtctcgagcaggttgcttataaaaagggagtcaaacatctttctgctcttcttgatccagaggtcctgtccattttcgtgcctccttttatcagtaaagaggacagtcaaatggccggtgccaactgcggcactctcggtaaaacccggatgcgctccttgagaaagaagagagagaagcccagaccagagcagtggaagggcctcccggggccccccagagcgccagagcctgaggatgtcgccgtcccgggcggcgtggacctcctcaccctgccgcagctgtgcttcccagggggtgtgtgcgtggccactgaacctaaggaggattgcgtccacttcctggtgctgaccgatgtctgcgggaataggacctatggcgtggtggcccagtactaccggcccctgcatgatgagtactgtttctacaatggcaaaacgcaccgggagtgtcctggctgcttcgtgcccttcgcggtgtgcgtggtctccaggtttccctattacaactccctcaaggactgcctttcctggtgagctggggcaccgggggccaggggtggtagggggcagctctttgtgcctctccaggtgagccaagggaccagggggctggaggtggtgggggggcagctctctgttcctctcctggtgagccggggga

SEQ ID NO: 126261 - DNA, 906 bp, Homo sapiens
  Payload ID: 4758
  Gene Symbol: DENND3
  Gene Name: DENN/MADD domain containing 3
  ENST ID: ENST00000523058
  CDS Start-End: 34-906
gagtgcggtactggcggcgggcggcgggcagccatggcggaggccgcgtcgccgcacttgtcgctgccctcggggctgctggagctctgcgcgctgctgggcgccccccgggacagtctccgaagtctcgagcaggttgcttataaaaagggagtcaaacatctttctgctcttcttgatccagaggtcctgtccattttcgtgcctccttttatcagtaaagaggacagtcaaatggccggtgccaactgcggcactctcggtaaaacccggatgcgctccttgagaaagaagagagagaagcccagaccagagcagtggaagggcctcccggggccccccagagcgccagagcctgaggatgtcgccgtcccgggcggcgtggacctcctcaccctgccgcagctgtgcttcccagggggtgtgtgcgtggccactgaacctaaggaggattgcgtccacttcctggtgctgaccgatgtctgcgggaataggacctatggcgtggtggcccagtactaccggcccctgcatgatgagtactgtttctacaatggcaaaacgcaccgggagtgtcctggctgcttcgtgcccttcgcggtgtgcgtggtctccaggtttccctattacaactccctcaaggactgcctttcctgtttattggctcttctgaagccctgtaaagattttgaagtggacagtcatataaaagatttcgctgcgaagctgtctttaatacccagcccgccacctggaccgctccatttggtccagccgtgtctcagtagccattctgtgaatacagaatttgaactgaagtgtgacttcaaagtatttaacatgaagtcgctccagattgtgttacctgcccgagcagaccccgaaagccccatcctggacctggac

SEQ ID NO: 126262 - DNA, 2959 bp, Homo sapiens
  Payload ID: 4758
  Gene Symbol: DENND3
  Gene Name: DENN/MADD domain containing 3
  ENST ID: ENST00000523308
  CDS Start-End: 644-1390
cagttctgcttgttcacatacagtcggtctcatcatttggagattccgtatttgcaaattcgaccacctgctaatatttacttgtaactcccaaaacagatactcgtggtattttcttggtgatccacagacatccacgtgcacagacgggggaaaaacttgagtcacctgatatggattttctgggccaacaagtgtcctctcctcggcctgattggtgccacagttttcacattttttgcttttcgttggtgattttgccatttaagaaagcctcaagcatggagctccctaagcacaaggaggcggtgacgtgtcttgcagagaaaatgcatgtgtgagatgagcttggttcaggccgcagtgacagtgctggcggccgtgggtttcgtgttaatgaatcaatcatacgtagtcaataaggtgtctgtgaacagagcacgcggagaacaaggttatgcactgatgggtggatgacaacgtcagggccagaggctcccaggaccctgagccggcgtgtcccctaggagcagtggttccatatccgctaattcagcacgtgcagtaaatgtatagaatatgacttcaccagtatcgagactgactgatttctcacgttcccgtggcctcctgttagaactgcatggtgatggccgaccagaaccaggtgtgggttggctcggaagactccgtcatctacatcatcaacgtccacagcatgtcctgcaacaagcagctcacagcccactgctccagtgtcacggatttgattgtgcaggacggacaggaggcacccagcaacgtgtactcgtgcagcatggacggcatggtgctggtgtggaatgtgagcacactgcaggtgaccagccgcttccagctgccgcgaggtggcctgacgtccatcagactgcacggcggccgcctgtggtgctgcacaggtaacagcatcatggtcatgaaaatgaatggatccctccatcaagaattgaagattgaggagaacttcaaagacaccagtacctccttcctggccttccagctccttcctgaggaggagcagctgtgggcggcctgtgcaggacgcagcgaggtttacatctggagcctgaaggacctggcccagcccccgcagagggtgcccctcgaggactgctctgagatcaactgcatgatccgggtgaagaagcaggtctgggtgggcagccgagggctggggcagggaacacccaaggggaaaatctacgtgattgacgccgagaggaagaccgtggagaaggagctggtggcgcacatggacaccgtgaggacgctgtgctcggctgaggacagatacgtgctgagtgggtcgggcagggaggaggggaaagtcgccatttggaaaggcgaataaacgtggctgagtctgccaagtggaactgtgccctatgtgtggggactggctgccccctagagcctgccaggagcagaagcctggaggggtggcagggcagagcagcccaggctcagcatggagcccacttaccgtgtggccagccgcgagacccatggccacgcaccttctctcaggccttcgggccccctggttaaactgcaccaagggtgtttcctgttggggtgtgtctcaggcaggcagctgcgtcttgttggtgataacctctgctgggaggttactttgttgcctagaaagttctggaatccacaaccaggggctggcactggagccagcagcttggccgagtcacaggtgacccgtggccctcacgtctctggttttacctttccttacttcattcattcactcacccagtccttacgaatcaccgaggaacactgggctgagcacatgacagggagcctggagccccggggcctccagcgaggcctgagaagggtggttcgggtaaccactgtgggctctctcccatcacagaaggtggacagggcctacccaggtggaggggaccaccctgcgatcaggtgtttgcgacaggggttgggccagctgaggcaagctgtcttttttcccttttctttttaatagatgcaacatttttataataatcctagagaccttttttctaccaaagatcacagaccagaaaaagttccatctaaaatatcatgcccaggaaagcacatgggatcaaaagtaaaatagcatcatgtgtgatctcgtcttccagcgtgccgctcagttccccgaatccgtgtgcacacgtgtgatctcgtcttcagtgtgccgctcagttccctgaatccgtgtgcacactgcgtatgtgtacgcgcagcatgctatactgaactcaacaagatcttggctgtacataaatatttgtaaaagagaccctttgcacctttttactgtaatgttgagacttcattacttaaatgttctacggaaggttctggtgtggttgttggagccggagggagcgtgtcagcacgtgctgagggcatggggcctgccccctgggcacccatccacaagctgggccacggagctccagcttctcaggacaaagccccggggctggcgcatcctgagggtctctgggggtgtttgccaggctcctgggatgggccgctttcagaagccctgcagtgcctccagatggaaaggcgggcccggcctccggttgggtctgcattttggagagtccacaccacggaccaggttttcccccaaggcttggctttgtgtagctactaacttcttggggcattctgagagtgtgggcagagagaattatgtggcctcatcctcccccaaggctgtgcttgcagcccgggcaccttcccactttctagctctggagaggttggattttgcttttgtaaacacatgaatccttatgataaaagtctgtcagtcaaaaatacatttataaattatttaatgccagtcctcatgtaacctcaggtatcttcagcttgtggagaataaatctggtttaataaa

SEQ ID NO: 126263 - DNA, 8665 bp, Homo sapiens
  Payload ID: 4759
  Gene Symbol: DENND4A
  Gene Name: DENN/MADD domain containing 4A
  Uniprot ID: Q7Z401
  ENST ID: ENST00000443035
  CDS Start-End: 217-5937
aagcgggctcagagcgccgcggcattcagcccctcgtgttccgctaccgcgcgtgcgggattccggcgccgctctccgagctcgatccgctgctcgcacgggagccagctgggtgttatttctcaaactctgaggctgcggagttcacacattgaaatctgtcatctttttcagagagaaactttcggtaatgtatgtaaccttctgtaatggaagatgattgaagacaaggggcctcgtgttgctgactactttgttgtagcaggattaactgatgtttcaaagcctctagaagaagaaattcacttcaatgatgcttgtcataaagtagctaaaccaaaagaacctattacagatgtttcagttattatcaaatctcttggggaggaagtcccacaggattatatctgtattgatgttaccccaactggattgtcagctgatcttaataatggaagtcttgtggggccacagatttacctttgctatagaagaggaagagataagcctccacttacagatctgggggttttatatgactggaaagaaagattgaaacagggttgtgaaattattcagagtactccctatgggcgccccgcaaatattagtgggagtacctcatcacaaagaatttatatcacttaccgaagagcctctgaaaacatgactcagaatacgttggctgtcactgacatatgtattattatacccagtaaaggagaaagcccaccacacacgttctgcaaagtcgacaagaatctcaataacagtatgtggggatcagcagtatacttgtgttataaaaaatcggtggcaaagacgaacactgtatcttacaaagctggcctaatttgtagatatcctcaagaagattatgagtcattctcactaccggaatctgttcctctattttgtttaccaatgggtgcaaccattgaatgttggccatcaaatagcaaataccctctgcctgtattttctacttttgttttaactggagcctcagctgaaaaggtttatggtgctgctattcagttttatgaaccatactctgaggagaatctcacagaaaagcagagacttcttttgggtttaacatcagcagatgggaagtctgatagttccaaaacaattcatactaacaaatgcatctgtcttctttctcactggcctttttttgatgcattcaggaagtttctgacttttctgtatcgttattccatctctgggcctcatgtccttccaattgagaagcatatttctcattttatgcataaagttccttttccatctcctcagagaccacggattttagttcagttatcaccacatgataatctgattctcagtcagcctgtgtcttcacctcttccactaagtggtggcaagttttcaacactactgcagaatttaggccctgaaaatgctgtgacactactggtgtttgcagtaacagaacataaaattcttatccattccctacggccatccgtgcttactagtgtgacagaagcattagtgtctatgattttccctttccactggccatgcccgtatgttcctctctgcccactggctttagcagatgtcttgagtgcaccatgtccattcatagtagggattgattcaagatactttgatctctatgatcctccaccagatgtcagttgtgttgatgtagataccaacactatttctcaaattggtgacaagaaaaatgtagcctggaagatacttccaaagaagccatgtaaaaatctgatgaacacactgaataatttgcatcagcaattggcaaaattgcagcagagaccgagagatgatggactcatggatttagcaataaatgactatgattttaattctggaaagaggttgcacatgatagatttggaaatccaagaggcatttttgtttttcatggcctctattttaaaaggttacagatcatacttaaggccaataacacaagccccatctgagacagccacagatgcagcctctctctttgccctacaagctttcttaagaagccgggaccggtcacatcaaaaattctataacatgatgaccaaaacacaaatgtttattcgcttcattgaagaatgttcttttgttagtgacaaagatgcaagcctggcattttttgatgattgtgtagataaagtggatatggacaagagcggtgaagtacgacttatagaactggatgaatctttcaaaagtgaacacactgtttttgtaacaccacctgagatcccccacctacccaatggtgaagaaccccctttacagtacagctataatggatttccagttcttaggaacaatttatttgaaagacctgaaggatttctacaagcaaagaagaacaaattgccttcaaaatcaagtagtcctaatagccctttgcccatgttcagaagaacaaaacaggaaattaaatcagcccataaaattgcaaagaggtactcttccatccctcagatgtggtctaggtgtctactgcgccactgttatggactgtggtttatttgtctcccagcttatgtgaaagtctgtcattcaaaagtcagggctctgaaaacagcatatgatgtgcttaaaaaaatgcagtcaaagaagatggatccacctgatgaggtatgctaccgcattcttatgcaactctgtggacaatatgatcagccagtgcttgcagttcgagtgctttttgaaatgcagaaagctggtattgaccccaatgccattacttatggttattataataaggctgttttggaaagtacctggccttcaagaagtcgtagtggctattttctttggacaaaagtaagaaatgttgttttaggagtaacacagttcaaaagagctttaaagaagcatgcacacttatcacaaacaactctctcagatggcagtgacctggatgctgttagtcatggcagcatggatagtggtcatgggacacacactgtggagcaggcaccttttaatacgggtttaatcaaagtatatgctactgatgatagatctagtacaggtggccagtctgatcttggatataattcattatctaaagatgaagttagaagaggggatacatctactgaagacattcaagaagaaaaagataaaaaagggagtgattgtagttccttgtcagagagtgagagtacaaaaggaagtgctgattgccttcctaagctcagttatcaaaattcttccagtatcgttcgcctcactggtacaagtaacaacagtgctggtaaaatatcaggagaaagcatggaaagcacacctgagctgctcttaatatcatctcttgaagatacaaatgaaacacgaaacattcaaagtagatgcttcaggaaaagacataaaagtgacaatgaaactaatttgcagcagcaagtggtctggggaaatagaaaccgtaatcttagtggaggggtactgatgggatttatgctcaatagaattaaccaggaagcaacccctggagatatagttgaaaaattgggagctgatgcaaaaattctttcaaatgttatctcaaaaagcacgagaccaaatactcttgatattgggaagccacctttaagatcaaaaagagacagtctagaaaaggaatctagtgatgatgatacaccttttgatggttctaactatttggcagataaagtggattctcctgttatttttgacttagaagacttagacagtgaaacagatgtatcaaaagcaggatgtgttgctacacaaaatcccaagaggattcaacgtatgaacagcagcttttcagtaaaaccttttgaaaaaactgatgtcgcaacaggatttgatcccctctctcttttggttgctgagactgaacagcagcaaaaagaagaagaggaggaggatgaagatgatagcaaaagcatttcaacaccatctgctaggcgtgatttagctgaagaaattgtgatgtatatgaataacatgagcagtcctttgacaagtcgtacaccaagcattgatttacaacgggcatgtgatgataaattaaataagaaaagtccaccattggtcaaggcatgcagaagatctagtctgcctcctaattctcctaagccagtgagacttaccaaatctaaaagttacacaaaaagtgaggagaaaccaagggatagactttggtcttctccagccttctcacctacttgcccatttagggaagaatctcaggatacattaacccactcatcaccttcatttaacttagatacactactagtacctaaactagatgttctaagaaacagtatgttcactgctggaaaaggagttgcagagaaagcaagcaaatggtattcaagattcaccatgtacaccacatcatctaaggatcaaagttctgatcgtaccagtctttcttcagtgggagcccaggattctgaatctacctctttaacagatgaagatgtctgccatgagttggaaggacctatctcctctcaagagaccagtgctacttcagggactaagagaattgatctcagccgaataagcctggaaagttctgcatccttggaaggatctctgtcgaagtttgccttacctgggaaatcagaagtgacatcttccttcaacgcgagtaatacaaatatcttccagaactatgcaatggaggttctcatctcaagttgctctcggtgtagaacttgtgattgtcttgtccatgatgaggaaatcatggctggctggacagcagatgattcaaatctcaatactacatgcccattctgtggcaatatcttcttaccctttctgaatatagaaataagagatttaagacgacctggaagatactttctaaagtcaagcccatcaacagaaaatatgcactttccatcctccatttcaagtcagacgaggcagtcttgcatttcaacatcagcctctggtcttgacacatctgctctctctgttcaagggaattttgatctaaatagcaaatctaaactgcaggaaaatttttgcacccgaagtattcagatccctgctaatagatcaaaaacagctatgtctaaatgtccaatatttccaatggccaggagtattagtacttctggccccttggataaggaagatactggaagacagaagctcatttctacaggcagcctgccagctactttacaaggagctacagattctttaggtttagaatggcaccttccaagtcccgatcctgtcactgttccgtatcttagtcctttagtggtatggaaagaacttgaaagcttattggaaaatgaaggtgatcatgcaataacagtagcagactttgtggaccatcatccaattgttttttggaacctggtatggtatttcagacgtcttgacttgcccagtaacttacctggattgattctttcttctgagcactgtaacaagtattcaaagattccccgccactgtatgtctgaagatagcaaatatgttttaatacaaatgttatgggacaatatgaagttacatcaggatccgggacagcccttgtacattctctggaatgcacacacccaaaaatatccaatggtccatttattgcaaaaaagtgataactcatttaaccaggaactgttgaaaagtatggtaaaaagcattaaaatgaatgatgtctatggaccaatgagtcagattttagagacactgaataagtgtccacattttaaaagacagaggagtttatacagagaaatactatttctctcacttgtggcactgggaagagaaaacattgatatagatgcttttgataaagagtacaagatggcatacgatcgtctcacacctagtcaagtcaagagtacacacaactgtgatagaccaccaagtacaggggtgatggaatgtcgaaaaacctttggagaaccttatctttaagatgtatttgtatgtgtaaacattcaatgtatattgtatagtcagtgtataaaataacacttttagactctaaatattttttcttcaatttttgaaaatacaatttgtaaatggttcaaaagactcagacagcttatgtacagaatgtttgaagaagagaatagtgacaagtggggagaaagccactttgtttctcatttcttttttcttcttctttaactcccctgtaataggaaataaagtatttttgtgatgaggaaatccctaaacaaaattagttgccataaaatatgacaactgctttatggtttcttttggaagagacagattgaaaaatcatgaatggaatctaaacagaaatgtcagatgaacgtatttcctgttttcatagactattcaaatgttttgaccatgaagttgtattatacatattttaaattgtttatagtaagttgatatttttttaatttttaaatttaatatagcaaacttaaaatgaatttaaacttaagcaagcaagcgtgtattttccttgtctgctgctatttgaagtaattagtacagctgcagatctctctgtgtatatctatctatatatatattttttattacttgggagaatgaattttaaaatgtcagtgctagtgtcaagtgttgtcctaggattgcatgttagtacccctaagcctgagtgtggggagtgagttatgcaagggtagcgtgcactgcccagactgactcatggagccttgtgcaaggagagccagagaggttcactataccatgactccaaaattgtctctattgctaatagatacgtatagtatacagggaaaacagcttataaatccaaatatcaatttaaattttaatattctacatgaaaacttacattgggaaatatgcagacaagtgattatattccaaattttacccttattttaatatctaaaatattgggtatgatgcaaattatactatagaatatttatctgaaatatgacttactggggtattctgttaatactatatataaatattcagaatttttttcaaaagtagaaaaattcccctctaaaagtacagccagatagattttcatccatattgaggaacttagctttttcaacaagcttcagaatctgaagtctgtagaatctaaaatacagaaatatccagaaatcagacaataaattgaaagtttagacatcatgagtattaaatagctttaaaaatatatttttagtcatattatttctaatgtaactttctttgggtaatttctggtaaggaaaaacatcttttggctgctagaattagttatagattttcaatatgtgtgtgtgtttgcacacattatcattagtgaaggaattccctagccagctttaaagaaggaaaaaatggatagtcccaaattaggtgtataaagccagtagagtccacgacacttggactggaggtatcttggagtcctgagacttagaatcagttcagctgcagaaaacccaccttttgagttcacaccattagtgaatagcaccatgctgaaacatttcacagcttccaactctgggaaataatggagagagtttaaaaatgtaaaacttcagttagtttggggctgaacttgcttacttgaaaaatctggtgctaggcacatatatctgcctctcctttgtaaataccactccaatattattctttactattcagatccaagcttcatgttctacttgttcttcatgttctttaaatcatttgaaagttgtcaactgagagaaacatttcagaggggggaggcttttggcactggtgataaacatccctccaagagaaccgtctggggttctcttctatttgtggttggtggtttttattcttttaaaaacagctttcattgttgtttactttttgtgtaatacaaacaaaatgtaggaatcatagtttattgatttcaaatggctgacaaagaatgagtaaaaccattctttatggttttacgattcagactcatttggaaaagcgaatgtaatttttacctcctctttccaccccaagttttgtttctgcttttggagagggttgtatttcccctacttttaatccctagggaatattattgcacagatttagtcttaaaacctaaaacacaaatacaaagtggtaaacctgttcaaaagaaaattaaaatgtgaatcattcttgagctgggcgtggttgctcatggaggcctgtaatcccagcactttgggaggctgaagcagggaggattgcttgagtccaggagttcaaaaccagcctgagcaacatagagagaccctgtctctacaaaaaaattttttaaatttgctcggtatggtggctcatgcttggtaatcccagctactcgggaggctgaagcaggaggatcactttgagcctgggggtttggggctgcaatgagctgtgatcatgccattgcactctagcctggattacagagcaagaccctgtctcaaaaaaaaaaaaaaaaaaaaaaaaaaaaaccagaaaatatcaatcatttaaaataactctatacaaacttttcttcaattttctgttaaccatacattttggagaataatggccaatcatgttggagagaaatgcccttttgctacagcatctgtcttttattttcttactcttagttttgtttatatgtttaaatggttgacaataaaccatgtcctgtgctgatgta

SEQ ID NO: 126264 - DNA, 5875 bp, Homo sapiens
  Payload ID: 4759
  Gene Symbol: DENND4A
  Gene Name: DENN/MADD domain containing 4A
  Uniprot ID: Q7Z401
  ENST ID: ENST00000431932
  CDS Start-End: 210-5801
aagcgggctcagagcgccgcggcattcagcccctcgtgttccgctaccgcgcgtgcgggattccggcgccgctctccgagctcgatccgctgctcgcacgggagccagctgggtgttatttctcaaactctgaggctgcggagttcacacattgaaatctgtcatctttttcagagagaaactttcgatgtaaccttctgtaatggaagatgattgaagacaaggggcctcgtgttgctgactactttgttgtagcaggattaactgatgtttcaaagcctctagaagaagaaattcacttcaatgatgcttgtcataaagtagctaaaccaaaagaacctattacagatgtttcagttattatcaaatctcttggggaggaagtcccacaggattatatctgtattgatgttaccccaactggattgtcagctgatcttaataatggaagtcttgtggggccacagatttacctttgctatagaagaggaagagataagcctccacttacagatctgggggttttatatgactggaaagaaagattgaaacagggttgtgaaattattcagagtactccctatgggcgccccgcaaatattagtgggagtacctcatcacaaagaatttatatcacttaccgaagagcctctgaaaacatgactcagaatacgttggctgtcactgacatatgtattattatacccagtaaaggagaaagcccaccacacacgttctgcaaagtcgacaagaatctcaataacagtatgtggggatcagcagtatacttgtgttataaaaaatcggtggcaaagacgaacactgtatcttacaaagctggcctaatttgtagatatcctcaagaagattatgagtcattctcactaccggaatctgttcctctattttgtttaccaatgggtgcaaccattgaatgttggccatcaaatagcaaataccctctgcctgtattttctacttttgttttaactggagcctcagctgaaaaggtttatggtgctgctattcagttttatgaaccatactctgaggagaatctcacagaaaagcagagacttcttttgggtttaacatcagcagatgggaagtctgatagttccaaaacaattcatactaacaaatgcatctgtcttctttctcactggcctttttttgatgcattcaggaagtttctgacttttctgtatcgttattccatctctgggcctcatgtccttccaattgagaagcatatttctcattttatgcataaagttccttttccatctcctcagagaccacggattttagttcagttatcaccacatgataatctgattctcagtcagcctgtgtcttcacctcttccactaagtggtggcaagttttcaacactactgcagaatttaggccctgaaaatgctgtgacactactggtgtttgcagtaacagaacataaaattcttatccattccctacggccatccgtgcttactagtgtgacagaagcattagtgtctatgattttccctttccactggccatgcccgtatgttcctctctgcccactggctttagcagatgtcttgagtgcaccatgtccattcatagtagggattgattcaagatactttgatctctatgatcctccaccagatgtcagttgtgttgatgtagataccaacactatttctcaaattggtgacaagaaaaatgtagcctggaagatacttccaaagaagccatgtaaaaatctgatgaacacactgaataatttgcatcagcaattggcaaaattgcagcagagaccgagagatgatggactcatggatttagcaataaatgactatgattttaattctggaaagaggttgcacatgatagatttggaaatccaagaggcatttttgtttttcatggcctctattttaaaaggttacagatcatacttaaggccaataacacaagccccatctgagacagccacagatgcagcctctctctttgccctacaagctttcttaagaagccgggaccggtcacatcaaaaattctataacatgatgaccaaaacacaaatgtttattcgcttcattgaagaatgttcttttgttagtgacaaagatgcaagcctggcattttttgatgattgtgtagataaagtggatatggacaagagcggtgaagtacgacttatagaactggatgaatctttcaaaagtgaacacactgtttttgtaacaccacctgagatcccccacctacccaatggtgaagaaccccctttacagtacagctataatggatttccagttcttaggaacaatttatttgaaagacctgaaggatttctacaagcaaagaagaacaaattgccttcaaaatcaagtagtcctaatagccctttgcccatgttcagaagaacaaaacaggaaattaaatcagcccataaaattgcaaagaggtactcttccatccctcagatgtggtctaggtgtctactgcgccactgttatggactgtggtttatttgtctcccagcttatgtgaaagtctgtcattcaaaagtcagggctctgaaaacagcatatgatgtgcttaaaaaaatgcagtcaaagaagatggatccacctgatgaggtatgctaccgcattcttatgcaactctgtggacaatatgatcagccagtgcttgcagttcgagtgctttttgaaatgcagaaagctggtattgaccccaatgccattacttatggttattataataaggctgttttggaaagtacctggccttcaagaagtcgtagtggctattttctttggacaaaagtaagaaatgttgttttaggagtaacacagttcaaaagagctttaaagaagcatgcacacttatcacaaacaactctctcaggtggccagtctgatcttggatataattcattatctaaagatgaagttagaagaggggatacatctactgaagacattcaagaagaaaaagataaaaaagggagtgattgtagttccttgtcagagagtgagagtacaaaaggaagtgctgattgccttcctaagctcagttatcaaaattcttccagtatcgttcgcctcactggtacaagtaacaacagtgctggtaaaatatcaggagaaagcatggaaagcacacctgagctgctcttaatatcatctcttgaagatacaaatgaaacacgaaacattcaaagtagatgcttcaggaaaagacataaaagtgacaatgaaactaatttgcagcagcaagtggtctggggaaatagaaaccgtaatcttagtggaggggtactgatgggatttatgctcaatagaattaaccaggaagcaacccctggagatatagttgaaaaattgggagctgatgcaaaaattctttcaaatgttatctcaaaaagcacgagaccaaatactcttgatattgggaagccacctttaagatcaaaaagagacagtctagaaaaggaatctagtgatgatgatacaccttttgatggttctaactatttggcagataaagtggattctcctgttatttttgacttagaagacttagacagtgaaacagatgtatcaaaagcaggatgtgttgctacacaaaatcccaagaggattcaacgtatgaacagcagcttttcagtaaaaccttttgaaaaaactgatgtcgcaacaggatttgatcccctctctcttttggttgctgagactgaacagcagcaaaaagaagaagaggaggaggatgaagatgatagcaaaagcatttcaacaccatctgctaggcgtgatttagctgaagaaattgtgatgtatatgaataacatgagcagtcctttgacaagtcgtacaccaagcattgatttacaacgggcatgtgatgataaattaaataagaaaagtccaccattggtcaaggcatgcagaagatctagtctgcctcctaattctcctaagccagtgagacttaccaaatctaaaagttacacaaaaagtgaggagaaaccaagggatagactttggtcttctccagccttctcacctacttgcccatttagggaagaatctcaggatacattaacccactcatcaccttcatttaacttagatacactactagtacctaaactagatgttctaagaaacagtatgttcactgctggaaaaggagttgcagagaaagcaagcaaatggtattcaagattcaccatgtacaccacatcatctaaggatcaaagttctgatcgtaccagtctttcttcagtgggagcccaggattctgaatctacctctttaacagatgaagatgtctgccatgagttggaaggacctatctcctctcaagagaccagtgctacttcagggactaagagaattgatctcagccgaataagcctggaaagttctgcatccttggaaggatctctgtcgaagtttgccttacctgggaaatcagaagtgacatcttccttcaacgcgagtaatacaaatatcttccagaactatgcaatggaggttctcatctcaagttgctctcggtgtagaacttgtgattgtcttgtccatgatgaggaaatcatggctggctggacagcagatgattcaaatctcaatactacatgcccattctgtggcaatatcttcttaccctttctgaatatagaaataagagatttaagacgacctggaagatactttctaaagtcaagcccatcaacagaaaatatgcactttccatcctccatttcaagtcagacgaggcagtcttgcatttcaacatcagcctctggtcttgacacatctgctctctctgttcaagggaattttgatctaaatagcaaatctaaactgcaggaaaatttttgcacccgaagtattcagatccctgctaatagatcaaaaacagctatgtctaaatgtccaatatttccaatggccaggagtattagtacttctggccccttggataaggaagatactggaagacagaagctcatttctacaggcagcctgccagctactttacaaggagctacagattctttaggtttagaatggcaccttccaagtcccgatcctgtcactgttccgtatcttagtcctttagtggtatggaaagaacttgaaagcttattggaaaatgaaggtgatcatgcaataacagtagcagactttgtggaccatcatccaattgttttttggaacctggtatggtatttcagacgtcttgacttgcccagtaacttacctggattgattctttcttctgagcactgtaacaagtattcaaagattccccgccactgtatgtctgaagatagcaaatatgttttaatacaaatgttatgggacaatatgaagttacatcaggatccgggacagcccttgtacattctctggaatgcacacacccaaaaatatccaatggtccatttattgcaaaaaagtgataactcatttaaccaggaactgttgaaaagtatggtaaaaagcattaaaatgaatgatgtctatggaccaatgagtcagattttagagacactgaataagtgtccacattttaaaagacagaggagtttatacagagaaatactatttctctcacttgtggcactgggaagagaaaacattgatatagatgcttttgataaagagtacaagatggcatacgatcgtctcacacctagtcaagtcaagagtacacacaactgtgatagaccaccaagtacaggggtgatggaatgtcgaaaaacctttggagaaccttatctttaagatgtatttgtatgtgtaaacattcaatgtatattgtatagtcagtgtataaaataacacttttagactctaaa

SEQ ID NO: 126265 - DNA, 480 bp, Homo sapiens
  Payload ID: 4759
  Gene Symbol: DENND4A
  Gene Name: DENN/MADD domain containing 4A
  ENST ID: ENST00000561863
  CDS Start-End: 1-79
gagtacacacaactgtgatagaccaccaagtacaggggtgatggaatgtcgaaaaacctttggagaaccttatctttaagatgtatttaacttgaaagctgctatttggcactttatctcagagcaagaagagaaagagcaggctgtctctttgagaagacccttgtccttcgtgctaaagttagcatgtgctgcctcttcctgtctggatataagactaagctttatttcaaaactgaaccctctagcagctgcataccagtttaccttaatatccttagtacttggtgtcttaacatcctcatactaccttgctcctttggcctcaaagtaagcatattggctggcttatatttcttaacaaaattagcagtacacaaattgaagaattttcatctttgattacaaaagtctgcgcatgtgcttgtactctgagatggtaatagattcttctgataaagttattgctgcctttccaca

SEQ ID NO: 126266 - DNA, 3389 bp, Homo sapiens
  Payload ID: 4759
  Gene Symbol: DENND4A
  Gene Name: DENN/MADD domain containing 4A
  ENST ID: ENST00000564674
  CDS Start-End: 386-3389
attgccaagatggcgccggtcgcggtggccgcggaggctagagtcggagaaagaggcggaggcagtggcggccgcgaggggagggggagtcccgtctgactgagacggcaggcctgggcgggcgggcgggggtgccgcgaagggcggagcgccgggctggggatgagctaagcgggctcagagcgccgcggcattcagcccctcgtgttccgctaccgcgcgtgcgggattccggcgccgctctccgagctcgatccgctgctcgcacgggagccagctgggtgttatttctcaaactctgaggctgcggagttcacacattgaaatctgtcatctttttcagagagaaactttcggtaatgtatgtaaccttctgtaatggaagatgattgaagacaaggggcctcgtgttgctgactactttgttgtagcaggattaactgatgtttcaaagcctctagaagaagaaattcacttcaatgatgcttgtcataaagtagctaaaccaaaagaacctattacagatgtttcagttattatcaaatctcttggggaggaagtcccacaggattatatctgtattgatgttaccccaactggattgtcagctgatcttaataatggaagtcttgtggggccacagatttacctttgctatagaagaggaagagataagcctccacttacagatctgggggttttatatgactggaaagaaagattgaaacagggttgtgaaattattcagagtactccctatgggcgccccgcaaatattagtgggagtacctcatcacaaagaatttatatcacttaccgaagagcctctgaaaacatgactcagaatacgttggctgtcactgacatatgtattattatacccagtaaaggagaaagcccaccacacacgttctgcaaagtcgacaagaatctcaataacagtatgtggggatcagcagtatacttgtgttataaaaaatcggtggcaaagacgaacactgtatcttacaaagctggcctaatttgtagatatcctcaagaagattatgagtcattctcactaccggaatctgttcctctattttgtttaccaatgggtgcaaccattgaatgttggccatcaaatagcaaataccctctgcctgtattttctacttttgttttaactggagcctcagctgaaaaggtttatggtgctgctattcagttttatgaaccatactctgaggagaatctcacagaaaagcagagacttcttttgggtttaacatcagcagatgggaagtctgatagttccaaaacaattcatactaacaaatgcatctgtcttctttctcactggcctttttttgatgcattcaggaagtttctgacttttctgtatcgttattccatctctgggcctcatgtccttccaattgagaagcatatttctcattttatgcataaagttccttttccatctcctcagagaccacggattttagttcagttatcaccacatgataatctgattctcagtcagcctgtgtcttcacctcttccactaagtggtggcaagttttcaacactactgcagaatttaggccctgaaaatgctgtgacactactggtgtttgcagtaacagaacataaaattcttatccattccctacggccatccgtgcttactagtgtgacagaagcattagtgtctatgattttccctttccactggccatgcccgtatgttcctctctgcccactggctttagcagatgtcttgagtgcaccatgtccattcatagtagggattgattcaagatactttgatctctatgatcctccaccagatgtcagttgtgttgatgtagataccaacactatttctcaaattggtgacaagaaaaatgtagcctggaagatacttccaaagaagccatgtaaaaatctgatgaacacactgaataatttgcatcagcaattggcaaaattgcagcagagaccgagagatgatggactcatggatttagcaataaatgactatgattttaattctggaaagaggttgcacatgatagatttggaaatccaagaggcatttttgtttttcatggcctctattttaaaaggttacagatcatacttaaggccaataacacaagccccatctgagacagccacagatgcagcctctctctttgccctacaagctttcttaagaagccgggaccggtcacatcaaaaattctataacatgatgaccaaaacacaaatgtttattcgcttcattgaagaatgttcttttgttagtgacaaagatgcaagcctggcattttttgatgattgtgtagataaagtggatatggacaagagcggtgaagtacgacttatagaactggatgaatctttcaaaagtgaacacactgtttttgtaacaccacctgagatcccccacctacccaatggtgaagaaccccctttacagtacagctataatggatttccagttcttaggaacaatttatttgaaagacctgaaggatttctacaagcaaagaagaacaaattgccttcaaaatcaagtagtcctaatagccctttgcccatgttcagaagaacaaaacaggaaattaaatcagcccataaaattgcaaagaggtactcttccatccctcagatgtggtctaggtgtctactgcgccactgttatggactgtggtttatttgtctcccagcttatgtgaaagtctgtcattcaaaagtcagggctctgaaaacagcatatgatgtgcttaaaaaaatgcagtcaaagaagatggatccacctgatgaggtatgctaccgcattcttatgcaactctgtggacaatatgatcagccagtgcttgcagttcgagtgctttttgaaatgcagaaagctggtattgaccccaatgccattacttatggttattataataaggctgttttggaaagtacctggccttcaagaagtcgtagtggctattttctttggacaaaagtaagaaatgttgttttaggagtaacacagttcaaaagagctttaaagaagcatgcacacttatcacaaacaactctctcaggtggccagtctgatcttggatataattcattatctaaagatgaagttagaagaggggatacatctactgaagacattcaagaagaaaaagataaaaaagggagtgattgtagttccttgtcagagagtgagagtacaaaaggaagtgctgattgccttcctaagctcagttatcaaaattcttccagtatcgttcgcctcactggtacaagtaacaacagtgctggtaaaatatcaggagaaagcatggaaagcacacctgagctgctcttaatatcatctcttgaagatacaaatgaaacac

SEQ ID NO: 126267 - DNA, 5887 bp, Homo sapiens
  Payload ID: 4759
  Gene Symbol: DENND4A
  Gene Name: DENN/MADD domain containing 4A
  ENST ID: ENST00000635620
  CDS Start-End: 101-5851
tatttctcaaactctgaggctgcggagttcacacattgaaatctgtcatctttttcagagagaaactttcggtaatgtatgtaaccttctgtaatggaagatgattgaagacaaggggcctcgtgttgctgactactttgttgtagcaggattaactgatgtttcaaagcctctagaagaagaaattcacttcaatgatgcttgtcataaagtagctaaaccaaaagaacctattacagatgtttcagttattatcaaatctcttggggaggaagtcccacaggattatatctgtattgatgttaccccaactggattgtcagctgatcttaataatggaagtcttgtggggccacagatttacctttgctatagaagaggaagagataagcctccacttacagatctgggggttttatatgactggaaagaaagattgaaacagggttgtgaaattattcagagtactccctatgggcgccccgcaaatattagtgggagtacctcatcacaaagaatttatatcacttaccgaagagcctctgaaaacatgactcagaatacgttggctgtcactgacatatgtattattatacccagtaaaggagaaagcccaccacacacgttctgcaaagtcgacaagaatctcaataacagtatgtggggatcagcagtatacttgtgttataaaaaatcggtggcaaagacgaacactgtatcttacaaagctggcctaatttgtagatatcctcaagaagattatgagtcattctcactaccggaatctgttcctctattttgtttaccaatgggtgcaaccattgaatgttggccatcaaatagcaaataccctctgcctgtattttctacttttgttttaactggagcctcagctgaaaaggtttatggtgctgctattcagttttatgaaccatactctgaggagaatctcacagaaaagcagagacttcttttgggtttaacatcagcagatgggaagtctgatagttccaaaacaattcatactaacaaatgcatctgtcttctttctcactggcctttttttgatgcattcaggaagtttctgacttttctgtatcgttattccatctctgggcctcatgtccttccaattgagaagcatatttctcattttatgcataaagttccttttccatctcctcagagaccacggattttagttcagttatcaccacatgataatctgattctcagtcagcctgtgtcttcacctcttccactaagtggtggcaagttttcaacactactgcagaatttaggccctgaaaatgctgtgacactactggtgtttgcagtaacagaacataaaattcttatccattccctacggccatccgtgcttactagtgtgacagaagcattagtgtctatgattttccctttccactggccatgcccgtatgttcctctctgcccactggctttagcagatgtcttgagtgcaccatgtccattcatagtagggattgattcaagatactttgatctctatgatcctccaccagatgtcagttgtgttgatgtagataccaacactatttctcaaattggtgacaagaaaaatgtagcctggaagatacttccaaagaagccatgtaaaaatctgatgaacacactgaataatttgcatcagcaattggcaaaattgcagcagagaccgagagatgatggactcatggatttagcaataaatgactatgattttaattctggaaagaggttgcacatgatagatttggaaatccaagaggcatttttgtttttcatggcctctattttaaaaggttacagatcatacttaaggccaataacacaagccccatctgagacagccacagatgcagcctctctctttgccctacaagctttcttaagaagccgggaccggtcacatcaaaaattctataacatgatgaccaaaacacaaatgtttattcgcttcattgaagaatgttcttttgttagtgacaaagatgcaagcctggcattttttgatgattgtgtagataaagtggatatggacaagagcggtgaagtacgacttatagaactggatgaatctttcaaaagtgaacacactgtttttgtaacaccacctgagatcccccacctacccaatggtgaagaaccccctttacagtacagctataatggatttccagttcttaggaacaatttatttgaaagacctgaaggatttctacaagcaaagaagaacaaattgccttcaaaatcaagtagtcctaatagccctttgcccatgttcagaagaacaaaacaggaaattaaatcagcccataaaattgcaaagaggtactcttccatccctcagatgtggtctaggtgtctactgcgccactgttatggactgtggtttatttgtctcccagcttatgtgaaagtctgtcattcaaaagtcagggctctgaaaacagcatatgatgtgcttaaaaaaatgcagtcaaagaagatggatccacctgatgaggtatgctaccgcattcttatgcaactctgtggacaatatgatcagccagtgcttgcagttcgagtgctttttgaaatgcagaaagctggtattgaccccaatgccattacttatggttattataataaggctgttttggaaagtacctggccttcaagaagtcgtagtggctattttctttggacaaaagtaagaaatgttgttttaggagtaacacagttcaaaagagctttaaagaagcatgcacacttatcacaaacaactctctcagcagatggcagtgacctggatgctgttagtcatggcagcatggatagtggtcatgggacacacactgtggagcaggcaccttttaatacgggtttaatcaaagtatatgctactgatgatagatctagtacaggtggccagtctgatcttggatataattcattatctaaagatgaagttagaagaggggatacatctactgaagacattcaagaagaaaaagataaaaaagggagtgattgtagttccttgtcagagagtgagagtacaaaaggaagtgctgattgccttcctaagctcagttatcaaaattcttccagtatcgttcgcctcactggtacaagtaacaacagtgctggtaaaatatcaggagaaagcatggaaagcacacctgagctgctcttaatatcatctcttgaagatacaaatgaaacacgaaacattcaaagtagatgcttcaggaaaagacataaaagtgacaatgaaactaatttgcagcagcaagtggtctggggaaatagaaaccgtaatcttagtggaggggtactgatgggatttatgctcaatagaattaaccaggaagcaacccctggagatatagttgaaaaattgggagctgatgcaaaaattctttcaaatgttatctcaaaaagcacgagaccaaatactcttgatattgggaagccacctttaagatcaaaaagagacagtctagaaaaggaatctagtgatgatgatacaccttttgatggttctaactatttggcagataaagtggattctcctgttatttttgacttagaagacttagacagtgaaacagatgtatcaaaagcaggatgtgttgctacacaaaatcccaagaggattcaacgtatgaacagcagcttttcagtaaaaccttttgaaaaaactgatgtcgcaacaggatttgatcccctctctcttttggttgctgagactgaacagcagcaaaaagaagaagaggaggaggatgaagatgatagcaaaagcatttcaacaccatctgctaggcgtgatttagctgaagaaattgtgatgtatatgaataacatgagcagtcctttgacaagtcgtacaccaagcattgatttacaacgggcatgtgatgataaattaaataagaaaagtccaccattggtcaaggcatgcagaagatctagtctgcctcctaattctcctaagccagtgagacttaccaaatctaaaagttacacaaaaagtgaggagaaaccaagggatagactttggtcttctccagccttctcacctacttgcccatttagggaagaatctcaggatacattaacccactcatcaccttcatttaacttagatacactactagtacctaaactagatgttctaagaaacagtatgttcactgctggaaaaggagttgcagagaaagcaagcaaatggtattcaagattcaccatgtacaccacatcatctaaggatcaaagttctgatcgtaccagtctttcttcagtgggagcccaggattctgaatctacctctttaacagatgaagatgtctgccatgagttggaaggacctatctcctctcaagagaccagtgctacttcagggactaagagaattgatctcagccgaataagcctggaaagttctgcatccttggaaggatctctgtcgaagtttgccttacctgggaaatcagaagtgacatcttccttcaacgcgagtaatacaaatatcttccagaactatgcaatggaggttctcatctcaagttgctctcggtgtagaacttgtgattgtcttgtccatgatgaggaaatcatggctggctggacagcagatgattcaaatctcaatactacatgcccattctgtggcaatatcttcttaccctttctgaatatagaaataagagatttaagacgacctggaagatactttctaaagtcaagcccatcaacagaaaatatgcactttccatcctccatttcaagtcagacgaggcagtcttgcatttcaacatcagcctctggtcttgacacatctgctctctctgttcaagggaattttgatctaaatagcaaatctaaactgcaggaaaatttttgcacccgaagtattcagatccctgctaatagatcaaaaacagctatgtctaaatgtccaatatttccaatggccaggagtattagtacttctggccccttggataaggaagatactggaagacagaagctcatttctacaggcagcctgccagctactttacaaggagctacagattctttaggtttagaatggcaccttccaagtcccgatcctgtcactgttccgtatcttagtcctttagtggtatggaaagaacttgaaagcttattggaaaatgaaggtgatcatgcaataacagtagcagactttgtggaccatcatccaattgttttttggaacctggtatggtatttcagacgtcttgacttgcccagtaacttacctggattgattctttcttctgagcactgtaacaagtattcaaagattccccgccactgtatgtctgaagatagcaaatatgttttaatacaaatgttatgggacaatatgaagttacatcaggatccgggacagcccttgtacattctctggaatgcacacagtcaaagtcgtactcttttgtttgagacccaaaaatatccaatggtccatttattgcaaaaaagtgataactcatttaaccaggaactgttgaaaagtatggtaaaaagcattaaaatgaatgatgtctatggaccaatgagtcagattttagagacactgaataagtgtccacattttaaaagacagaggagtttatacagagaaatactatttctctcacttgtggcactgggaagagaaaacattgatatagatgcttttgataaagagtacaagatggcatacgatcgtctcacacctagtcaagtcaagagtacacacaactgtgatagaccaccaagtacaggggtgatggaatgtcgaaaaacctttggagaaccttatctttaagatgtatttgtatgtgtaaacattcaatgtatattg

SEQ ID NO: 126268 - DNA, 5706 bp, Homo sapiens
  Payload ID: 4760
  Gene Symbol: DENND4B
  Gene Name: DENN/MADD domain containing 4B
  Uniprot ID: O75064
  ENST ID: ENST00000361217
  CDS Start-End: 420-4910
cgccggccgaggaggaggggtgggggtagcggcggcgcccgcggcccggagcgggggttgggggagtagagaaagcggggcgcgcggaggaacgctgggtccccggcgccgcgggagctgggaggaccgagccggccgagcgagcagcgcggcagcacagtccccgcgtggcgcagcgcggcggggacgcggggaccgcccggatctccttccactgcgccccgcgctctgcggtcctcggccgcctcttcttccttcactcactgcccgggcgggagcggcgcccaagtcgggtgcgccatgtctggggccgggtagccccgccgcccgccggcccgccagctcgccctccgagccacccgccagcgggccggccggccgggaagcgcgggacagatgcagtgagtgaggggggggccatggcggaggagcggcccccccggctggtggattacttcgtggtagctgggcttgcagggaacggagcacccatccctgaggaaacgtgggttcctgaacccagtgggcccctgcgccctccccggccagctgagcccatcacagatgtggcagtcatcgctagggcactgggcgaggaagtgccccagggctacacatgcatccaggcttctgctgggggccaccccttggaactcagtgctggacttctgggtggaactcaacccgtcatctgctaccgcaggggccgtgacaagccccccctcgttgagctgggggtgttgtatgaggggaaggaacgtcccaagcctggcttccaagtgcttgacacgacaccctacagccactcagcaaacctggcccctccaggccccgggcacccccgcacctacctcacttaccggcgggcagcagagggggcagggctgcatgccctgggcatcactgacctctgcctggtgctgcccagtaagggcgagggcactcctcatacttactgccggctgccccgcaacctcaaccctggcatgtggggcccagcagtgtacctgtgctataaggtgggcctggcgaaggccaacacgctggtgtacgaggcagagctgctgggccgctacccggaggaggacaatgaggcgttcccgctgcccgagtcagtgcccgtcttctgcctgcccatgggggccactatcgagtgctggcctgcccagaccaagtaccccgtgcccgtcttctccacctttgtgctcacgggtgcagctggtgataaggtgtatggtgccgccctgcagttctacgaggcgttcccaagggccaggctatcagagcgacaggcacgggcactgggcctgctgagcgccgtggagcggggtcgggcactggggggcagagctgtgcgcagccggcgtgccatcgctgtgctgtcccgctggcctgccttccctgccttccgcgccttcctcaccttcctttaccgctactccgtctcaggcccccaccgcctacccttggaagcgcacatctcccacttcattcacaacgttcccttcccttccccacagagaccccgcatcctagtgcagatgtctccctatgacaacttgctcctctgtcagcctgtatcctcacccctgcccctcagtggtgccagcttcctgcagctgctgcagagcctgggccctgagctggctatcacactgctgctggctgtgctcacagagcacaagctgctagtccactcgctgcggccagacctgctcaccagcgtctgtgaggccctcgtctcgatgatcttcccactgcactggcagtgcccctacattcctctgtgcccgctggtgctggcagatgtgctgagtgccccagtgcccttcattgtgggtatccactccagctactttgatctgcatgacccgcctgctgatgtcatctgtgtagaccttgataccaacacgctcttccagactgaggaaaagaagctcctctcccctcggaccctgccccgcagaccctacaaggttctgctggccacactgacaaacctgtaccagcagctggaccagacatacactggacctgaggaggaagcatccctggagttcctactgacagactacgaggcagtgtgtggccgcagggcccggctggagcgcgaagtccaaggagccttcctccgcttcatggcctgtctgctcaagggctaccgggtcttcctgcgcccactcacccaggccccctccgagggagctcgtgatgttgacaaccttttcttcctgcagggcttcctcaaatcccgggaacgctccagccacaaactttactctcagctgctgcacacacagatgttctcacagttcattgaggagtgctcttttggctctgctcgccatgctgcccttgaattctttgactcttgtgttgaaaaggtccacccagagcaggagaagcctgagccgacacccttagtggagctagaggagctgtcaggaagtgagctcactgtctttatcacacctcccgaggagcctgccttaccagagggcagtgaatccactccccagtactgctatgatggattcccagagctacgggctgagttgtttgagtctcttcaagagcaacctggggccctgcctgtgccaggcccttcccgtagcgcccccagcagtcctgctcctcgccgtaccaaacaggagatgaaagttgcacagcggatggcacagaagtcagcagctgtgcctgagctgtgggcccggtgcctgctggggcactgctatgggctgtggttcctgtgtctgcctgcctatgtgcggtcggcaccctcccgagtgcaggcactgcacacagcctaccatgtgctgcgccagatggagagcggcaaggtggtgctccctgatgaggtgtgttaccgggtactgatgcagctctgctcacactatgggcagcctgtgctgtctgtgcgggtcatgctggagatgcgtcaggcaggcattgtgcccaacaccatcacctatggctactacaataaggctgtgttggaaagcaagtggccgtctggcacaccaggtgggcgtctgcgctgggccaagctccggaatgttgtcctgggggctgctcagttccgccagcccttgagagaacggcaacagcagcagcagcagcaacagcagcagcagcagcagcagcagcaggagcaggtgtcagcacatcaagaggcaggcagctcccaggcagagccctatttggagcgcccttcccctactcgccctcttcagcgccagactacttgggctgggcgaagtctgagagacccagcctcaccccctggacgcctggtgaagagtggtagcctgggcagtgcccgaggggcacagcccactgtggaggccggtgtggcccacatgatagaggccttgggggtcctggaaccccggggatcacctgtgccctggcacgatggaagtctctcagacctgagcctgacaggggaggagccgctccctggaggcagcccagggggctcaggctcagccctgagtgcccagtccactgaggccctggaagggctaagtgggcggggacccaaggctggtgggcgacaggatgaggcaggcaccccccgacgagggctgggtgcccgcctccaacagctgctcactccttcccgccactcccctgcctcccgcattcccccacctgagctgcctcctgacctgccacccccagcccgccgcagccccatggacagtcttctgcacccccgggagcgccctggatccactgcctccgagagctcagcctctctgggcagtgagtgggacctctcagaatcttctctcagcaacctgagtcttcgccgttcctcagagcgcctcagtgacacccctggatccttccagtcaccttccctggaaattctgctgtccagctgctccctgtgccgtgcctgtgattcgctggtgtatgatgaggaaatcatggctggctgggcacctgatgactctaacctcaacacaacctgccccttctgcgcctgcccctttgtgcccctgctcagtgtccagacccttgattcccggcccagtgtccccagccccaaatctgctggtgccagtggcagcaaagatgctcctgtccctggtggtcctggccctgtgctcagtgaccgaaggctctgccttgctctggatgagccccagctctgcaacgggcacatggggggagcctcccggcgggttgagagtggggcatgggcatacctgagccccctggtgctgcgtaaggagctggagtcgctggtagagaacgagggcagtgaggtgctggcgttgcctgaactgccctctgcccaccccatcatcttctggaaccttttgtggtatttccaacggctacgcctgcccagtattctaccaggcctggtgctggcctcctgtgatgggccttcgcactcccaggccccatctccttggctaacccctgatccagcctctgttcaggtacggctgctgtgggatgtactgacccctgaccccaatagctgcccacctctctatgtgctctggagggtccacagccagatcccccagcgggtggtatggccaggccctgtacctgcatcccttagtttggcactgttggagtcagtgctgcgccatgttggactcaatgaagtgcacaaggctgtggggctcctgctggaaactctagggcccccacccactggcctgcacctgcagaggggaatctaccgtgagatattattcctgacaatggctgctctgggcaaggaccacgtggacatagtggccttcgataagaagtacaagtctgcctttaacaagctggccagcagcatgggcaaggaggagctgaggcaccggcgggcgcagatgcccactcccaaggccattgactgccgaaaatgttttggagcacctccagaatgctagagaccttaagcttccctctccagcctagggtggggaagtgaggaagaagggattctagagttaaactgcttccctgttgccttcatggagttgggaacaggctgggaaggatgcccagtcaaaggctccaagcgaggacaacaggaagagggatccactgttaccaaaagtcctgattcccccatcaccaacctacccagtttgttcgtgctgatgttgggggagatctggggggagttggtacagctctgttcttcccttgtcctataccgggaactcccctccagggtacccacagatctgcattgccctggtcattttagaagtttttgttttaaaaaacaactggaaagatgcagagctactgagcctttgccctgaatgggaggtagggatgtcattctccaccaataatggtccctcttccctgacgttgctgaaggagcccaaggctctccatgcctttctacctaagtgtttgtattttattttaaattatttattctggagccacagcccccttgcttatgaggttcttatggagagtgagaaagggaagggaaatagggcaccatggtccggtggtttgtagttccttcaaagtcaggcactgggagctagaggagtctcaagctccccttaggaagaactggtgccccctccagtcctaatttttcttgcctgccccgccttggggaatgcctcacccacccaggtcctgacctgtgcaataaggattgttccctgcgaagttttgttggatgtaaatatagtaaaagctgcttctgtctttttc

SEQ ID NO: 126269 - DNA, 3781 bp, Homo sapiens
  Payload ID: 4760
  Gene Symbol: DENND4B
  Gene Name: DENN/MADD domain containing 4B
  ENST ID: ENST00000368646
  CDS Start-End: 126-3781
tcccctctgaagcaccccccacgcttctgggcccctgctgcgagctacccaccaggctttttcccagcttctgcaccctggggcgcctcaggacccttggggctcctactccccggggttgggccatggaggcagatgcagtgagtgaggggggggccatggcggaggagcggcccccccggctggtggattacttcgtggtagctgggcttgcagggaacggagcacccatccctgaggaaacgtgggttcctgaacccagtgggcccctgcgccctccccggccagctgagcccatcacagatgtggcagtcatcgctagggcactgggcgaggaagtgccccagggctacacatgcatccaggcttctgctgggggccaccccttggaactcagtgctggacttctgggtggaactcaacccgtcatctgctaccgcaggggccgtgacaagccccccctcgttgagctgggggtgttgtatgaggggaaggaacgtcccaagcctggcttccaagtgcttgacacgacaccctacagccactcagcaaacctggcccctccaggccccgggcacccccgcacctacctcacttaccggcgggcagcagagggggcagggctgcatgccctgggcatcactgacctctgcctggtgctgcccagtaagggcgagggcactcctcatacttactgccggctgccccgcaacctcaaccctggcatgtggggcccagcagtgtacctgtgctataaggtgggcctggcgaaggccaacacgctggtgtacgaggcagagctgctgggccgctacccggaggaggacaatgaggcgttcccgctgcccgagtcagtgcccgtcttctgcctgcccatgggggccactatcgagtgctggcctgcccagaccaagtaccccgtgcccgtcttctccacctttgtgctcacgggtgcagctggtgataaggtgtatggtgccgccctgcagttctacgaggcgttcccaagggccaggctatcagagcgacaggcacgggcactgggcctgctgagcgccgtggagcggggtcgggcactggggggcagagctgtgcgcagccggcgtgccatcgctgtgctgtcccgctggcctgccttccctgccttccgcgccttcctcaccttcctttaccgctactccgtctcaggcccccaccgcctacccttggaagcgcacatctcccacttcattcacaacgttcccttcccttccccacagagaccccgcatcctagtgcagatgtctccctatgacaacttgctcctctgtcagcctgtatcctcacccctgcccctcagtggtgccagcttcctgcagctgctgcagagcctgggccctgagctggctatcacactgctgctggctgtgctcacagagcacaagctgctagtccactcgctgcggccagacctgctcaccagcgtctgtgaggccctcgtctcgatgatcttcccactgcactggcagtgcccctacattcctctgtgcccgctggtgctggcagatgtgctgagtgccccagtgcccttcattgtgggtatccactccagctactttgatctgcatgacccgcctgctgatgtcatctgtgtagaccttgataccaacacgctcttccagactgaggaaaagaagctcctctcccctcggaccctgccccgcagaccctacaaggttctgctggccacactgacaaacctgtaccagcagctggaccagacatacactggacctgaggaggaagcatccctggagttcctactgacagactacgaggcagtgtgtggccgcagggcccggctggagcgcgaagtccaaggagccttcctccgcttcatggcctgtctgctcaagggctaccgggtcttcctgcgcccactcacccaggccccctccgagggagctcgtgatgttgacaaccttttcttcctgcagggcttcctcaaatcccgggaacgctccagccacaaactttactctcagctgctgcacacacagatgttctcacagttcattgaggagtgctcttttggctctgctcgccatgctgcccttgaattctttgactcttgtgttgaaaaggtccacccagagcaggagaagcctgagccgacacccttagtggagctagaggagctgtcaggaagtgagctcactgtctttatcacacctcccgaggagcctgccttaccagagggcagtgaatccactccccagtactgctatgatggattcccagagctacgggctgagttgtttgagtctcttcaagagcaacctggggccctgcctgtgccaggcccttcccgtagcgcccccagcagtcctgctcctcgccgtaccaaacaggagatgaaagttgcacagcggatggcacagaagtcagcagctgtgcctgagctgtgggcccggtgcctgctggggcactgctatgggctgtggttcctgtgtctgcctgcctatgtgcggtcggcaccctcccgagtgcaggcactgcacacagcctaccatgtgctgcgccagatggagagcggcaaggtggtgctccctgatgaggtgtgttaccgggtactgatgcagctctgctcacactatgggcagcctgtgctgtctgtgcgggtcatgctggagatgcgtcaggcaggcattgtgcccaacaccatcacctatggctactacaataaggctgtgttggaaagcaagtggccgtctggcacaccaggtgggcgtctgcgctgggccaagctccggaatgttgtcctgggggctgctcagttccgccagcccttgagagaacggcaacagcagcagcagcagcaacagcagcagcagcagcagcagcagcaggagcaggtgtcagcacatcaagaggcaggcagctcccaggcagagccctatttggagcgcccttcccctactcgccctcttcagcgccagactacttgggctgggcgaagtctgagagacccagcctcaccccctggacgcctggtgaagagtggtagcctgggcagtgcccgaggggcacagcccactgtggaggccggtgtggcccacatgatagaggccttgggggtcctggaaccccggggatcacctgtgccctggcacgatggaagtctctcagacctgagcctgacaggggaggagccgctccctggaggcagcccagggggctcaggctcagccctgagtgcccagtccactgaggccctggaagggctaagtgggcggggacccaaggctggtgggcgacaggatgaggcaggcaccccccgacgagggctgggtgcccgcctccaacagctgctcactccttcccgccactcccctgcctcccgcattcccccacctgagctgcctcctgacctgccacccccagcccgccgcagccccatggacagtcttctgcacccccgggagcgccctggatccactgcctccgagagctcagcctctctgggcagtgagtgggacctctcagaatcttctctcagcaacctgagtcttcgccgttcctcagagcgcctcagtgacacccctggatccttccagtcaccttccctggaaattctgctgtccagctgctccctgtgccgtgcctgtgattcgctggtgtatgatgaggaaatcatggctggctgggcacctgatgactctaacctcaacacaacctgccccttctgcgcctgcccctttgtgcccctgctcagtgtccagacccttgattcccggcccag

SEQ ID NO: 126270 - DNA, 541 bp, Homo sapiens
  Payload ID: 4760
  Gene Symbol: DENND4B
  Gene Name: DENN/MADD domain containing 4B
  ENST ID: ENST00000472932
  CDS Start-End: 1-541
gggccgtgacaagccccccctcgttgagctgggggtgttgtatgaggggaaggaacgtcccaagcctggcttccaagtgcttgacacgacaccctacagccactcagcaaacctggcccctccaggccccgggcacccccgcacctacctcacttaccggcgggcagcagagggggcagggctgcatgccctgggcatcactgacctctgcctggtgctgcccagtaagggcgagggcactcctcatacttactgccggctgccccgcaacctcaaccctggcatgtggggcccagcagtgtacctgtgctataaggtgggcctggcgaaggccaacacgctggtgtacgaggcaggtgtatggtgccgccctgcagttctacgaggcgttcccaagggccaggctatcagagcgacaggcacgggcactgggcctgctgagcgccgtggagcggggtcgggcactggggggcagagctgtgcgcagccggcgtgccatcgctgtgctgtcccgctggcctgccttccctgccttccgcgc

SEQ ID NO: 126271 - DNA, 3463 bp, Homo sapiens
  Payload ID: 4761
  Gene Symbol: DENND4C
  Gene Name: DENN/MADD domain containing 4C
  ENST ID: ENST00000361024
  CDS Start-End: 1-2091
ggaaaaactcctgattctgaagataagttgttttctccagttattgcacgtaatctggctgatgaaatagaaagctatatgaacctaaaaagtcccctaggtagtaaatcttctagtatggaattacacagagaggaaaacagagagtctggcatgactactgcatttattcatgctctagagaggagatcaagcctacctttagatcatggttcaccagcacaggaaaatcctgaaagtgaaaagagctcacctgcagtgtccaggtctaaaacttttactgggcgtttcaagcagcaaaccccctctcgaactcataaagaacgttcaacttctttgtcagcactggtgcgttcttcgccacatggctcgttgggttctgtagtaaattctttgtcagggctaaagctggataatatactctcagggcccaagatagatgtcctgaaatctggtatgaaacaagcagcgacagtagccagtaagatgtgggtagctgttgcgtctgcctacagctactcagatgatgaggaagaaactaatagagactacagcttcccagctggcctagaagaccatattttgggggagaatatatcgcctaacacaagtatctcagggttggtccccagtgaacttacccagagcaacacaagtcttggcagtagcagcagtagtggagatgtaggaaaactgcattatccaacaggtgaagttccatttccaagaggcatgaaagggcaagactttgaaaaatcagatcatggttcttctcaaaataccagcatgtctagcatctatcagaattgtgcaatggaggttttgatgtccagttgttcacagtgtagagcttgtggagctttagtttatgatgaagaaattatggctggatggacagcagatgactcaaatttgaatacagcttgtccattctgtaaaagcaacttcttgcctcttctcaatatagaattcaaagatttgagaggttctgcaagctttttcctgaaaccaagtacctctggtgacagtttacaaagtggaagcattccattggcaaatgaatccttggagcacaaacctgtatccagtttagcagaacctgacttgatcaactttatggacttcccaaaacataaccagatcataactgaagaaacaggctctgcagttgaaccaagtgatgaaataaagagagccagtggagatgtccaaactatgaaaatttcatctgtgcctaatagtttatcaaagcgaaatgtgtctttgactcgaagtcacagtgttggaggcccattgcagaatattgactttacccagcgaccgtttcatggcatctcaacagttagtcttccaaatagtctgcaggaagttgtggatcctttaggaaaaagacccaatcctccccctgtttctgtgccctacttgagtcctctagtactccgtaaagaacttgaatctttgctagaaaatgaaggtgatcaggtgattcatacatcttctttcatcaatcaacatccaatcattttctggaacctcgtttggtatttcagacgtttggaccttcctagtaacttgccaggacttatcctcacatctgaacattgtaatgaaggtgtacagcttcctctgtcatctctgtcccaggatagcaaacttgtgtatattcagctgttatgggataatatcaaccttcatcaggaaccaagagaacctctgtatgtctcatggaggaattttaattctgaaaagaaatcatctctcctgtcagaggaacaacaagaaacaagcactttagtagaaaccatcaggcagagtattcagcacaataatgttcttaaacccatcaacctactttcacagcaaatgaagccaggcatgaaaagacaaaggagtttatacagagaaatcctcttcttatcattagtgtctctaggaagagagaatattgatattgaggcatttgacaatgaatatggaattgcatacaatagtctgtcttcagagattcttgaaaggttgcagaaaattgatgctccaccaagtgccagtgtcgagtggtgcaggaagtgttttggagcgcctctcatttaaatagagattcactagaatgttgacacacaaggcttggggattagatttcatctggaaacattcaagtttttttttccaaatcgtaagaactggtgaatacggaattgaagtaactcttggggacaatatataatgaattatgattcatattgcattaccttgaaatatgaagtgccatttgaatgtcccagggcttattaatattgaagattttcaacccctgaactgcttttctgcctctgtggaaaactactttgggattcttcagtatttgtagtagtttgatagaaataatgaggaaccatattcattctaggcattgtttatatttgaagttactgagtttgaggaatggcaaattaaatttgcctaacccccaaaacaaatgaaatatctcaattataaaagcaacatggccgggcacggtggctcaggcctgtaatcccagcactttgggaggctgagcaaggtgggtggatcacttgaggccaggagttcgagaccagcctggccaacacggtgagaccctgtctttactaaaaatacaaaaattagccaggcgcaccactgtagtcccagctactcaggctgaggcaggagaatcgcttgaactgaggcagaggctacagtgagtggagatcacgccactgcaactccagcttgggtgacagagtgagaccgtctcaaaaaaaaaaaaaaaaaaaaaagagagcaacatatttgtgtaagtttgtatatgtgtagggctgtgtaggtatgtgtatatacagccatattctaagtgtatatttattaaaatagattgcatgttgcaatacggttttctgaaaggggtctcattgactattaaataaatgactactactaaacttgtctgtagtcattaatcttaaaattacctgaaaatctgatgacagctgccttccctaactttaatgtattaggttggcacaaaattaattgtagtttttgccactattaatggcaaaaaccgcaattatttttgtaccaacataatacacctttcatattatgtattatcttgcttaatgggttttatcttgattatccagttacttccatcctcttcccaatgttaatttgcaatagttttaaaatgggaacaaatgaatcaatcatcagatagttaaaatgaaattaaatcagctgcctaataatttatggaattcattggaatgtgcttaaaatgctaaagtgtatgtcattgaacatgaaatcttttttcaggcacatacattgttggtattgatgactttttaaaacctgtgggataaacttgcactgcacacggaagttttattcttgtatatttagatttgtatgcttgtgagtaaaaatgtgcatttgtaaa

SEQ ID NO: 126272 - DNA, 1547 bp, Homo sapiens
  Payload ID: 4761
  Gene Symbol: DENND4C
  Gene Name: DENN/MADD domain containing 4C
  ENST ID: ENST00000380424
  CDS Start-End: 1-1061
atgctctagagaggagatcaagcctacctttagatcatggttcaccagcacaggaaaatcctgaaagtgaaaagagctcacctgcagtgtccaggtctaaaacttttactgggcgtttcaagcagcaaaccccctctcgaactcataaagaacgttcaacttctttgtcagcactggtgcgttcttcgccacatggctcgttgggttctgtagtaaattctttgtcagggctaaagctggataatatactctcagggcccaagatagatgtcctgaaatctggtatgaaacaagcagcgacagtagccagtaagatgtgggtagctgttgcgtctgcctacagctactcagatgatgaggaagaaactaatagagactacagcttcccagctggcctagaagaccatattttgggggagaatatatcgcctaacacaagtatctcagggttggtccccagtgaacttacccagagcaacacaagtcttggcagtagcagcagtagtggagatgtaggaaaactgcattatccaacaggtgaagttccatttccaagaggcatgaaagggcaagactttgaaaaatcagatcatggttcttctcaaaataccagcatgtctagcatctatcagaattgtgcaatggaggttttgatgtccagttgttcacagtgtagagcttgtggagctttagtttatgatgaagaaattatggctggatggacagcagatgactcaaatttgaatacagcttgtccattctgtaaaagcaacttcttgcctcttctcaatatagaattcaaagatttgagaggttctgcaagctttttcctgaaaccaagtacctctggtgacagtttacaaagtggaagcattccattggcaaatgaatccttggagcacaaacctgtatccagtttagcagaacctgacttgatcaactttatggacttcccaaaacataaccagatcataactgaagaaacaggctctgcagttgaaccaaggtatcaaagggtacagagacctctttatgtagtaataaatggggtacccttgtaaaaattctgtctctaaagacaacctgactcatataggcataagttctggcatttaagagtacatcttaacttattaccacatagtgtttaacgagctaatgaatgaatctgatgataaaccatttttgaactaagtttaatattttacagttgtcttttacaaaatgaacttctcaacagtaaaatatttcccttttaatatagtcattgccagtttccagaggcgaaatgttctctttctgtgaaatgtacacttggcccttaaatactaattgaatcaaacatttattgagactctattgtatgctaaatattatgctaagctctaaaaataaaaaagtaaatatgactgggtctctctccttaggtggatcgtggcctagtagagattaaatacttgtcagtgtctttattgtacttatttgcatatagcatacttctaggtaattttgtttaataaagatgaaataatatttgagtaaagcaa

SEQ ID NO: 126273 - DNA, 3479 bp, Homo sapiens
  Payload ID: 4761
  Gene Symbol: DENND4C
  Gene Name: DENN/MADD domain containing 4C
  ENST ID: ENST00000380427
  CDS Start-End: 1-2645
cacaacctagtccagagcctcacagtcctactgaacctcctgcatggggcagcagtattgtgaaagttccgtctggtatatttgatgtcaacagcaggaaaagtagcactggtagtatatcaaatgtgctgttttctactcaagatccagttgaagatgcagtctttggcgaagctactaatctcaagaagaatggtgatagaggagaaaaaagacaaaagcattttcctgagaggagttgtagttttagttctgaaagtcgagcaggaatgttgcttaagaagagtagtttggattcgaattcaagtgaaatggctatcatgatgggagcagatgccaagattctcacagcagcattgacatgtcctaagacttctctacttcatattgcaagaacccatagctttgagaatgttagctgtcacctacctgatagtaggacttgtatgtctgaaagcacttggaatcctgagcacagatcatctccggtgccagagatgcttgaggaaagccaagaactccttgagcctgtggttgatgacgtacctaaaactactgcaacagtagatacatatgagagtctactaagtgatagtaacagtaatcagtccagagacttgaaaacagtatccaaagatctgaggaataagagaagtagtttatatggtattgctaaggtggttcagagggaagatgttgaaactggactagatcctttgtctcttttagccactgaatgtacaggaggaaaaactcctgattctgaagataagttgttttctccagttattgcacgtaatctggctgatgaaatagaaagctatatgaacctaaaaagtcccctaggtagtaaatcttctagtatggaattacacagagaggaaaacagagagtctggcatgactactgcatttattcatgctctagagaggagatcaagcctacctttagatcatggttcaccagcacaggaaaatcctgaaagtgaaaagagctcacctgcagtgtccaggtctaaaacttttactgggcgtttcaagcagcaaaccccctctcgaactcataaagaacgttcaacttctttgtcagcactggtgcgttcttcgccacatggctcgttgggttctgtagtaaattctttgtcagggctaaagctggataatatactctcagggcccaagatagatgtcctgaaatctggtatgaaacaagcagcgacagtagccagtaagatgtgggtagctgttgcgtctgcctacagctactcagatgatgaggaagaaactaatagagactacagcttcccagctggcctagaagaccatattttgggggagaatatatcgcctaacacaagtatctcagggttggtccccagtgaacttacccagagcaacacaagtcttggcagtagcagcagtagtggagatgtaggaaaactgcattatccaacaggtgaagttccatttccaagaggcatgaaagggcaagactttgaaaaatcagatcatggttcttctcaaaataccagcatgtctagcatctatcagaattgtgcaatggaggttttgatgtccagttgttcacagtgtagagcttgtggagctttagtttatgatgaagaaattatggctggatggacagcagatgactcaaatttgaatacagcttgtccattctgtaaaagcaacttcttgcctcttctcaatatagaattcaaagatttgagaggttctgcaagctttttcctgaaaccaagtacctctggtgacagtttacaaagtggaagcattccattggcaaatgaatccttggagcacaaacctgtatccagtttagcagaacctgacttgatcaactttatggacttcccaaaacataaccagatcataactgaagaaacaggctctgcagttgaaccaagtgatgaaataaagagagccagtggagatgtccaaactatgaaaatttcatctgtgcctaatagtttatcaaagcgaaatgtgtctttgactcgaagtcacagtgttggaggcccattgcagaatattgactttacccagcgaccgtttcatggcatctcaacagttagtcttccaaatagtctgcaggaagttgtggatcctttaggaaaaagacccaatcctccccctgtttctgtgccctacttgagtcctctagtactccgtaaagaacttgaatctttgctagaaaatgaaggtgatcaggtgattcatacatcttctttcatcaatcaacatccaatcattttctggaacctcgtttggtatttcagacgtttggaccttcctagtaacttgccaggacttatcctcacatctgaacattgtaatgaaggtgtacagcttcctctgtcatctctgtcccaggatagcaaacttgtgtatattcagctgttatgggataatatcaaccttcatcaggaaccaagagaacctctgtatgtctcatggaggaattttaattctgaaaagaaatcatctctcctgtcagaggaacaacaagaaacaagcactttagtagaaaccatcaggcagagtattcagcacaataatgttcttaaacccatcaacctactttcacagcaaatgaagccaggcatgaaaagacaaagaggcatttgacaatgaatatggaattgcatacaatagtctgtcttcagagattcttgaaaggttgcagaaaattgatgctccaccaagtgccagtgtcgagtggtgcaggaagtgttttggagcgcctctcatttaaatagagattcactagaatgttgacacacaaggcttggggattagatttcatctggaaacattcaagtttttttttccaaatcgtaagaactggtgaatacggaattgaagtaactcttggggacaatatataatgaattatgattcatattgcattaccttgaaatatgaagtgccatttgaatgtcccagggcttattaatattgaagattttcaacccctgaactgcttttctgcctctgtggaaaactactttgggattcttcagtatttgtagtagtttgatagaaataatgaggaaccatattcattctaggcattgtttatatttgaagttactgagtttgaggaatggcaaattaaatttgcctaacccccaaaacaaatgaaatatctcaattataaaagcaacatggccgggcacggtggctcaggcctgtaatcccagcactttgggaggctgagcaaggtgggtggatcacttgaggccaggagttcgagaccagcctggccaacacggtgagaccctgtctttactaaaaatacaaaaattagccaggcgcaccactgtagtcccagctactcaggctgaggcaggagaatcgcttgaactgaggcagaggctacagtgagtggagatcacgccactgcaactccagcttgggtgacagagtgagaccgtctcaaaaaaaaaaaaaaaaaaaaaa

SEQ ID NO: 126274 - DNA, 5335 bp, Homo sapiens
  Payload ID: 4761
  Gene Symbol: DENND4C
  Gene Name: DENN/MADD domain containing 4C
  ENST ID: ENST00000494124
  CDS Start-End: 1-1136
cagatgtacctcttttctgccttcctatgggagctactattgagtgctgggatcctgaaaccaaatatccacttccagttttttcaacttttgtcttgacaggttcttcagccaaaaaggtatatggagctgccattcagttttatgaaccttactctcgggaacttctatcagagaaacagcttatgcacctgggcttgttgacgcctgtggagagaaaaatggtctccaaatccatcaatacaaacaaatgcatttgtttactctcacactggcctttttttgaagcttttaggaaatttcttatgtttatctacaaactttctgtgtctggaccacatcctcttcccattgaaaagcacatttcacattttatgcaaaacatcccttttccttcaccacaaagaccgagaatccttgtccagctgtcagtccatgatgcattaatattatcacagccagtttctacacctttaccactaagtggagccaactttagcaccttgctaatgaatctgggtcctgagaattgtgcaacactgctgctctttgttttacttgagagtaaaattctgctgcattctcttaggccagctgtcttgactggggtagctgaagctgttgtagctatgatctttccatttcagtggcaatgcccatatattcccctttgtcctctttcactggctgcagtgcttagtgcacctttaccatttatagttggagttgactcaaggtattttgatcttcatgacccaccacaagatgttgtttgcattgacttggatacgaacatgttatatgtatcagatgaaaagaagaacatgaactggaagcaacttcccaaaaagccgtgcaaaaatctacttagcaccttaaagaaattgtatccccagctgtcttcagttcaccaaaaaactcaagaaggctcagcgattgacatgactccaattgaagcagatttctcctggcaaaagaagatgacacagcttgagatggaaattcaagaggcatttttgcgctttatggcgtctattttaaaaggatatagaacatatctcagaccaatcacagaggctccttcaaataaagccacagctgctgattcattgtttgaccgacaggttgtttcctgataaaggcacagagaaaacagataaggttgattttgattcagcagaagataccagattgatagaactagatgattcacagaaaagtgagcatactgtatttataatgccgccagagccacctcctgatgatggaaaggacctgtcaccaaagtacagttacaaatactttccaagactggaccttaagctttttgacagaccgcaggagttgaaactttgttttagtagacaccctactgggaatagcattacaaagagtccacctctcatggctaagagaactaaacaggtgtgctatcgagtagtgatgcagctttgtggactttggggtcatcctgttttagcagtgagagtcttatttgaaatgaaaactgctaggataaagcctaatgctattacttatggttattataataaggtagtcttggagagcccgtggcctagcagtacccgcagtggtattttcttatggacgaaggtacggaatgtggtacgtggcttggcacagtttaggcagccgcttaaaaagactgtgcaaaggtcacaggtctcctcaatatcagctcttcaaaatgtcacaggtggaagtgatggggacacggtgagccacggtagtgtggatagttctaatgatgctaacaatggggagcacacagtcttcgtcagagatttaatcaggcttgagtccattgataatcactctagcacagacagacttatatgacgtgaagctatggatacacgtgtgcattaattctacccttgaatgttaaccacatcaggtggtcagtctgaccaaggatacgggtctaaggatgaacttataaaggatgatgcagaaattcatgtgcctgaagaacaggcagcaagagaattgataactaaaacaaaaatgcaaacagaagaggtgtgtgatgcctctgctattgtggcaaaacattcacaacctagtccagagcctcacagtcctactgaacctcctgcatggggcagcagtattgtgaaagttccgtctggtatatttgatgtcaacagcaggaaaagtagcactggtagtatatcaaatgtgctgttttctactcaagatccagttgaagatgcagtctttggcgaagctactaatctcaagaagaatggtgatagaggagaaaaaagacaaaagcattttcctgagaggagttgtagttttagttctgaaagtcgagcaggaatgttgcttaagaagagtagtttggattcgaattcaagtgaaatggctatcatgatgggagcagatgccaagattctcacagcagcattgacatgtcctaagacttctctacttcatattgcaagaacccatagctttgagaatgttagctgtcacctacctgatagtaggacttgtatgtctgaaagcacttggaatcctgagcacagatcatctccggtgccagagatgcttgaggaaagccaagaactccttgagcctgtggttgatgacgtacctaaaactactgcaacagtagatacatatgagagtctactaagtgatagtaacagtaatcagtccagagacttgaaaacagtatccaaagatctgaggaataagagaagtagtttatatggtattgctaaggtggttcagagggaagatgttgaaactggactagatcctttgtctcttttagccactgaatgtacaggaggaaaaactcctgattctgaagataagttgttttctccagttattgcacgtaatctggctgatgaaatagaaagctatatgaacctaaaaagtcccctaggtagtaaatcttctagtatggaattacacagagaggaaaacagagagtctggcatgactactgcatttattcatgctctagagaggagatcaagcctacctttagatcatggttcaccagcacaggaaaatcctgaaagtgaaaagagctcacctgcagtgtccaggtctaaaacttttactgggcgtttcaagcagcaaaccccctctcgaactcataaagaacgttcaacttctttgtcagcactggtgcgttcttcgccacatggctcgttgggttctgtagtaaattctttgtcagggctaaagctggataatatactctcagggcccaagatagatgtcctgaaatctggtatgaaacaagcagcgacagtagccagtaagatgtgggtagctgttgcgtctgcctacagctactcagatgatgaggaagaaactaatagagactacagcttcccagctggcctagaagaccatattttgggggagaatatatcgcctaacacaagtatctcagggttggtccccagtgaacttacccagagcaacacaagtcttggcagtagcagcagtagtggagatgtaggaaaactgcattatccaacaggtgaagttccatttccaagaggcatgaaagggcaagactttgaaaaatcagatcatggttcttctcaaaataccagcatgtctagcatctatcagaattgtgcaatggaggttttgatgtccagttgttcacagtgtagagcttgtggagctttagtttatgatgaagaaattatggctggatggacagcagatgactcaaatttgaatacagcttgtccattctgtaaaagcaacttcttgcctcttctcaatatagaattcaaagatttgagaggttctgcaagctttttcctgaaaccaagtacctctggtgacagtttacaaagtggaagcattccattggcaaatgaatccttggagcacaaacctgtatccagtttagcagaacctgacttgatcaactttatggacttcccaaaacataaccagatcataactgaagaaacaggctctgcagttgaaccaagtgatgaaataaagagagccagtggagatgtccaaactatgaaaatttcatctgtgcctaatagtttatcaaagcgaaatgtgtctttgactcgaagtcacagtgttggaggcccattgcagaatattgactttacccagcgaccgtttcatggcatctcaacagttagtcttccaaatagtctgcaggaagttgtggatcctttaggaaaaagacccaatcctccccctgtttctgtgccctacttgagtcctctagtactccgtaaagaacttgaatctttgctagaaaatgaaggtgatcaggtgattcatacatcttctttcatcaatcaacatccaatcattttctggaacctcgtttggtatttcagacgtttggaccttcctagtaacttgccaggacttatcctcacatctgaacattgtaatgaaggtgtacagcttcctctgtcatctctgtcccaggatagcaaacttgtgtatattcagctgttatgggataatatcaaccttcatcaggaaccaagagaacctctgtatgtctcatggaggaattttaattctgaaaagaaatcatctctcctgtcagaggaacaacaagaaacaagcactttagtagaaaccatcaggcagagtattcagcacaataatgttcttaaacccatcaacctactttcacagcaaatgaagccaggcatgaaaagacaaaggagtttatacagagaaatcctcttcttatcattagtgtctctaggaagagagaatattgatattgaggcatttgacaatgaatatggaattgcatacaatagtctgtcttcagagattcttgaaaggttgcagaaaattgatgctccaccaagtgccagtgtcgagtggtgcaggaagtgttttggagcgcctctcatttaaatagagattcactagaatgttgacacacaaggcttggggattagatttcatctggaaacattcaagtttttttttccaaatcgtaagaactggtgaatacggaattgaagtaactcttggggacaatatataatgaattatgattcatattgcattaccttgaaatatgaagtgccatttgaatgtcccagggcttattaatattgaagattttcaacccctgaactgcttttctgcctctgtggaaaactactttgggattcttcagtatttgtagtagtttgatagaaataatgaggaaccatattcattctaggcattgtttatatttgaagttactgagtttgaggaatggcaaattaaatttgcctaacccccaaaacaaatgaaatatctcaattataaaagcaacatggccggg

SEQ ID NO: 126275 - DNA, 6718 bp, Homo sapiens
  Payload ID: 4761
  Gene Symbol: DENND4C
  Gene Name: DENN/MADD domain containing 4C
  ENST ID: ENST00000434457
  CDS Start-End: 417-6293
ggaggaaagggagagggagggggaaaagaaagtgctgttttgtggaaaggggcggaaggcgggggagaaaaagggaacagaaacatggcggtcaggtcttgggacggctgcgccgcgggcagctcctaggcgacgcgccgcccgcactgtccgacggctcacagcgcggaggcacccgcgcgggccagcgctccggccatcgcccctggctgtaggcggcgcccctcggagaccctgcccgcgaggcggcgcaggcgcagaccggactgaggcggcggcggccgctggagctagtcccccgccctgccctgccgagcgcgcccagtccgcgaatccggtgctttcttgccccaggaagaagccgtgtcggggctgcgctgacagaggagcaggcagcagaaaatacagtagcagccatgatagaagacaaaggaccaagagtgacagactactttgtcgtagctggtctcactgacacatctactcttttggatcaagaaataaatcgtttagatactaagtcaactggacctaaagctccaattacagacattgccattattatcaaatcagctggagaaacagtacctgaaggttacacctgtgtagaagccactccatcagctctccaagcaaacttgaactatggaagtctgaaaagcccagaacttttcctctgttataagagagggagagataaaccaccgcttacagatattggagttctatatgaagggaaagaacggcttattccaggatgtgaagtgatcctagccacaccctatggtcgctgtgccaatgtcaacaatagttcaactacttcacaaagaatctttatcacttatcgaagggctcctccagttcgaccccagaattccttggctgtaactgatatctgtgttattgtaaccagtaaaggagaaactcctcctcataccttctgcaaagttgacaaaaacttaaattgtggaatgtggggttccagcgtgtttctgtgttataagaagtctgtacctgcttcaaatgcaatagcatataaggctggtttaatttttagatatccagaagaggactatgagtcatttccactctcagaatcagatgtacctcttttctgccttcctatgggagctactattgagtgctgggatcctgaaaccaaatatccacttccagttttttcaacttttgtcttgacaggttcttcagccaaaaaggtatatggagctgccattcagttttatgaaccttactctcgggaacttctatcagagaaacagcttatgcacctgggcttgttgacgcctgtggagagaaaaatggtctccaaatccatcaatacaaacaaatgcatttgtttactctcacactggcctttttttgaagcttttaggaaatttcttatgtttatctacaaactttctgtgtctggaccacatcctcttcccattgaaaagcacatttcacattttatgcaaaacatcccttttccttcaccacaaagaccgagaatccttgtccagctgtcagtccatgatgcattaatattatcacagccagtttctacacctttaccactaagtggagccaactttagcaccttgctaatgaatctgggtcctgagaattgtgcaacactgctgctctttgttttacttgagagtaaaattctgctgcattctcttaggccagctgtcttgactggggtagctgaagctgttgtagctatgatctttccatttcagtggcaatgcccatatattcccctttgtcctctttcactggctgcagtgcttagtgcacctttaccatttatagttggagttgactcaaggtattttgatcttcatgacccaccacaagatgttgtttgcattgacttggatacgaacatgttatatgtatcagatgaaaagaagaacatgaactggaagcaacttcccaaaaagccgtgcaaaaatctacttagcaccttaaagaaattgtatccccagctgtcttcagttcaccaaaaaactcaagaaggctcagcgattgacatgactccaattgaagcagatttctcctggcaaaagaagatgacacagcttgagatggaaattcaagaggcatttttgcgctttatggcgtctattttaaaaggatatagaacatatctcagaccaatcacagaggctccttcaaataaagccacagctgctgattcattgtttgaccgacagggatttttaaaaagtcgagatcgtgcctatgcaaaattctatacccttttatccaaaacacagatttttattcgtttcattgaagaatgcagttttgtaagtgataaagatactggattagcattttttgatgactgcatagaaaagttgtttcctgataaaggcacagagaaaacagataaggttgattttgattcagcagaagataccagattgatagaactagatgattcacagaaaagtgagcatactgtatttataatgccgccagagccacctcctgatgatggaaaggacctgtcaccaaagtacagttacaaatactttccaagactggaccttaagctttttgacagaccgcaggagttgaaactttgttttagtagacaccctactgggaatagcattacaaagagtccacctctcatggctaagagaactaaacaggaaataaaaacagctcataaattggcgaagagatgttatacaaatccaccacagtgggccaagtgtctgtttagtcattgttacagtttatggtttatttgtcttccggcctatgttagagtttctcatcctaaagtcagagcacttcagcaggcatatgatgtacttattaagatgaggaaaacagatgtggatcccttagatgaggtgtgctatcgagtagtgatgcagctttgtggactttggggtcatcctgttttagcagtgagagtcttatttgaaatgaaaactgctaggataaagcctaatgctattacttatggttattataataaggtagtcttggagagcccgtggcctagcagtacccgcagtggtattttcttatggacgaaggtacggaatgtggtacgtggcttggcacagtttaggcagccgcttaaaaagactgtgcaaaggtcacaggtctcctcaatatcagctcttcaaaatgtcacaggtggaagtgatggggacacggtgagccacggtagtgtggatagttctaatgatgctaacaatggggagcacacagtcttcgtcagagatttaatcaggcttgagtccattgataatcactctagcacaggtggtcagtctgaccaaggatacgggtctaaggatgaacttataaaggatgatgcagaaattcatgtgcctgaagaacaggcagcaagagaattgataactaaaacaaaaatgcaaacagaagaggtgtgtgatgcctctgctattgtggcaaaacattcacaacctagtccagagcctcacagtcctactgaacctcctgcatggggcagcagtattgtgaaagttccgtctggtatatttgatgtcaacagcaggaaaagtagcactggtagtatatcaaatgtgctgttttctactcaagatccagttgaagatgcagtctttggcgaagctactaatctcaagaagaatggtgatagaggagaaaaaagacaaaagcattttcctgagaggagttgtagttttagttctgaaagtcgagcaggaatgttgcttaagaagagtagtttggattcgaattcaagtgaaatggctatcatgatgggagcagatgccaagattctcacagcagcattgacatgtcctaagacttctctacttcatattgcaagaacccatagctttgagaatgttagctgtcacctacctgatagtaggacttgtatgtctgaaagcacttggaatcctgagcacagatcatctccggtgccagagatgcttgaggaaagccaagaactccttgagcctgtggttgatgacgtacctaaaactactgcaacagtagatacatatgagagtctactaagtgatagtaacagtaatcagtccagagacttgaaaacagtatccaaagatctgaggaataagagaagtagtttatatggtattgctaaggtggttcagagggaagatgttgaaactggactagatcctttgtctcttttagccactgaatgtacaggaggaaaaactcctgattctgaagataagttgttttctccagttattgcacgtaatctggctgatgaaatagaaagctatatgaacctaaaaagtcccctaggtagtaaatcttctagtatggaattacacagagaggaaaacagagagtctggcatgactactgcatttattcatgctctagagaggagatcaagcctacctttagatcatggttcaccagcacaggaaaatcctgaaagtgaaaagagctcacctgcagtgtccaggtctaaaacttttactgggcgtttcaagcagcaaaccccctctcgaactcataaagaacgttcaacttctttgtcagcactggtgcgttcttcgccacatggctcgttgggttctgtagtaaattctttgtcagggctaaagctggataatatactctcagggcccaagatagatgtcctgaaatctggtatgaaacaagcagcgacagtagccagtaagatgtgggtagctgttgcgtctgcctacagctactcagatgatgaggaagaaactaatagagactacagcttcccagctggcctagaagaccatattttgggggagaatatatcgcctaacacaagtatctcagggttggtccccagtgaacttacccagagcaacacaagtcttggcagtagcagcagtagtggagatgtaggaaaactgcattatccaacaggtgaagttccatttccaagaggcatgaaagggcaagactttgaaaaatcagatcatggttcttctcaaaataccagcatgtctagcatctatcagaattgtgcaatggaggttttgatgtccagttgttcacagtgtagagcttgtggagctttagtttatgatgaagaaattatggctggatggacagcagatgactcaaatttgaatacagcttgtccattctgtaaaagcaacttcttgcctcttctcaatatagaattcaaagatttgagaggttctgcaagctttttcctgaaaccaagtacctctggtgacagtttacaaagtggaagcattccattggcaaatgaatccttggagcacaaacctgtatccagtttagcagaacctgacttgatcaactttatggacttcccaaaacataaccagatcataactgaagaaacaggctctgcagttgaaccaagtgatgaaataaagagagccagtggagatgtccaaactatgaaaatttcatctgtgcctaatagtttatcaaagcgaaatgtgtctttgactcgaagtcacagtgttggaggcccattgcagaatattgactttacccagcgaccgtttcatggcatctcaacagttagtcttccaaatagtctgcaggaagttgtggatcctttaggaaaaagacccaatcctccccctgtttctgtgccctacttgagtcctctagtactccgtaaagaacttgaatctttgctagaaaatgaaggtgatcaggtgattcatacatcttctttcatcaatcaacatccaatcattttctggaacctcgtttggtatttcagacgtttggaccttcctagtaacttgccaggacttatcctcacatctgaacattgtaatgaaggtgtacagcttcctctgtcatctctgtcccaggatagcaaacttgtgtatattcagctgttatgggataatatcaaccttcatcaggaaccaagagaacctctgtatgtctcatggaggaattttaattctgaaaagaaatcatctctcctgtcagaggaacaacaagaaacaagcactttagtagaaaccatcaggcagagtattcagcacaataatgttcttaaacccatcaacctactttcacagcaaatgaagccaggcatgaaaagacaaaggagtttatacagagaaatcctcttcttatcattagtgtctctaggaagagagaatattgatattgaggcatttgacaatgaatatggaattgcatacaatagtctgtcttcagagattcttgaaaggttgcagaaaattgatgctccaccaagtgccagtgtcgagtggtgcaggaagtgttttggagcgcctctcatttaaatagagattcactagaatgttgacacacaaggcttggggattagatttcatctggaaacattcaagtttttttttccaaatcgtaagaactggtgaatacggaattgaagtaactcttggggacaatatataatgaattatgattcatattgcattaccttgaaatatgaagtgccatttgaatgtcccagggcttattaatattgaagattttcaacccctgaactgcttttctgcctctgtggaaaactactttgggattcttcagtatttgtagtagtttgatagaaataatgaggaaccatattcattctaggcattgtttatatttgaagttactgagtttgaggaatggcaaattaaatttgcctaacccccaaaacaaatgaaatatctcaattataaaagcaacatggccgggcacg

SEQ ID NO: 126276 - DNA, 6831 bp, Homo sapiens
  Payload ID: 4761
  Gene Symbol: DENND4C
  Gene Name: DENN/MADD domain containing 4C
  ENST ID: ENST00000602925
  CDS Start-End: 417-6146
ggaggaaagggagagggagggggaaaagaaagtgctgttttgtggaaaggggcggaaggcgggggagaaaaagggaacagaaacatggcggtcaggtcttgggacggctgcgccgcgggcagctcctaggcgacgcgccgcccgcactgtccgacggctcacagcgcggaggcacccgcgcgggccagcgctccggccatcgcccctggctgtaggcggcgcccctcggagaccctgcccgcgaggcggcgcaggcgcagaccggactgaggcggcggcggccgctggagctagtcccccgccctgccctgccgagcgcgcccagtccgcgaatccggtgctttcttgccccaggaagaagccgtgtcggggctgcgctgacagaggagcaggcagcagaaaatacagtagcagccatgatagaagacaaaggaccaagagtgacagactactttgtcgtagctggtctcactgacacatctactcttttggatcaagaaataaatcgtttagatactaagtcaactggacctaaagctccaattacagacattgccattattatcaaatcagctggagaaacagtacctgaaggttacacctgtgtagaagccactccatcagctctccaagcaaacttgaactatggaagtctgaaaagcccagaacttttcctctgttataagagagggagagataaaccaccgcttacagatattggagttctatatgaagggaaagaacggcttattccaggatgtgaagtgatcctagccacaccctatggtcgctgtgccaatgtcaacaatagttcaactacttcacaaagaatctttatcacttatcgaagggctcctccagttcgaccccagaattccttggctgtaactgatatctgtgttattgtaaccagtaaaggagaaactcctcctcataccttctgcaaagttgacaaaaacttaaattgtggaatgtggggttccagcgtgtttctgtgttataagaagtctgtacctgcttcaaatgcaatagcatataaggctggtttaatttttagatatccagaagaggactatgagtcatttccactctcagaatcagatgtacctcttttctgccttcctatgggagctactattgagtgctgggatcctgaaaccaaatatccacttccagttttttcaacttttgtcttgacaggttcttcagccaaaaaggtatatggagctgccattcagttttatgaaccttactctcgggaacttctatcagagaaacagcttatgcacctgggcttgttgacgcctgtggagagaaaaatggtctccaaatccatcaatacaaacaaatgcatttgtttactctcacactggcctttttttgaagcttttaggaaatttcttatgtttatctacaaactttctgtgtctggaccacatcctcttcccattgaaaagcacatttcacattttatgcaaaacatcccttttccttcaccacaaagaccgagaatccttgtccagctgtcagtccatgatgcattaatattatcacagccagtttctacacctttaccactaagtggagccaactttagcaccttgctaatgaatctgggtcctgagaattgtgcaacactgctgctctttgttttacttgagagtaaaattctgctgcattctcttaggccagctgtcttgactggggtagctgaagctgttgtagctatgatctttccatttcagtggcaatgcccatatattcccctttgtcctctttcactggctgcagtgcttagtgcacctttaccatttatagttggagttgactcaaggtattttgatcttcatgacccaccacaagatgttgtttgcattgacttggatacgaacatgttatatgtatcagatgaaaagaagaacatgaactggaagcaacttcccaaaaagccgtgcaaaaatctacttagcaccttaaagaaattgtatccccagctgtcttcagttcaccaaaaaactcaagaaggctcagcgattgacatgactccaattgaagcagatttctcctggcaaaagaagatgacacagcttgagatggaaattcaagaggcatttttgcgctttatggcgtctattttaaaaggatatagaacatatctcagaccaatcacagaggctccttcaaataaagccacagctgctgattcattgtttgaccgacagggatttttaaaaagtcgagatcgtgcctatgcaaaattctatacccttttatccaaaacacagatttttattcgtttcattgaagaatgcagttttgtaagtgataaagatactggattagcattttttgatgactgcatagaaaagttgtttcctgataaaggcacagagaaaacagataaggttgattttgattcagcagaagataccagattgatagaactagatgattcacagaaaagtgagcatactgtatttataatgccgccagagccacctcctgatgatggaaaggacctgtcaccaaagtacagttacaaatactttccaagactggaccttaagctttttgacagaccgcaggagttgaaactttgttttagtagacaccctactgggaatagcattacaaagagtccacctctcatggctaagagaactaaacaggaaataaaaacagctcataaattggcgaagagatgttatacaaatccaccacagtgggccaagtgtctgtttagtcattgttacagtttatggtttatttgtcttccggcctatgttagagtttctcatcctaaagtcagagcacttcagcaggcatatgatgtacttattaagatgaggaaaacagatgtggatcccttagatgaggtgtgctatcgagtagtgatgcagctttgtggactttggggtcatcctgttttagcagtgagagtcttatttgaaatgaaaactgctaggataaagcctaatgctattacttatggttattataataaggtagtcttggagagcccgtggcctagcagtacccgcagtggtattttcttatggacgaaggtacggaatgtggtacgtggcttggcacagtttaggcagccgcttaaaaagactgtgcaaaggtcacaggtctcctcaatatcaggtggtcagtctgaccaaggatacgggtctaaggatgaacttataaaggatgatgcagaaattcatgtgcctgaagaacaggcagcaagagaattgataactaaaacaaaaatgcaaacagaagaggtgtgtgatgcctctgctattgtggcaaaacattcacaacctagtccagagcctcacagtcctactgaacctcctgcatggggcagcagtattgtgaaagttccgtctggtatatttgatgtcaacagcaggaaaagtagcactggtagtatatcaaatgtgctgttttctactcaagatccagttgaagatgcagtctttggcgaagctactaatctcaagaagaatggtgatagaggagaaaaaagacaaaagcattttcctgagaggagttgtagttttagttctgaaagtcgagcaggaatgttgcttaagaagagtagtttggattcgaattcaagtgaaatggctatcatgatgggagcagatgccaagattctcacagcagcattgacatgtcctaagacttctctacttcatattgcaagaacccatagctttgagaatgttagctgtcacctacctgatagtaggacttgtatgtctgaaagcacttggaatcctgagcacagatcatctccggtgccagagatgcttgaggaaagccaagaactccttgagcctgtggttgatgacgtacctaaaactactgcaacagtagatacatatgagagtctactaagtgatagtaacagtaatcagtccagagacttgaaaacagtatccaaagatctgaggaataagagaagtagtttatatggtattgctaaggtggttcagagggaagatgttgaaactggactagatcctttgtctcttttagccactgaatgtacaggaggaaaaactcctgattctgaagataagttgttttctccagttattgcacgtaatctggctgatgaaatagaaagctatatgaacctaaaaagtcccctaggtagtaaatcttctagtatggaattacacagagaggaaaacagagagtctggcatgactactgcatttattcatgctctagagaggagatcaagcctacctttagatcatggttcaccagcacaggaaaatcctgaaagtgaaaagagctcacctgcagtgtccaggtctaaaacttttactgggcgtttcaagcagcaaaccccctctcgaactcataaagaacgttcaacttctttgtcagcactggtgcgttcttcgccacatggctcgttgggttctgtagtaaattctttgtcagggctaaagctggataatatactctcagggcccaagatagatgtcctgaaatctggtatgaaacaagcagcgacagtagccagtaagatgtgggtagctgttgcgtctgcctacagctactcagatgatgaggaagaaactaatagagactacagcttcccagctggcctagaagaccatattttgggggagaatatatcgcctaacacaagtatctcagggttggtccccagtgaacttacccagagcaacacaagtcttggcagtagcagcagtagtggagatgtaggaaaactgcattatccaacaggtgaagttccatttccaagaggcatgaaagggcaagactttgaaaaatcagatcatggttcttctcaaaataccagcatgtctagcatctatcagaattgtgcaatggaggttttgatgtccagttgttcacagtgtagagcttgtggagctttagtttatgatgaagaaattatggctggatggacagcagatgactcaaatttgaatacagcttgtccattctgtaaaagcaacttcttgcctcttctcaatatagaattcaaagatttgagaggttctgcaagctttttcctgaaaccaagtacctctggtgacagtttacaaagtggaagcattccattggcaaatgaatccttggagcacaaacctgtatccagtttagcagaacctgacttgatcaactttatggacttcccaaaacataaccagatcataactgaagaaacaggctctgcagttgaaccaagtgatgaaataaagagagccagtggagatgtccaaactatgaaaatttcatctgtgcctaatagtttatcaaagcgaaatgtgtctttgactcgaagtcacagtgttggaggcccattgcagaatattgactttacccagcgaccgtttcatggcatctcaacagttagtcttccaaatagtctgcaggaagttgtggatcctttaggaaaaagacccaatcctccccctgtttctgtgccctacttgagtcctctagtactccgtaaagaacttgaatctttgctagaaaatgaaggtgatcaggtgattcatacatcttctttcatcaatcaacatccaatcattttctggaacctcgtttggtatttcagacgtttggaccttcctagtaacttgccaggacttatcctcacatctgaacattgtaatgaaggtgtacagcttcctctgtcatctctgtcccaggatagcaaacttgtgtatattcagctgttatgggataatatcaaccttcatcaggaaccaagagaacctctgtatgtctcatggaggaattttaattctgaaaagaaatcatctctcctgtcagaggaacaacaagaaacaagcactttagtagaaaccatcaggcagagtattcagcacaataatgttcttaaacccatcaacctactttcacagcaaatgaagccaggcatgaaaagacaaaggagtttatacagagaaatcctcttcttatcattagtgtctctaggaagagagaatattgatattgaggcatttgacaatgaatatggaattgcatacaatagtctgtcttcagagattcttgaaaggttgcagaaaattgatgctccaccaagtgccagtgtcgagtggtgcaggaagtgttttggagcgcctctcatttaaatagagattcactagaatgttgacacacaaggcttggggattagatttcatctggaaacattcaagtttttttttccaaatcgtaagaactggtgaatacggaattgaagtaactcttggggacaatatataatgaattatgattcatattgcattaccttgaaatatgaagtgccatttgaatgtcccagggcttattaatattgaagattttcaacccctgaactgcttttctgcctctgtggaaaactactttgggattcttcagtatttgtagtagtttgatagaaataatgaggaaccatattcattctaggcattgtttatatttgaagttactgagtttgaggaatggcaaattaaatttgcctaacccccaaaacaaatgaaatatctcaattataaaagcaacatggccgggcacggtggctcaggcctgtaatcccagcactttgggaggctgagcaaggtgggtggatcacttgaggccaggagttcgagaccagcctggccaacacggtgagaccctgtctttactaaaaatacaaaaattagccaggcgcaccactgtagtcccagctactcaggctgaggcaggagaatcgcttgaactgaggcagaggctacagtgagtggagatcacgccactgcaactccagcttgggtgacagagtgagaccgtctc

SEQ ID NO: 126277 - DNA, 5031 bp, Homo sapiens
  Payload ID: 4762
  Gene Symbol: DENND5A
  Gene Name: DENN/MADD domain containing 5A
  Uniprot ID: Q6IQ26
  ENST ID: ENST00000328194
  CDS Start-End: 322-4185
gaggagggtcacggtgggggctgtccacgcgctctccgcccttctccaggctcgctcgggccgcggcgctctcggctagctgcagcggcggcggcgcggaggggaaggcatccaggatgcggtgcggggcggcccggtgcccccccgccccgtcacggcagccgcggcggccgaggggaccgggccagggccgggggcggcggcccgagccgcggtagcggcggcggcgggaggggcggcctgagggcggacgggcgggcgcccgggttgcgggggctcggtgccgctccgcactgcccggccggtctcggccccggcgccatgagtggcggcggcggcggagggggctcggcgcccagtcgcttcgccgactactttgtcatctgcggactggacacggagaccgggctggagccggacgagctgtcggcattatgccagtacatacaggcttctaaagccagggatggtgccagccctttcatttcaagtacgactgaaggagaaaattttgagcagacaccattgagaagaacattcaaatctaaggtccttgcacgatatcctgagaacgtagaatggaatccctttgaccaagatgcagtaggaatgctatgtatgccgaaagggctggcattcaagacccaggctgatcccagggagccccaattccatgcctttattatcacaagggaggatggctctcggacatttgggtttgccctcacattttatgaagaggtgactagcaagcagatctgcagtgcaatgcagaccctctaccacatgcacaatgctgagtatgatgtcctacatgctccccctgctgatgacagagaccagagcagcatggaggatggtgaagacactcctgtgaccaaactgcagcgcttcaactcctatgacattagccgggacactctctacgtctctaagtgcatctgcctcatcacacccatgtctttcatgaaggcatgtcggagcgtgctggagcaactccaccaggcagtcacttcacctcagccccctccactgccccttgagagctacatatacaacgtactctacgaggtgccgctcccacctcctggccggtccttgaagttttctggggtctatgggccaataatctgccagagaccaagtaccaatgagcttcccctatttgactttcctgtcaaagaggtttttgaactgctcggggtggagaatgtgtttcagctttttacttgtgcccttctggagtttcaaatcctgctctactcacagcattaccagagactgatgactgtggcggagacgattacagctctcatgtttcctttccagtggcagcatgtctatgtccctattctcccagcttctctcctgcatttcttagatgctcctgttccatacctgatgggtttgcattccaatggcctggatgaccggtcaaagctggagctgcctcaagaggctaacctctgctttgtggacattgacaaccacttcattgagttgccagaggacttgccacagttccccaacaaattggagtttgtccaggaagtctctgagattctcatggcatttggaattccccctgaagggaatcttcattgcagtgagagtgcctccaagctgaagaggctgcgggcctctgagcttgtctcggacaagaggaatgggaacattgctggctcccctttgcattcctacgagcttcttaaggagaatgaaactattgcccggctgcaagccttggtcaagagaactggggtgagcctggaaaagttggaagtgcgtgaagaccccagcagcaataaggatctcaaagttcagtgtgatgaagaagaactcaggatttaccagctaaacattcagatccgggaagtttttgcaaatcgtttcactcagatgtttgcagattatgaggtgtttgtcatccaacccagccaggataaggaatcctggtttaccaacagggagcaaatgcaaaactttgataaagcatcttttctgtcagatcagcctgagccctacctgcccttcctctcaagattcctggagacccagatgtttgcatctttcattgacaacaaaataatgtgtcatgatgatgatgataaagaccctgtactccgggtatttgattcccgagttgacaagatcaggctgttgaatgttcggacacctactctccgtacatccatgtaccagaagtgtaccactgtggatgaagcagagaaagcaattgagctgcgtctggcaaaaattgaccatactgcaattcacccacatttacttgacatgaagattggacaagggaaatatgagccgggcttcttccctaagctgcagtctgatgtactttccactgggccagccagcaacaagtggacgaaaaggaatgcccctgcccagtggaggcggaaagatcggcagaagcagcacacagaacacctgcgtttagataatgaccagagggagaagtacatccaggaagccaggactatgggcagcactatccgccagcccaaactgtccaacctctctccatcagtgattgcccagaccaattggaagtttgtagagggcctgctgaaggaatgccgcaataagaccaagaggatgctggtggaaaagatgggccgagaagctgtggagctagggcatggggaggtgaacatcacaggggtggaagagaacaccctgattgccagcctttgtgatctcctggaaaggatctggagtcatggactacaagtgaaacaggggaaatcagccttatggtcccacctgttacattatcaggacaaccggcagagaaaactcacatcaggaagcctcagtacctcaggaatacttcttgattcagaacgtaggaagtctgatgccagctcactcatgcctcccctgaggatctccctgattcaggatatgaggcacatccagaacatcggggaaatcaagactgatgtgggaaaggccagagcatgggtgcgactgtccatggaaaaaaagttactttccagacacctgaagcagctcctctcagaccatgagctcaccaaaaagttatataagcgctatgccttcctgcgctgtgatgacgagaaggagcagttcctctatcacctcctgtctttcaatgccgtcgattacttttgcttcaccaatgtcttcacaactatcctgatcccgtaccacattctgatcgtaccaagcaagaagctggggggctccatgttcactgccaacccatggatctgtatatcaggagaattgggtgagacacagatcatgcagattcccaggaatgtgctagagatgaccttcgagtgccagaacttggggaagcttactactgtccagattggccatgataactctgggctgtatgccaaatggctggtggagtatgtgatggtcaggaatgagatcacaggacatacctacaagttcccgtgtggccggtggttagggaagggcatggatgatggaagcctggagcggatcctagttggggagctgctcacatcccagcctgaggtggatgagaggccatgccggaccccgccgctgcagcagtcccccagtgtcatccggaggcttgttaccatctcacccaacaacaagcccaagctgaacactgggcagatccaggagtccatcggggaggcagtcaatggcattgtgaagcacttccataagcctgagaaagagcgaggcagtctgacgctgttgctctgtggagagtgtggccttgtctcggccttggaacaggctttccagcatggatttaaatcgccccggctcttcaaaaatgtcttcatttgggatttcctggaaaaagcacaaacctattatgagacattagagaagaatgaagtagtccctgaggaaaactggcatacaagagcccggaacttctgccgatttgtcactgcaatcaacaatactccccggaacatcggcaaggatggcaagtttcagatgctggtgtgcttgggagccagagatcacctcctacaccactggattgccctgctggctgactgccccatcactgcacacatgtatgaggatgtggcactgatcaaagaccatacacttgtcaattccttgattcgtgtgctgcagacattgcaggagttcaacatcacgctggagacgtcccttgtcaagggcatcgacatctgacctcccagcaccagccagcagcaggactgagaaagactcaccctgcagctctgaccttttttcccaaagggacttaagcgattgtgcaggagtaggagacaaaatgtacactcactgtaaaaagaaaactagaggatttttggaataaataatctattttagagtttatttgctgatttgctttttacacactttcatgtgaaagagtgatagggagagggagcgaggctggtgccgcttattttgaagctggtgccctccctcgccgtggccacatgctggaagcctgaggcctccctggactgagcctgtggcactgcgtgcgggacagttatgtttccttgccccgtcgcattaatgaggcccttccacatcatttttaaactaatgtttttctatattaacattattatggatatttggctttcataggccacacacaggtgtgctgcgcgggaagccccatgctccaatcaaagggatttttagtagtgcctctaagcaagcaccgatgagtcagtcccacgtattttcttttttgtcagtattgtttgggaaggagacatgccgggatgtgtcatcgtgccaaataccacatttcctgttggcacagtttcacagaagtaaacataagcatgttttaacaggtttttcttttcttttttcttttttaaaatgttttatttatttaacccgccattgtgtgtttttaagtattttctttttttaaggaaaggaaaagcttgtcacaatctaactggctatgttattattattaaatttatgttttgcaacttagaaaccagctacagtatggcccacttaataaaacacctgaaacaaaaa

SEQ ID NO: 126278 - DNA, 566 bp, Homo sapiens
  Payload ID: 4762
  Gene Symbol: DENND5A
  Gene Name: DENN/MADD domain containing 5A
  ENST ID: ENST00000524446
  CDS Start-End: 1-566
tcaggacaaccggcagagaaaactcacatcaggaagcctcagtacctcagaacgtaggaagtctgatgccagctcactcatgcctcccctgaggatctccctgattcaggatatgaggcacatccagaacatcggggaaatcaagactgatgtgggaaaggccagagcatgggtgcgactgtccatggaaaaaaagttactttccagacacctgaagcagctcctctcagaccatgagctcaccaaaaagttatataagcgctatgccttcctgcgctgtgatgacgagaaggagcagttcctctatcacctcctgtctttcaatgccgtcgattacttttgcttcaccaatgtcttcacaactatcctgatcccgtaccacattctgatcgtaccaagcaagaagctggggggctccatgttcactgccaacccatggatctgtatatcaggagaattgggtgagacacagatcatgcagattcccaggaatgtgctagagatgaccttcgagtgccagaacttggggaagcttactactgtccagattggccatgataactctg

SEQ ID NO: 126279 - DNA, 782 bp, Homo sapiens
  Payload ID: 4762
  Gene Symbol: DENND5A
  Gene Name: DENN/MADD domain containing 5A
  ENST ID: ENST00000525784
  CDS Start-End: 1-782
tgatcccgtaccacattctgatcgtaccaagcaagaagctggggggctccatgttcactgccaacccatggatctgtatatcaggagaattgggtgagacacagatcatgcagattcccaggaatgtgctagagatgaccttcgagtgccagaacttggggaagcttactactgtccagattggccatgataactctgggctgtatgccaaatggctggtggagtatgtgatggtcaggaatgagatcacaggacatacctacaagttcccgtgtggccggtggttagggaagggcatggatgatggaagcctggagcggatcctagttggggagctgctcacatcccagcctgaggtggatgagaggccatgccggaccccgccgctgcagcagtcccccagtgtcatccggaggcttgttaccatctcacccaacaacaagcccaaaaaagcacaaacctattatgagacattagagaagaatgaagtagtccctgaggaaaactggcatacaagagcccggaacttctgccgatttgtcactgcaatcaacaatactccccggaacatcggcaaggatggcaagtttcagatgctggtgtgcttgggagccagagatcacctcctacaccactggattgccctgctggctgactgccccatcactgcacacatgtatgaggatgtggcactgatcaaagaccatacacttgtcaattccttgattcgtgtgctgcagacattgcaggagttcaacatcacgctggagacgtcccttgtc

SEQ ID NO: 126280 - DNA, 611 bp, Homo sapiens
  Payload ID: 4762
  Gene Symbol: DENND5A
  Gene Name: DENN/MADD domain containing 5A
  ENST ID: ENST00000530780
  CDS Start-End: 33-242
cgcactgcccggccggtctcggccccggcgccatgagtggcggcggcggcggagggggctcggcgcccagtcgcttcgccgactactttgtcatctgcggactggacacggagaccgggctggagccggacgagctgtcggcattatgccagtacatacaggcttctaaagccagggatggtgccagccctttcatttcaagtacgactgaagagatcattgaaatgcatagtttattctgaattttaggagaaaattttgagcagacaccattgagaagaacattcaaatctaaggtccttgcacgatatcctgagaacgtagaatggaatccctttgaccaagatgcagtaggaatgctatgtatgccgaaagggctggcattcaagacccaggctgatcccagggagccccaattccatgcctttattatcacaagggaggatggctctcggacatttgggtttgccctcacattttatgaagaggtgactagcaagcagatctgcagtgcaatgcagaccctctaccacatgcacaatgctgagtatgatgtcctacatgctccccctgctgatgacagagaccagagcagcatggaggatggtgaa

SEQ ID NO: 126281 - DNA, 728 bp, Homo sapiens
  Payload ID: 4762
  Gene Symbol: DENND5A
  Gene Name: DENN/MADD domain containing 5A
  ENST ID: ENST00000528725
  CDS Start-End: 1-560
gaggccatgccggaccccgccgctgcagcagtcccccagtgtcatccggaggcttgttaccatctcacccaacaacaagcccacgaggcagtctgacgctgttgctctgtggagagtgtggccttgtctcggccttggaacaggctttccagcatggatttaaatcgccccggctcttcaaaaatgtcttcatttgggatttcctggaaaaagcacaaacctattatgagacattagagaagaatgaagtagtccctgaggaaaactggcatacaagagcccggaacttctgccgatttgtcactgcaatcaacaatactccccggaacatcggcaaggatggcaagtttcagatgctggtgtgcttgggagccagagatcacctcctacaccactggattgccctgctggctgactgccccatcactgcacacatgtatgaggatgtggcactgatcaaagaccatacacttgtcaattccttgattcgtgtgctgcagacattgcaggagttcaacatcacgctggagacgtcccttgtcaagggcatcgacatctgacctcccagcaccagccagcagcaggactgagaaagactcaccctgcagctctgaccttttttcccaaagggacttaagcgattgtgcaggagtaggagacaaaatgtacactcactgtaaaaagaaaactagaggatttttggaataaataatctattttagagttta

SEQ ID NO: 126282 - DNA, 604 bp, Homo sapiens
  Payload ID: 4762
  Gene Symbol: DENND5A
  Gene Name: DENN/MADD domain containing 5A
  ENST ID: ENST00000527896
  CDS Start-End: 1-315
cccagccaggataaggaatcctggtttaccaacagggagcaaatgcaaaactttgataaagcatcttttctgtcagatcagcctgagccctacctgcccttcctctcaagattcctggagacccagatgtttgcatctttcattgacaacaaaataatgtgtcatgatgatgatgataaagaccctgtactccgggtatttgattcccgagttgacaagatcaggctgttgaatgttcggacacctactctccgtacatccatgtaccagaagtgtaccactgtggatgaagcaggccaaaatcatattatatgatcaacctcaagtgcatgggaagctgtgaaagtgaacattgaactgggtataatgttaccctgaacagtatgaaggtctatgagcaagaaagaaggggtgaatgaattatgaagaaagcaattgagctgcgtctggcaaaaattgaccatactgcaattcacccacatttacttgacatgaagattggacaagggaaatatgagccgggcttcttccctaagctgcagtctgatgtactttccactgggccagccagcaacaagtggacgaaaaggaatgcccctgccca

SEQ ID NO: 126283 - DNA, 915 bp, Homo sapiens
  Payload ID: 4762
  Gene Symbol: DENND5A
  Gene Name: DENN/MADD domain containing 5A
  ENST ID: ENST00000531747
  CDS Start-End: 1-190
gggaaaggccagagcatgggtgcgactgtccatggaaaaaaagttactttccagacacctgaagcagctcctctcagaccatgagctcaccaatgatcccgtaccacattctgatcgtaccaagcaagaagctggggggctccatgttcactgccaacccatggatctgtatatcaggagaattgggtgagacacagatcatgcagattcccaggaatgtgctagagatgaccttcgagtgccagaacttggggaagcttactactgtccagattggccatgataactctgggctgtatgccaaatggctggtggagtatgtgatggtcaggaatgagatcacaggacatacctacaagttcccgtgtggccggtggttagggaagggcatggatgatggaagcctggagcggatcctagttggggagctgctcacatcccagcctgaggtggatgagaggccatgccggaccccgccgctgcagcagtcccccagtgtcatccggaggcttgttaccatctcacccaacaacaagcccaagctgaacactgggcagatccaggagtccatcggggaggcagtcaatggcattgtgaagcacttccataagcctgagaaagagcgaggcagtctgacgctgttgctctgtggagagtgtggccttgtctcggccttggaacaggctttccagcatggatttaaatcgccccggctcttcaaaaatgtcttcatttgggatttcctggaaaaagcacaaacctattatgagacattagagaagaatgaagtagtccctgaggaaaactggcatacaagagcccggaacttctgccgatttgtcactgcaatcaacaatactccccggaacatcggcaaggatggcaagtttcagatgctggtgtgcttgggagcca

SEQ ID NO: 126284 - DNA, 743 bp, Homo sapiens
  Payload ID: 4762
  Gene Symbol: DENND5A
  Gene Name: DENN/MADD domain containing 5A
  ENST ID: ENST00000533737
  CDS Start-End: 1-587
gggaggcagtcaatggcattgtgaagcacttccataagcctgagaaagagcgaggcagtctgacgctgttgctctgtggagagtgtggccttgtctcggccttggaacaggctttccagcatggatttaaatcgccccggctcttcaaaaatgtcttcatttgggatttcctggaaaaagcacaaacctattatgagacattagagaagaatgaagtagtccctgaggaaaactggcatacaagagcccggaacttctgccgatttgtcactgcaatcaacaatactccccggaacatcggcaaggatggcaagtttcagatgctggtgtgcttgggagccagggttatcatgaagattaaatctcttatgtcagtgccagcacatgctgagtgttatgtgagagatcacctcctacaccactggattgccctgctggctgactgccccatcactgcacacatgtatgaggatgtggcactgatcaaagaccatacacttgtcaattccttgattcgtgtgctgcagacattgcaggagttcaacatcacgctggagacgtcccttgtcaagggcatcgacatctgacctcccagcaccagccagcagcaggactgagaaagactcaccctgcagctctgaccttttttcccaaagggacttaagcgattgtgcaggagtaggagacaaaatgtacactcactgtaaaaagaaaactagaggatttttggaataaataatcta

SEQ ID NO: 126285 - DNA, 4060 bp, Homo sapiens
  Payload ID: 4762
  Gene Symbol: DENND5A
  Gene Name: DENN/MADD domain containing 5A
  Uniprot ID: Q6IQ26
  ENST ID: ENST00000530044
  CDS Start-End: 19-3744
ggtctcggccccggcgccatgagtggcggcggcggcggagggggctcggcgcccagtcgcttcgccgactactttgtcatctgcggactggacacggagaccgggctggagccggacgagctgtcggcattatgccagtacatacaggcttctaaagccagggatggtgccagccctttcatttcaagtacgactgaaggagaaaattttgagcagacaccattgagaagaacattcaaatctaaggtccttgcacgatatcctgagaacgtagaatggaatccctttgaccaagatgcagtaggaatgctatgtatgccgaaagggctggcattcaagacccaggctgatcccagggagccccaattccatgcctttattatcacaagggaggatggctctcggacatttgggtttgccctcacattttatgaagaggtgactagcaagcagatctgcagtgcaatgcagaccctctaccacatgcacaatgctgagtatgatgtcctacatgctccccctgctgatgacagagaccagagcagcatggaggatggtgaagacactcctgtgaccaaactgcagcgcttcaactcctatgacattagccgggacactctctacgtctctaagtgcatctgcctcatcacacccatgtctttcatgaaggcatgtcggagcgtgctggagcaactccaccaggcagtcacttcacctcagccccctccactgccccttgagagctacatatacaacgtactctacgaggtgccgctcccacctcctggccggtccttgaagttttctggggtctatgggccaataatctgccagagaccaagtaccaatgagcttcccctatttgactttcctgtcaaagaggtttttgaactgctcggggtggagaatgtgtttcagctttttacttgtgcccttctggagtttcaaatcctgctctactcacagcattaccagagactgatgactgtggcggagacgattacagctctcatgtttcctttccagtggcagcatgtctatgtccctattctcccagcttctctcctgcatttcttagatgctcctgttccatacctgatgggtttgcattccaatggcctggatgaccggtcaaagctggagctgcctcaagaggctaacctctgctttgtggacattgacaaccacttcattgagttgccagaggacttgccacagttccccaacaaattggagtttgtccaggaagtctctgagattctcatggcatttggaattccccctgaagggaatcttcattgcagtgagagtgcctccaagctgaagaggctgcgggcctctgagcttgtctcggacaagaggaatgggaacattgctggctcccctttgcattcctacgagcttcttaaggagaatgaaactattgcccggctgcaagccttggtcaagagaactggggtgagcctggaaaagttggaagtgcgtgaagaccccagcagcaataaggatctcaaagttcagtgtgatgaagaagaactcaggatttaccagctaaacattcagatccgggaagtttttgcaaatcgtttcactcagatgtttgcagattatgaggtgtttgtcatccaacccagccaggataaggaatcctggtttaccaacagggagcaaatgcaaaactttgataaagcatcttttctgtcagatcagcctgagccctacctgcccttcctctcaagattcctggagacccagatgtttgcatctttcattgacaacaaaataatgtgtcatgatgatgatgataaagaccctgtactccgggtatttgattcccgagttgacaagatcaggctgttgaatgttcggacacctactctccgtacatccatgtaccagaagtgtaccactgtggatgaagcagagaaagcaattgagctgcgtctggcaaaaattgaccatactgcaattcacccacatttacttgacatgaagattggacaagggaaatatgagccgggcttcttccctaagctgcagtctgatgtactttccactgggccagccagcaacaagtggacgaaaaggaatgcccctgcccagtggaggcggaaagatcggcagaagcagcacacagaacacctgcgtttagataatgaccagagggagaagtacatccaggaagccaggactatgggcagcactatccgccagcccaaactgtccaacctctctccatcagtgattgcccagaccaattggaagtttgtagagggcctgctgaaggaatgccgcaataagaccaagaggatgctggtggaaaagatgggccgagaagctgtggagctagggcatggggaggtgaacatcacaggggtggaagagaacaccctgattgccagcctttgtgatctcctggaaaggatctggagtcatggactacaagtgaaacaggggaaatcagccttatggtcccacctgttacattatcaggacaaccggcagagaaaactcacatcaggaagcctcagtacctcaggaatacttcttgattcagaacgtaggaagtctgatgccagctcactcatgcctcccctgaggatctccctgattcaggatatgaggcacatccagaacatcggggaaatcaagactgatgtgggaaaggccagagcatgggtgcgactgtccatggaaaaaaagttactttccagacacctgaagcagctcctctcagaccatgagctcaccaaaaagttatataagcgctatgccttcctgcgctgtgatgacgagaaggagcagttcctctatcacctcctgtctttcaatgccgtcgattacttttgcttcaccaatgtcttcacaactatcctgatcccgtaccacattctgatcgtaccaagcaagaagctggggggctccatgttcactgccaacccatggatctgtatatcaggagaattgggtgagacacagatcatgcagattcccaggaatgtgctagagatgaccttcgagtgccagaacttggggaagcttactactgtccagattggccatgataactctgggctgtatgccaaatggctggtggagtatgtgatggtcaggaatgagatcacaggacatacctacaagttcccgtgtggccggtggttagggaagggcatggatgatggaagcctggagcggatcctagttggggagctgctcacatcccagcctgaggtggatgagaggccatgccggaccccgccgctgcagcagtcccccagtgtcatccggaggcttgttaccatctcacccaacaacaagcccaagctgaacactgggcagatccaggagtccatcggggaggcagtcaatggcattgtgaagcacttccataagcctgagaaagagcgaggcagtctgacgctgttgctctgtggagagtgtggccttgtctcggccttggaacaggctttccagcatggatttaaatcgccccggctcttcaaaaatgtcttcatttgggatttcctggaaaaagcacaaacctattatgagacattagagaagaatgaagtagtccctgaggaaaactggcatacaagagcccggaacttctgccgatttgtcactgcaatcaacaatactccccggaacatcggcaaggatgagatcacctcctacaccactggattgccctgctggctgactgccccatcactgcacacatgtatgaggatgtggcactgatcaaagaccatacacttgtcaattccttgattcgtgtgctgcagacattgcaggagttcaacatcacgctggagacgtcccttgtcaagggcatcgacatctgacctcccagcaccagccagcagcaggactgagaaagactcaccctgcagctctgaccttttttcccaaagggacttaagcgattgtgcaggagtaggagacaaaatgtacactcactgtaaaaagaaaactagaggatttttggaataaataatctattttagagtttatttgctgatttgctttttacacactttcatgtgaaagagtgata

SEQ ID NO: 126286 - DNA, 2861 bp, Homo sapiens
  Payload ID: 4762
  Gene Symbol: DENND5A
  Gene Name: DENN/MADD domain containing 5A
  ENST ID: ENST00000526707
  CDS Start-End: 59-2482
cgggttgcgggggctcggtgccgctccgcactgcccggccggtctcggccccggcgccatgagtggcggcggcggcggagggggctcggcgcccagtcgcttcgccgactactttgtcatctgcggactggacacggagaccgggctggagccggacgagctgtcgggagaaaattttgagcagacaccattgagaagaacattcaaatctaaggtccttgcacgatatcctgagaacgtagaatggaatccctttgaccaagatgcagtaggaatgctatgtatgccgaaagggctggcattcaagacccaggctgatcccagggagccccaattccatgcctttattatcacaagggaggatggctctcggacatttgggtttgccctcacattttatgaagaggtgactagcaagcagatctgcagtgcaatgcagaccctctaccacatgcacaatgctgagtatgatgtcctacatgctccccctgctgatgacagagaccagagcagcatggaggatggtgaagacactcctgtgaccaaactgcagcgcttcaactcctatgacattagccgggacactctctacgtctctaagtgcatctgcctcatcacacccatgtctttcatgaaggcatgtcggagcgtgctggagcaactccaccaggcagtcacttcacctcagccccctccactgccccttgagagctacatatacaacgtactctacgaggtgccgctcccacctcctggccggtccttgaagttttctggggtctatgggccaataatctgccagagaccaagtaccaatgagcttcccctatttgactttcctgtcaaagaggtttttgaactgctcggggtggagaatgtgtttcagctttttacttgtgcccttctggagtttcaaatcctgctctactcacagcattaccagagactgatgactgtggcggagacgattacagctctcatgtttcctttccagtggcagcatgtctatgtccctattctcccagcttctctcctgcatttcttagatgctcctgttccatacctgatgggtttgcattccaatggcctggatgaccggtcaaagctggagctgcctcaagaggctaacctctgctttgtggacattgacaaccacttcattgagttgccagaggacttgccacagttccccaacaaattggagtttgtccaggaagtctctgagattctcatggcatttggaattccccctgaagggaatcttcattgcagtgagagtgcctccaagctgaagaggctgcgggcctctgagcttgtctcggacaagaggaatgggaacattgctggctcccctttgcattcctacgagcttcttaaggagaatgaaactattgcccggctgcaagccttggtcaagagaactggggtgagcctggaaaagttggaagtgcgtgaagaccccagcagcaataaggatctcaaagttcagtgtgatgaagaagaactcaggatttaccagctaaacattcagatccgggaagtttttgcaaatcgtttcactcagatgtttgcagattatgaggtgtttgtcatccaacccagccaggataaggaatcctggtttaccaacagggagcaaatgcaaaactttgataaagcatcttttctgtcagatcagcctgagccctacctgcccttcctctcaagattcctggagacccagatgtttgcatctttcattgacaacaaaataatgtgtcatgatgatgatgataaagaccctgtactccgggtatttgattcccgagttgacaagatcaggctgttgaatgttcggacacctactctccgtacatccatgtaccagaagtgtaccactgtggatgaagcagagaaagcaattgagctgcgtctggcaaaaattgaccatactgcaattcacccacatttacttgacatgaagattggacaagggaaatatgagccgggcttcttccctaagctgcagtctgatgtactttccactgggccagccagcaacaagtggacgaaaaggaatgcccctgcccagtggaggcggaaagatcggcagaagcagcacacagaacacctgcgtttagataatgaccagagggagaagtacatccaggaagccaggactatgggcagcactatccgccagcccaaactgtccaacctctctccatcagtgattgcccagaccaattggaagtttgtagagggcctgctgaaggaatgccgcaataagaccaagaggatgctggtggaaaagatgggccgagaagctgtggagctagggcatggggaggtgaacatcacaggggtggaagagaacaccctgattgccagcctttgtgatctcctggaaaggatctggagtcatggactacaagtgaaacaggaatacttcttgattcagaacgtaggaagtctgatgccagctcactcatgcctcccctgaggatctccctgattcaggatatgaggcacatccagaacatcggggaaatcaagactgatgtgggaaaggccagagcatgggtgcgactgtccatggaaaaaaagttactttccagacacctgaagcagctcctctcagaccatgagctcaccaaaaagttatataagcgctatgccttcctgcgctgtgatgacgagaaggagcagttcctctatcacctcctgtctttcaatgccgtcgattacttttgcttcaccaatgtcttcacaactatcctgatcccgtaccacattctgatcgtaccaagcaagaagctggggggctccatgttcactgccaacccatggatctgtatatcaggagaattgggtgagacaca

SEQ ID NO: 126287 - DNA, 3132 bp, Homo sapiens
  Payload ID: 4763
  Gene Symbol: DENND5B
  Gene Name: DENN/MADD domain containing 5B
  Uniprot ID: Q6ZUT9
  ENST ID: ENST00000354285
  CDS Start-End: 181-2397
gcttcccccgcgccgagcgaggaggcaggctgcggcggcgagaggcggctgcgcggccatgggcgcgccagtgtcgccctagggcgggcgcacagaccacagccggagcggtggtggcagcctccgcagaaagccttcccgggcggcggcggcggcggcccctggagcagcgcggccgggatgagcgggagctgcgcggcgcccggcccgggctcgggctcctccccggccgcctgccgcttcgcgcactacttcgtgctgtgcgggatcgacgcggacagcgggctggagcctgacgagctggcggttttgtaccaatggctagaagcagatcgtcatggcaagagccaaggtgctgcaaatacgacttcaggcgaaaattttgaccagagtcctttgagaagaacattcaaatccaaagttctcgcccactatcctcagaatatagaatggaacccttttgatcaagatgcggtgaacatgttgtgcatgcctaaagggctatctttcaggacacaaacggacaataaagacccccagtttcactcatttataattaccagggaagatggttctcgcacctatggttttgttctcactttttatgaagaagttacaagtaagcaaatctgcacagcaatgcagacactttaccagatgcacaacgctgagcattacagcagtgtgtatgcttcatcttcctgcagtatggactcattggcaagtagtcttgatgaaggagatacaacttcccttttgaaactccagcgatacaactcctatgatattagcagagacaccctgtatgtttcaaaaagtatatgcttgatcacaccgttaccattcatgcaggcctgcaagaaattccttatccagctttacaaggctgttacctcacagcagccaccacccttgccacttgaaagctatatccacaatattctttatgaagtaccccttccacctccagggaggtcactgaaattttatggtgtttatgaacctgtcatctgccagaggcctgggcccagtgaactccccctctctgattacccccttcgggaggcatttgagctcctgggattagagaacctggtgcaggtgtttacctgtgttcttttagagatgcaaatccttctctactcacaagattatcaacgcctgatgactgtggcagaaggcatcaccacacttttgttcccatttcaatggcaacatgtttatgtgcccattctacctgcttctctgctacattttcttgatgctcctgtcccttatctgatgggccttcagtcaaaagaaggaactgaccgttctaaactagaacttcctcaagaggctaatttgtgttttgtggacattgacaaccattttattgagttgcctgaagaatttccacagttccccaataaagtggattttatccaagaactctctgaggttcttgttcaatttgggatccctcctgagggcagcctacattgcagtgagagtaccagcaaactgaagaatatggttctgaaagacttggtcaatgacaaaaagaacggcaatgtctgtactaataacatcagcatgtatgagttactgaagggcaatgaaaccatagcccgcttgcaggctctggccaagcgtactggtgtggctgtggaaaaaatggacctctctgcttctctgggtgaaaaagacaaggatttaaaactgcattgtgaagaggcagaactaagggactaccagctcaatgtacagctccgagaggtctttgctaaccgttttacacagatgtttgcagattacgaagcatttgtcattcagactgcccaggacatggaatcctggctgaccaaccgggaacagatgcagaactttgacaaagcttcctttctgtctgaccagcctgagccttacctgccatttctttcacgcttcattgaaacacagatgtttgccacctttattgataataaaattatgtctcagtgggaagagaaagatcctttgcttcgggtctttgacactcggattgataagataaggctgtataatgtaagggcacccaccttgcggacatctatatatcagaaatgcagcactttaaaagaagcagcccaatcaattgagcagagactgatgaaaatggatcacactgcaatccacccacatctacttgatatgaaaattggtcaaggcaaatatgagcaggggttctttccaaagttacagtccgatgtcttggcaacaggaccaaccagtaacaatcgctgggtaagtcggagtgccactgcacagcgcaggaaagaacgccttcgccagcattctgagcatgttgggctggacaacgacttgagggaggtatgtggtctaccttcctggggtgcctcacagcaagcgccatgaactaggcttattccttccagcagatgtcattgtgtagattcttaatgttctttaaaaaaaaaactgtttagttatagtttaaaatattaatccttttgtacggacatatagcagaaaacacccttttttccatttttgtaatttcaagacatctataataaggctctaaaacaagtctttctgtgtattacatcaagtaaagatcaagttgaggataaatttttagttactatgtctcctataggagaaaaattgtctgcatgagaagcctagacatttctaagtttcaagcataattataaggagtagtgtgatgtacttgcctatgctttgttcttggcttgctggcaccagttttttttcttgaatctctaaatctactttatatttttgaaagtgttttaaaactatttttaaattaagatccttacacttttatttgtactctttgaaaataagaccataattatacaacaagtaagttttgatttttttctgtgtgaaatctgcatatatatatagtgtcttgctatgttgcccaggtcttgaactcctgggctcaagcagtgctcctgcctcagcctcccaaagtattgggattacaggtgtgagctgccatgcccagcctgattgtttcgtttcttatgatcaaaagagaaatgcaatcagaagacttgttaactgttttctagtatcaaatttgtaaaaataaagcagaaaacatcatcccaaaca

SEQ ID NO: 126288 - DNA, 9470 bp, Homo sapiens
  Payload ID: 4763
  Gene Symbol: DENND5B
  Gene Name: DENN/MADD domain containing 5B
  Uniprot ID: Q6ZUT9
  ENST ID: ENST00000389082
  CDS Start-End: 266-4090
gcgagggcctctcaggccgacactccccccgcgcccctcccccacccggccgggctccggacccgccgcgcgcgagcccgcggccgcttcccccgcgccgagcgaggaggcaggctgcggcggcgagaggcggctgcgcggccatgggcgcgccagtgtcgccctagggcgggcgcacagaccacagccggagcggtggtggcagcctccgcagaaagccttcccgggcggcggcggcggcggcccctggagcagcgcggccgggatgagcgggagctgcgcggcgcccggcccgggctcgggctcctccccggccgcctgccgcttcgcgcactacttcgtgctgtgcgggatcgacgcggacagcgggctggagcctgacgagctggcgggcgaaaattttgaccagagtcctttgagaagaacattcaaatccaaagttctcgcccactatcctcagaatatagaatggaacccttttgatcaagatgcggtgaacatgttgtgcatgcctaaagggctatctttcaggacacaaacggacaataaagacccccagtttcactcatttataattaccagggaagatggttctcgcacctatggttttgttctcactttttatgaagaagttacaagtaagcaaatctgcacagcaatgcagacactttaccagatgcacaacgctgagcattacagcagtgtgtatgcttcatcttcctgcagtatggactcattggcaagtagtcttgatgaaggagatacaacttcccttttgaaactccagcgatacaactcctatgatattagcagagacaccctgtatgtttcaaaaagtatatgcttgatcacaccgttaccattcatgcaggcctgcaagaaattccttatccagctttacaaggctgttacctcacagcagccaccacccttgccacttgaaagctatatccacaatattctttatgaagtaccccttccacctccagggaggtcactgaaattttatggtgtttatgaacctgtcatctgccagaggcctgggcccagtgaactccccctctctgattacccccttcgggaggcatttgagctcctgggattagagaacctggtgcaggtgtttacctgtgttcttttagagatgcaaatccttctctactcacaagattatcaacgcctgatgactgtggcagaaggcatcaccacacttttgttcccatttcaatggcaacatgtttatgtgcccattctacctgcttctctgctacattttcttgatgctcctgtcccttatctgatgggccttcagtcaaaagaaggaactgaccgttctaaactagaacttcctcaagaggctaatttgtgttttgtggacattgacaaccattttattgagttgcctgaagaatttccacagttccccaataaagtggattttatccaagaactctctgaggttcttgttcaatttgggatccctcctgagggcagcctacattgcagtgagagtaccagcaaactgaagaatatggttctgaaagacttggtcaatgacaaaaagaacggcaatgtctgtactaataacatcagcatgtatgagttactgaagggcaatgaaaccatagcccgcttgcaggctctggccaagcgtactggtgtggctgtggaaaaaatggacctctctgcttctctgggtgaaaaagacaaggatttaaaactgcattgtgaagaggcagaactaagggactaccagctcaatgtacagctccgagaggtctttgctaaccgttttacacagatgtttgcagattacgaagcatttgtcattcagactgcccaggacatggaatcctggctgaccaaccgggaacagatgcagaactttgacaaagcttcctttctgtctgaccagcctgagccttacctgccatttctttcacgcttcattgaaacacagatgtttgccacctttattgataataaaattatgtctcagtgggaagagaaagatcctttgcttcgggtctttgacactcggattgataagataaggctgtataatgtaagggcacccaccttgcggacatctatatatcagaaatgcagcactttaaaagaagcagcccaatcaattgagcagagactgatgaaaatggatcacactgcaatccacccacatctacttgatatgaaaattggtcaaggcaaatatgagcaggggttctttccaaagttacagtccgatgtcttggcaacaggaccaaccagtaacaatcgctgggtaagtcggagtgccactgcacagcgcaggaaagaacgccttcgccagcattctgagcatgttgggctggacaacgacttgagggagaaatatatgcaagaggcacgaagtttaggaaaaaacctgaggcaacccaaactgtcagacctctctcctgcagttattgcacagaccaactgtaaattcgtagaaggcttattaaaagaatgtagaatgaagacaaagcgcatgttggtggagaagatgggacatgaagcggtggaacttggccatggagaagcaaacatcaccggcctggaggagaacaccttgatcgccagcctttgtgacctgctggagaggatatggagccatggcttgcaggtcaagcaggggaagtcggctttgtggtcacatttaattcaatttcaggacagagaagagaaacaagagcaccttgcagaatcaccagttgccctcggaccagaaagaagaaaatctgactcaggagttatgttgccaacgctcagggtctctcttattcaggacatgaggcatattcaaaacatgagtgagatcaagactgatgttggacgagctcgggcgtggataagactgtctctagaaaagaagctcttgtcccagcatcttaagcagttgctttctaaccaaccactcaccaagaagctttataagcgatatgcttttctacgttgcgaagaagaaagagagcagtttctttaccaccttctttctctcaatgctgtggactatttctgcttcaccagtgtgttcaccactatcatgattccgtataggtcagtgatcatcccaatcaaaaagctgagcaatgcaataatcacatcaaacccttggatctgtgtatcaggagagctgggagacacaggagtaatgcagattcccaaaaacctcctcgaaatgacctttgagtgccagaacttggggaagctgaccactgttcagattggtcacgataactcaggactgttagccaaatggctagtggattgtgtcatggtcagaaatgaaatcacaggacatacatacagattcccatgtgggcggtggctggggaaaggcattgatgatgggagcctggagagaattcttattggagagttgatgacatcagcatcagatgaagatctagtaaagcagtgtcggactccaccccagcagaagtcacccaccacggctaggagattgagcatcacttcactgacaggaaaaaacaacaaacccaatgctgggcagatacaagaaggaattggagaagctgtgaacaatattgtgaaacattttcataaacctgaaaaagagagaggaagcctcaccgtgttgctgtgtggagaaaatggcctggttgcagcccttgagcaagttttccaccatgggttcaaatctgcccgcatctttcacaagaatgtcttcatctgggacttcatagagaaagtggttgcttattttgaaacaactgaccagattctagataatgaagatgatgtccttattcagaaatcatcctgcaaaaccttctgccactacgtaaatgctattaatactgcacccaggaacattgggaaggatggcaaattccagattttagtttgccttggaacaagggatcgcctgctcccacagtggattccattgttagctgagtgtcctgccatcactcgaatgtatgaagagagcgctctcctgcgagaccgcatgactgtcaactcccttatccgaattctgcagaccattcaggacttcaccatagtcctagaaggatcactcatcaaaggagtggatgtgtaacccaactggctagaaactctcagtccaaaccttgctccttccccaactaggggaccgatttggacttgtctgacagtagtgagtcactgcaggggcagccaaacatatgccccatttggaacaatcctcactctacagacaaggcaaaatgttgtattgtagttcatttgaacctggaatttagtataaaatagagtattttcatgtgttagatgtgtgtaaatatgctatcttctttaagaaattatattactctaataagatgcttttcttagattgaatattcctgtgacttaaaataagtagcttaaaaatgttgggggttggggggaagagtggtgctagccaggaagaagccagtaaacatgtaaatatagtgcaacccagtcgggcttttttttttctccaggtatcacaaagaaacccagaatgcattgttatgtagtagccatccatcttggagtctgatcctttgtattgtggatgcacacagctttacctactgtactggtagtcttcacttctatcttttaagttacaaactgttttatatatttgaatcgctagtcacttttccagtcttttggaaaaaaatttcagtccgcacaagatgatataattggagtattttaaacactagaccccaggagcttggctgaactggaaagagaacatacaaagctctgagaaatgtgttcaattgtgggattataacttctttacacttcggaaagattagcctagactaacttcattcttggcatttttattcttgttatttgaggtactttgggaagatgtgaatttcagtgttagattcatagtgataagaactgcaaacagcaatttgattctgtacttttaatttggccatctaaactgtgcagtggtctacctcttaaggataaccatgagccctgtctttgttagggtctaatcacccacctctccagggcccatcccccctcgggaaatggaaggaatgtctaaggaggaggagggctgtgtgtggcttggaatgtttttgtgaaagcatttgttgaccatgataatgcaaataacagaaggagagagagaatgaaccctttctgggtgtttcagggcaagctttacgttcctttgtaggaaggggagtaataatgtaaaacaactgacccagagaagctaaaagccactggcagcacaggctgacaaaatggaagcaaagcaagaggtggcaacaattttgaaagaccaaaagttgtgagtaactttccagtttgatagtttataaagaagttaagtaaatgtagtattggctagttactgtaagtcctcatcttctggtaggtcctgtaactctaattaggcatttgtacatttttagcagcaaaattgcctcagcagagctcccagttttattcccagttgtggctgaaaagcaaagccatggcatcagtatccttgtgcaatcggaggttgctgggctttcaccacctgtgttgttaaccttatttcctggaggaagaaacagatgaaacaagtgcctaactccctttatcaaacacagccaaggacagcctcttttaacatgtgacttcatacttgaggaaaaggagagttgacagctgtatttaaaaacccatggagccgggtgcggtggctcacgcctatgatcccagcactttgggaggccgaggcaggcggatcacaaggtcaggagattgagaccctcctggctaacaccgtgaaaccccgtctctactaaaaatacaaaaaattagccgggcgtggtggcgggtgcctgtacaggaggctgaggcaggagaatggcgtgaacccgcgaggcggagcttgcagtaagctgagatcgcgccactgccctccagcctgggcaacagagcaagactccatctcaaaaaataaatagataaaaataaaaacccatggaaatggtttaagaaaatggttctgggtacaccagaaatttgtttgcctgaagctaaagtgtgtctacaatggtacagctcttccagggacatgggaagtttatcgtgggagatatccagaacctgttttacactgggctcctactgtgtttggtgatcagaaactatagaggggtccaacccaggatttcatgtttgtatcttcataaggccatgctcctgacaggtctaggcaacctgggggatgacttaggttaatgtgctaggattgacacacctcatccagccttcttactttgtggatgggaacacttaaggaatagagagattaaatcttacacttaccccacagctggttactgacaacacaagctctagaattcatgtttgtttgtttgttttatttcaccaggctgcatgagactgaccttccggcattcttactaatagtctttctattatactattggatctttattcatccacctatacaagtaggaaataaggatgaatattcatttagaagaattaatattcatattaacacattgctctcagattattgggaattaacatcttgtaaaaactgggagcaggccaggtacggtggctaacgcctgtaatcctgacactttgggagtctgaggcgggtggttcatctgaggtcagtcgggagttcaagaccagactggccaacatggtgaaaccccgtctctactaaaaaaaaaaaatagacaaaaattagcgggggggtggtggcagggcctgtaattccagctactcaggaggctgaagcaggagaatcgtttaaacacaggaggtggaggttgcagtgagccgagattgtgccactgcactccaacctgggtgacaagagcgagactccgtctcaaaaaaaaaaaaagaaaaaaactgcagccaaagttggatttgcggcctatgaataaaaccattactttaaaaagtaatacccccaaaaaagttacacctgaagtttcatcttcatgcctttgtgtaatattactataatggtgaaatgatgatttaaaaaaaacacatcagaactgacacatcctcttggatgatgggtccttcagtcaccttgtgagcccatgtacttattccgttgatacagcctgtgctataaacatgtggggccctccttgtgtgagctgcttgaatggccagtacccccattcttttgaatattcccaatggcagtcaatcttggcctttaagaataaatttaaatatttggaaatagtccttaggatccaagtttgatcaatgaaaaggatgcttaagctgagtttggggtcacataagaagtgcagttataaagaaataagacatgttgggcatggcagtacacacctgtagtcccagctgcttgggaagccaaggcaggaggatcacttcaacccaggagtttgagtccagcctgggtaacatagggaaaccccatctcaaaaaaacaaaacaaaggacttagtttttatgtggctcataagtgtctctaagttataccaaaagtttgagcacaacagtagtagcagaatgcttagaataaatgcttgacttttaagctgacttttggaaggaccatacccacatagaggcatcttttctgctgtggtaattttttaaattaatacattgctttaggattacatctcaaagtaaataaaaaaatcaatatttaatttgtttttttcctgcaaataaattaaatgctgggaccataatgattatttttgcatagtaatagctggtgaagaagttgttttaaaattaaattgccaaaagtattacctcttgaaaaatttattttcccaaagtttttcatatgtcatgaaacccctaatcttgacctttatgacacagtggcattacactgatgttggaagcatgtgtgagatctgtgccctggtcgggagtcatatgccttaaaaatgactgcgagtcagtgtgaagtagtataaagtggagtcctacgtgggaaaaagcaggctactgaggacaaaaacctcccaaccctccccaccttgttttccactgggaatgagaatttgatatgagaaacttcaaccttgcagaagtgtggatttccctctgaaatttaaatgtttcacacatttttgtaccttttgtaaccttgtggtatttactttcacatggctttttaaaaaattattttaatgaacttctatcacactatatgaatgatatgggggaaatactgaactgctcatatttccttttttggcaataaagcactgttatatgtaaatgtaagtgaaaaagaggttcaagactatacaacagcttatgtgtagtatatgttgacatccctaaggtattttgaaacatgaggtgacagacaaggacctcaaatttccagggaaatatttatttcacaacattaggagtgtagctcttcataatgaaatatcttctttctgctaaagattacaatttttcatttagggaactgtgaatattttctgtgaggtttacagaaactagtgtatccttttcactatgttgaaaagacaatctgaactttagctatttatatttcagtattaacacaccttcactgattgagagtcttgagcccttctctacttttataaagtgaatcctatttccaagtcatccatgtcttttgaagtctgtttcttatataagtatttattactttactgtttagcataaataggagacagaaaaggataataaactactaggtcctttattcctattaaaataaatttataaatcccttgaatcaactgaattctaagctttttgaagaggttgctgatgtagtgtgatcaaaagaatctaaggagaacctcctctccaaaatctgattggagctgttcaccctctcaaggacaagataaagattgacttcagagatatatcacatcaagctagaggaaaaaaaaaaaacctcaaataaaatttttcctcattcgaagggatccagggtatccttgggttatgtaggagggaatcatatttgttctaatttacctgaatgtacttgtgtgtgaatccaatcttgattctaaacaccaaatcttgtcaacagtagagaagtatagtaaggagttcctgttgtcaatcaaatgagggtgtgaaacatttagaatgctctgtgttacacttgaaccatgtataaatgtaacctgtgtatcttttttttaattagcttttctgaatttaaattatattgtttttctttgtattgttagcaaaatgcatcagaactggattttttttctcatctgaacataatataaaatttgaaagagtattgtgatattaagcactttaacatacatatcagacaaactgacgtgggtttttcaggtttgggagtacatttaaatatgacttttcatgctttgttctttacaaataaaactgtgggattgatactt

SEQ ID NO: 126289 - DNA, 1723 bp, Homo sapiens
  Payload ID: 4763
  Gene Symbol: DENND5B
  Gene Name: DENN/MADD domain containing 5B
  ENST ID: ENST00000546299
  CDS Start-End: 1-1614
agtcctttgagaagaacattcaaatccaaagttctcgcccactatcctcagaatatagaatggaacccttttgatcaagatgcggtgaacatgttgtgcatgcctaaagggctatctttcaggacacaaacggacaataaagacccccagtttcactcatttataattaccagggaagatggttctcgcacctatggttttgttctcactttttatgaagaagttacaagtaagcaaatctgcacagcaatgcagacactttaccagatgcacaacgctgagcattacagcagtgtgtatgcttcatcttcctgcagtatggactcattggcaagtagtcttgatgaaggagatacaacttcccttttgaaactccagcgatacaactcctatgatattagcagagacaccctgtatgtttcaaaaagtatatgcttgatcacaccgttaccattcatgcaggcctgcaagaaattccttatccagctttacaaggctgttacctcacagcagccaccacccttgccacttgaaagctatatccacaatattctttatgaagtaccccttccacctccagggaggtcactgaaattttatggtgtttatgaacctgtcatctgccagaggcctgggcccagtgaactccccctctctgattacccccttcgggaggcatttgagctcctgggattagagaacctggtgcaggtgtttacctgtgttcttttagagatgcaaatccttctctactcacaagattatcaacgcctgatgactgtggcagaaggcatcaccacacttttgttcccatttcaatggcaacatgtttatgtgcccattctacctgcttctctgctacattttcttgatgctcctgtcccttatctgatgggccttcagtcaaaagaaggaactgaccgttctaaactagaacttcctcaagaggctaatttgtgttttgtggacattgacaaccattttattgagttgcctgaagaatttccacagttccccaataaagtggattttatccaagaactctctgaggttcttgttcaatttgggatccctcctgagggcagcctacattgcagtgagagtaccagcaaactgaagaatatggttctgaaagacttggtcaatgacaaaaagaacggcaatgtctgtactaataacatcagcatgtatgagttactgaagggcaatgaaaccatagcccgcttgcaggctctggccaagcgtactggtgtggctgtggaaaaaatggacctctctgcttctctgggtgaaaaagacaaggatttaaaactgcattgtgaagaggcagaactaagggactaccagctcaatgtacagctccgagaggtctttgctaaccgttttacacagatgtttgcagattacgaagcatttgtcattcagactgcccaggacatggaatcctggctgaccaaccgggaacagatgcagaactttgacaaagtaaaaagaaccatagttttccttttgtggttattagtggctttattattgattttaacatttttaaattttttattcttctgtgcctatgcttacccatatattattgattttgttaaccttttttaaatgcagactttttgtcttccagccccattaagaacttttctttaccaagtatttttacattagataaaataattttacaagcaaataaaccagctcattgaactggtca

SEQ ID NO: 126290 - DNA, 4291 bp, Homo sapiens
  Payload ID: 4763
  Gene Symbol: DENND5B
  Gene Name: DENN/MADD domain containing 5B
  ENST ID: ENST00000536562
  CDS Start-End: 152-4081
acggaccccgcctggcgcgccggccccttcgcttgcagccgcactcggaggcggccggctgaagtgcagtggcatgatctcagatcactacaacctccacctcttgggttccagtaattctcctgcctggccttcctgagtaactgggattatgggcacccaccaccatgcccagctaatttttgtatttttagtagagatgaggtttcaccatgttgatcaggctggtctcgaactcctgacctcaagcaattcacctgcctcggcctcccgaagtgctgagattacagttgtgagccaacatgcccagccaggatttttgtaccaatggctagaagcagatcgtcatggcaagagccaaggtgctgcaaatacgacttcaggcgaaaattttgaccagagtcctttgagaagaacattcaaatccaaagttctcgcccactatcctcagaatatagaatggaacccttttgatcaagatgcggtgaacatgttgtgcatgcctaaagggctatctttcaggacacaaacggacaataaagacccccagtttcactcatttataattaccagggaagatggttctcgcacctatggttttgttctcactttttatgaagaagttacaagtaagcaaatctgcacagcaatgcagacactttaccagatgcacaacgctgagcattacagcagtgtgtatgcttcatcttcctgcagtatggactcattggcaagtagtcttgatgaaggagatacaacttcccttttgaaactccagcgatacaactcctatgatattagcagagacaccctgtatgtttcaaaaagtatatgcttgatcacaccgttaccattcatgcaggcctgcaagaaattccttatccagctttacaaggctgttacctcacagcagccaccacccttgccacttgaaagctatatccacaatattctttatgaagtaccccttccacctccagggaggtcactgaaattttatggtgtttatgaacctgtcatctgccagaggcctgggcccagtgaactccccctctctgattacccccttcgggaggcatttgagctcctgggattagagaacctggtgcaggtgtttacctgtgttcttttagagatgcaaatccttctctactcacaagattatcaacgcctgatgactgtggcagaaggcatcaccacacttttgttcccatttcaatggcaacatgtttatgtgcccattctacctgcttctctgctacattttcttgatgctcctgtcccttatctgatgggccttcagtcaaaagaaggaactgaccgttctaaactagaacttcctcaagaggctaatttgtgttttgtggacattgacaaccattttattgagttgcctgaagaatttccacagttccccaataaagtggattttatccaagaactctctgaggttcttgttcaatttgggatccctcctgagggcagcctacattgcagtgagagtaccagcaaactgaagaatatggttctgaaagacttggtcaatgacaaaaagaacggcaatgtctgtactaataacatcagcatgtatgagttactgaagggcaatgaaaccatagcccgcttgcaggctctggccaagcgtactggtgtggctgtggaaaaaatggacctctctgcttctctgggtgaaaaagacaaggatttaaaactgcattgtgaagaggcagaactaagggactaccagctcaatgtacagctccgagaggtctttgctaaccgttttacacagatgtttgcagattacgaagcatttgtcattcagactgcccaggacatggaatcctggctgaccaaccgggaacagatgcagaactttgacaaagcttcctttctgtctgaccagcctgagccttacctgccatttctttcacgcttcattgaaacacagatgtttgccacctttattgataataaaattatgtctcagtgggaagagaaagatcctttgcttcgggtctttgacactcggattgataagataaggctgtataatgtaagggcacccaccttgcggacatctatatatcagaaatgcagcactttaaaagaagcagcccaatcaattgagcagagactgatgaaaatggatcacactgcaatccacccacatctacttgatatgaaaattggtcaaggcaaatatgagcaggggttctttccaaagttacagtccgatgtcttggcaacaggaccaaccagtaacaatcgctgggtaagtcggagtgccactgcacagcgcaggaaagaacgccttcgccagcattctgagcatgttgggctggacaacgacttgagggagaaatatatgcaagaggcacgaagtttaggaaaaaacctgaggcaacccaaactgtcagacctctctcctgcagttattgcacagaccaactgtaaattcgtagaaggcttattaaaagaatgtagaatgaagacaaagcgcatgttggtggagaagatgggacatgaagcggtggaacttggccatggagaagcaaacatcaccggcctggaggagaacaccttgatcgccagcctttgtgacctgctggagaggatatggagccatggcttgcaggtcaagcaggggaagtcggctttgtggtcacatttaattcaatttcaggacagagaagagaaacaagagcaccttgcagaatcaccagttgccctcggaccagaaagaagaaaatctgactcaggagttatgttgccaacgctcagggtctctcttattcaggacatgaggcatattcaaaacatgagtgagatcaagactgatgttggacgagctcgggcgtggataagactgtctctagaaaagaagctcttgtcccagcatcttaagcagttgctttctaaccaaccactcaccaagaagctttataagcgatatgcttttctacgttgcgaagaagaaagagagcagtttctttaccaccttctttctctcaatgctgtggactatttctgcttcaccagtgtgttcaccactatcatgattccgtataggtcagtgatcatcccaatcaaaaagctgagcaatgcaataatcacatcaaacccttggatctgtgtatcaggagagctgggagacacaggagtaatgcagattcccaaaaacctcctcgaaatgacctttgagtgccagaacttggggaagctgaccactgttcagattggtcacgataactcaggactgttagccaaatggctagtggattgtgtcatggtcagaaatgaaatcacaggacatacatacagattcccatgtgggcggtggctggggaaaggcattgatgatgggagcctggagagaattcttattggagagttgatgacatcagcatcagatgaagatctagtaaagcagtgtcggactccaccccagcagaagtcacccaccacggctaggagattgagcatcacttcactgacaggaaaaaacaacaaacccaatgctgggcagatacaagaaggaattggagaagctgtgaacaatattgtgaaacattttcataaacctgaaaaagagagaggaagcctcaccgtgttgctgtgtggagaaaatggcctggttgcagcccttgagcaagttttccaccatgggttcaaatctgcccgcatctttcacaagaatgtcttcatctgggacttcatagagaaagtggttgcttattttgaaacaactgaccagattctagataatgaagatgatgtccttattcagaaatcatcctgcaaaaccttctgccactacgtaaatgctattaatactgcacccaggaacattgggaaggatggcaaattccagattttagtttgccttggaacaagggatcgcctgctcccacagtggattccattgttagctgagtgtcctgccatcactcgaatgtatgaagagagcgctctcctgcgagaccgcatgactgtcaactcccttatccgaattctgcagaccattcaggacttcaccatagtcctagaaggatcactcatcaaaggagtggatgtgtaacccaactggctagaaactctcagtccaaaccttgctccttccccaactaggggaccgatttggacttgtctgacagtagtgagtcactgcaggggcagccaaacatatgccccatttggaacaatcctcactctacagacaaggcaaaatgttgtattgtagttcatttgaacctggaatttagtataaaatagagtattttcatgtgtt

SEQ ID NO: 126291 - DNA, 643 bp, Homo sapiens
  Payload ID: 4763
  Gene Symbol: DENND5B
  Gene Name: DENN/MADD domain containing 5B
  ENST ID: ENST00000544698
  CDS Start-End: 168-359
cgagcgaggaggcaggctgcggcggcgagaggcggctgcgcggccatgggcgcgccagtgtcgccctagggcgggcgcacagaccacagccggagcggtggtggcagcctccgcagaaagccttcccgggcggcggcggcggcggcccctggagcagcgcggccgggatgagcgggagctgcgcggcgcccggcccgggctcgggctcctccccggccgcctgccgcttcgcgcactacttcgtgctgtgcgggatcgacgcggacagcgggctggagcctgacgagctggcggagatacggggtcaaccttcattcttctgcgtaaagatatccagttttcccagcaccattgactgaagagactgtcctttctccattgtatgttctcggcacctttgtctaaagcgaaaattttgaccagagtcctttgagaagaacattcaaatccaaagttctcgcccactatcctcagaatatagaatggaacccttttgatcaagatgcggtgaacatgttgtgcatgcctaaagggctatctttcaggacacaaacggacaataaagacccccagtttcactcatttataattaccagggaagatggttctcgcacctatggttttgttctcactttttatgaag

SEQ ID NO: 126292 - DNA, 9310 bp, Homo sapiens
  Payload ID: 4763
  Gene Symbol: DENND5B
  Gene Name: DENN/MADD domain containing 5B
  ENST ID: ENST00000628277
  CDS Start-End: 1-3930
atgggcacccaccaccatgcccagctaatttttgtatttttagtagagatgaggtttcaccatgttgatcaggctggtctcgaactcctgacctcaagcaattcacctgcctcggcctcccgaagtgctgagattacagttgtgagccaacatgcccagccaggatttttgtaccaatggctagaagcagatcgtcatggcaagagccaaggtgctgcaaatacgacttcaggcgaaaattttgaccagagtcctttgagaagaacattcaaatccaaagttctcgcccactatcctcagaatatagaatggaacccttttgatcaagatgcggtgaacatgttgtgcatgcctaaagggctatctttcaggacacaaacggacaataaagacccccagtttcactcatttataattaccagggaagatggttctcgcacctatggttttgttctcactttttatgaagaagttacaagtaagcaaatctgcacagcaatgcagacactttaccagatgcacaacgctgagcattacagcagtgtgtatgcttcatcttcctgcagtatggactcattggcaagtagtcttgatgaaggagatacaacttcccttttgaaactccagcgatacaactcctatgatattagcagagacaccctgtatgtttcaaaaagtatatgcttgatcacaccgttaccattcatgcaggcctgcaagaaattccttatccagctttacaaggctgttacctcacagcagccaccacccttgccacttgaaagctatatccacaatattctttatgaagtaccccttccacctccagggaggtcactgaaattttatggtgtttatgaacctgtcatctgccagaggcctgggcccagtgaactccccctctctgattacccccttcgggaggcatttgagctcctgggattagagaacctggtgcaggtgtttacctgtgttcttttagagatgcaaatccttctctactcacaagattatcaacgcctgatgactgtggcagaaggcatcaccacacttttgttcccatttcaatggcaacatgtttatgtgcccattctacctgcttctctgctacattttcttgatgctcctgtcccttatctgatgggccttcagtcaaaagaaggaactgaccgttctaaactagaacttcctcaagaggctaatttgtgttttgtggacattgacaaccattttattgagttgcctgaagaatttccacagttccccaataaagtggattttatccaagaactctctgaggttcttgttcaatttgggatccctcctgagggcagcctacattgcagtgagagtaccagcaaactgaagaatatggttctgaaagacttggtcaatgacaaaaagaacggcaatgtctgtactaataacatcagcatgtatgagttactgaagggcaatgaaaccatagcccgcttgcaggctctggccaagcgtactggtgtggctgtggaaaaaatggacctctctgcttctctgggtgaaaaagacaaggatttaaaactgcattgtgaagaggcagaactaagggactaccagctcaatgtacagctccgagaggtctttgctaaccgttttacacagatgtttgcagattacgaagcatttgtcattcagactgcccaggacatggaatcctggctgaccaaccgggaacagatgcagaactttgacaaagcttcctttctgtctgaccagcctgagccttacctgccatttctttcacgcttcattgaaacacagatgtttgccacctttattgataataaaattatgtctcagtgggaagagaaagatcctttgcttcgggtctttgacactcggattgataagataaggctgtataatgtaagggcacccaccttgcggacatctatatatcagaaatgcagcactttaaaagaagcagcccaatcaattgagcagagactgatgaaaatggatcacactgcaatccacccacatctacttgatatgaaaattggtcaaggcaaatatgagcaggggttctttccaaagttacagtccgatgtcttggcaacaggaccaaccagtaacaatcgctgggtaagtcggagtgccactgcacagcgcaggaaagaacgccttcgccagcattctgagcatgttgggctggacaacgacttgagggagaaatatatgcaagaggcacgaagtttaggaaaaaacctgaggcaacccaaactgtcagacctctctcctgcagttattgcacagaccaactgtaaattcgtagaaggcttattaaaagaatgtagaatgaagacaaagcgcatgttggtggagaagatgggacatgaagcggtggaacttggccatggagaagcaaacatcaccggcctggaggagaacaccttgatcgccagcctttgtgacctgctggagaggatatggagccatggcttgcaggtcaagcaggggaagtcggctttgtggtcacatttaattcaatttcaggacagagaagagaaacaagagcaccttgcagaatcaccagttgccctcggaccagaaagaagaaaatctgactcaggagttatgttgccaacgctcagggtctctcttattcaggacatgaggcatattcaaaacatgagtgagatcaagactgatgttggacgagctcgggcgtggataagactgtctctagaaaagaagctcttgtcccagcatcttaagcagttgctttctaaccaaccactcaccaagaagctttataagcgatatgcttttctacgttgcgaagaagaaagagagcagtttctttaccaccttctttctctcaatgctgtggactatttctgcttcaccagtgtgttcaccactatcatgattccgtataggtcagtgatcatcccaatcaaaaagctgagcaatgcaataatcacatcaaacccttggatctgtgtatcaggagagctgggagacacaggagtaatgcagattcccaaaaacctcctcgaaatgacctttgagtgccagaacttggggaagctgaccactgttcagattggtcacgataactcaggactgttagccaaatggctagtggattgtgtcatggtcagaaatgaaatcacaggacatacatacagattcccatgtgggcggtggctggggaaaggcattgatgatgggagcctggagagaattcttattggagagttgatgacatcagcatcagatgaagatctagtaaagcagtgtcggactccaccccagcagaagtcacccaccacggctaggagattgagcatcacttcactgacaggaaaaaacaacaaacccaatgctgggcagatacaagaaggaattggagaagctgtgaacaatattgtgaaacattttcataaacctgaaaaagagagaggaagcctcaccgtgttgctgtgtggagaaaatggcctggttgcagcccttgagcaagttttccaccatgggttcaaatctgcccgcatctttcacaagaatgtcttcatctgggacttcatagagaaagtggttgcttattttgaaacaactgaccagattctagataatgaagatgatgtccttattcagaaatcatcctgcaaaaccttctgccactacgtaaatgctattaatactgcacccaggaacattgggaaggatggcaaattccagattttagtttgccttggaacaagggatcgcctgctcccacagtggattccattgttagctgagtgtcctgccatcactcgaatgtatgaagagagcgctctcctgcgagaccgcatgactgtcaactcccttatccgaattctgcagaccattcaggacttcaccatagtcctagaaggatcactcatcaaaggagtggatgtgtaacccaactggctagaaactctcagtccaaaccttgctccttccccaactaggggaccgatttggacttgtctgacagtagtgagtcactgcaggggcagccaaacatatgccccatttggaacaatcctcactctacagacaaggcaaaatgttgtattgtagttcatttgaacctggaatttagtataaaatagagtattttcatgtgttagatgtgtgtaaatatgctatcttctttaagaaattatattactctaataagatgcttttcttagattgaatattcctgtgacttaaaataagtagcttaaaaatgttgggggttggggggaagagtggtgctagccaggaagaagccagtaaacatgtaaatatagtgcaacccagtcgggcttttttttttctccaggtatcacaaagaaacccagaatgcattgttatgtagtagccatccatcttggagtctgatcctttgtattgtggatgcacacagctttacctactgtactggtagtcttcacttctatcttttaagttacaaactgttttatatatttgaatcgctagtcacttttccagtcttttggaaaaaaatttcagtccgcacaagatgatataattggagtattttaaacactagaccccaggagcttggctgaactggaaagagaacatacaaagctctgagaaatgtgttcaattgtgggattataacttctttacacttcggaaagattagcctagactaacttcattcttggcatttttattcttgttatttgaggtactttgggaagatgtgaatttcagtgttagattcatagtgataagaactgcaaacagcaatttgattctgtacttttaatttggccatctaaactgtgcagtggtctacctcttaaggataaccatgagccctgtctttgttagggtctaatcacccacctctccagggcccatcccccctcgggaaatggaaggaatgtctaaggaggaggagggctgtgtgtggcttggaatgtttttgtgaaagcatttgttgaccatgataatgcaaataacagaaggagagagagaatgaaccctttctgggtgtttcagggcaagctttacgttcctttgtaggaaggggagtaataatgtaaaacaactgacccagagaagctaaaagccactggcagcacaggctgacaaaatggaagcaaagcaagaggtggcaacaattttgaaagaccaaaagttgtgagtaactttccagtttgatagtttataaagaagttaagtaaatgtagtattggctagttactgtaagtcctcatcttctggtaggtcctgtaactctaattaggcatttgtacatttttagcagcaaaattgcctcagcagagctcccagttttattcccagttgtggctgaaaagcaaagccatggcatcagtatccttgtgcaatcggaggttgctgggctttcaccacctgtgttgttaaccttatttcctggaggaagaaacagatgaaacaagtgcctaactccctttatcaaacacagccaaggacagcctcttttaacatgtgacttcatacttgaggaaaaggagagttgacagctgtatttaaaaacccatggagccgggtgcggtggctcacgcctatgatcccagcactttgggaggccgaggcaggcggatcacaaggtcaggagattgagaccctcctggctaacaccgtgaaaccccgtctctactaaaaatacaaaaaattagccgggcgtggtggcgggtgcctgtacaggaggctgaggcaggagaatggcgtgaacccgcgaggcggagcttgcagtaagctgagatcgcgccactgccctccagcctgggcaacagagcaagactccatctcaaaaaataaatagataaaaataaaaacccatggaaatggtttaagaaaatggttctgggtacaccagaaatttgtttgcctgaagctaaagtgtgtctacaatggtacagctcttccagggacatgggaagtttatcgtgggagatatccagaacctgttttacactgggctcctactgtgtttggtgatcagaaactatagaggggtccaacccaggatttcatgtttgtatcttcataaggccatgctcctgacaggtctaggcaacctgggggatgacttaggttaatgtgctaggattgacacacctcatccagccttcttactttgtggatgggaacacttaaggaatagagagattaaatcttacacttaccccacagctggttactgacaacacaagctctagaattcatgtttgtttgtttgttttatttcaccaggctgcatgagactgaccttccggcattcttactaatagtctttctattatactattggatctttattcatccacctatacaagtaggaaataaggatgaatattcatttagaagaattaatattcatattaacacattgctctcagattattgggaattaacatcttgtaaaaactgggagcaggccaggtacggtggctaacgcctgtaatcctgacactttgggagtctgaggcgggtggttcatctgaggtcagtcgggagttcaagaccagactggccaacatggtgaaaccccgtctctactaaaaaaaaaaaatagacaaaaattagcgggggggtggtggcagggcctgtaattccagctactcaggaggctgaagcaggagaatcgtttaaacacaggaggtggaggttgcagtgagccgagattgtgccactgcactccaacctgggtgacaagagcgagactccgtctcaaaaaaaaaaaaagaaaaaaactgcagccaaagttggatttgcggcctatgaataaaaccattactttaaaaagtaatacccccaaaaaagttacacctgaagtttcatcttcatgcctttgtgtaatattactataatggtgaaatgatgatttaaaaaaaacacatcagaactgacacatcctcttggatgatgggtccttcagtcaccttgtgagcccatgtacttattccgttgatacagcctgtgctataaacatgtggggccctccttgtgtgagctgcttgaatggccagtacccccattcttttgaatattcccaatggcagtcaatcttggcctttaagaataaatttaaatatttggaaatagtccttaggatccaagtttgatcaatgaaaaggatgcttaagctgagtttggggtcacataagaagtgcagttataaagaaataagacatgttgggcatggcagtacacacctgtagtcccagctgcttgggaagccaaggcaggaggatcacttcaacccaggagtttgagtccagcctgggtaacatagggaaaccccatctcaaaaaaacaaaacaaaggacttagtttttatgtggctcataagtgtctctaagttataccaaaagtttgagcacaacagtagtagcagaatgcttagaataaatgcttgacttttaagctgacttttggaaggaccatacccacatagaggcatcttttctgctgtggtaattttttaaattaatacattgctttaggattacatctcaaagtaaataaaaaaatcaatatttaatttgtttttttcctgcaaataaattaaatgctgggaccataatgattatttttgcatagtaatagctggtgaagaagttgttttaaaattaaattgccaaaagtattacctcttgaaaaatttattttcccaaagtttttcatatgtcatgaaacccctaatcttgacctttatgacacagtggcattacactgatgttggaagcatgtgtgagatctgtgccctggtcgggagtcatatgccttaaaaatgactgcgagtcagtgtgaagtagtataaagtggagtcctacgtgggaaaaagcaggctactgaggacaaaaacctcccaaccctccccaccttgttttccactgggaatgagaatttgatatgagaaacttcaaccttgcagaagtgtggatttccctctgaaatttaaatgtttcacacatttttgtaccttttgtaaccttgtggtatttactttcacatggctttttaaaaaattattttaatgaacttctatcacactatatgaatgatatgggggaaatactgaactgctcatatttccttttttggcaataaagcactgttatatgtaaatgtaagtgaaaaagaggttcaagactatacaacagcttatgtgtagtatatgttgacatccctaaggtattttgaaacatgaggtgacagacaaggacctcaaatttccagggaaatatttatttcacaacattaggagtgtagctcttcataatgaaatatcttctttctgctaaagattacaatttttcatttagggaactgtgaatattttctgtgaggtttacagaaactagtgtatccttttcactatgttgaaaagacaatctgaactttagctatttatatttcagtattaacacaccttcactgattgagagtcttgagcccttctctacttttataaagtgaatcctatttccaagtcatccatgtcttttgaagtctgtttcttatataagtatttattactttactgtttagcataaataggagacagaaaaggataataaactactaggtcctttattcctattaaaataaatttataaatcccttgaatcaactgaattctaagctttttgaagaggttgctgatgtagtgtgatcaaaagaatctaaggagaacctcctctccaaaatctgattggagctgttcaccctctcaaggacaagataaagattgacttcagagatatatcacatcaagctagaggaaaaaaaaaaaacctcaaataaaatttttcctcattcgaagggatccagggtatccttgggttatgtaggagggaatcatatttgttctaatttacctgaatgtacttgtgtgtgaatccaatcttgattctaaacaccaaatcttgtcaacagtagagaagtatagtaaggagttcctgttgtcaatcaaatgagggtgtgaaacatttagaatgctctgtgttacacttgaaccatgtataaatgtaacctgtgtatcttttttttaattagcttttctgaatttaaattatattgtttttctttgtattgttagcaaaatgcatcagaactggattttttttctcatctgaacataatataaaatttgaaagagtattgtgatattaagcactttaacatacatatcagacaaactgacgtgggtttttcaggtttgggagtacatttaaatatgacttttcatgctttgttctttacaaataaaactgtgggattgatactt

SEQ ID NO: 126293 - DNA, 4655 bp, Homo sapiens
  Payload ID: 4764
  Gene Symbol: DENND6A
  Gene Name: DENN/MADD domain containing 6A
  Uniprot ID: Q8IWF6
  ENST ID: ENST00000311128
  CDS Start-End: 72-1898
ctgcgcggaggcaagcgcgctctgcggcgcggtccgctgtggaggcggcgcgaacggtcagggggcggccgatggctttgaggggccctgcgggcttggggcccggctctcgaaggccgttggacgaagcggtggcaggggccgagggccgcgaggcgccggcccttgtggcggcgggaggcgcgccagaggacgatgaagaggacgatggccgtggccggggcctgctgcgctgggacagcttctccgcctggctgcactgcgtgtgtgtggtgggcttcgacctggagctgggccaggccgtggaggtaatttatcctcagcattccaaacttactgacagagaaaaaaccaatatttgctatttgtcttttccagattcaaattcaggttgtcttggagatacccagttttgttttagatttcgacagtcttctgggaggagggtgtcgctgcattgtctcctggatcaatttgacaaagatttaccagtttacttaaagaaggatcctgcttatttttatggatatgtgtatttccgacaagttcgagataaaactctaaaaagaggctactttcagaagtccttggttttgatcagcaaactaccttatattcatttttttcacactgtgctcaaacagatagcaccagagtattttgaaaagaatgaaccttatttggaagcagcttgtaatgatgttgatcgatggcctgccccagtgccagggaaaacattacacctgccaatcatgggggtggtaatgaaggtacggattcccacatgtcatgacaagcctgggacaactcaaatagtgcagttaactcagcaggtggacacaaatatatctgttattttacctactgttcatgaggtggatattttcaggtgtttctgcccagttttccttcatagtcagatgctctgggagctggtgctgttgggggagccccttgtggttatggcgccatcaccatcggaatcatcagagactgtattggcacttgttaactgtatttctccattaaagtacttcagtgatttccgaccttatttcactattcatgatagtgaattcaaagaatatactacccgtacccaagctccgccctcagttatattaggagtaaccaaccctttttttgctaagacactccagcactggccacacattattcgaataggagaccttaaacctacaggtgaaattcctaagcaggttaaagtgaaaaaactgaagaatctaaagactctggattccaaacctggagtttatacttcatataagccatatttaaatagagatgaagagatcataaaacaattacagaagggtgtacaacagaaacgtccttctgaggctcaaagtgttattcttcgacgctattttttggaactgacacaaagtttcatcattccattagaaagatatgtggcaagcttgatgcctttgcagaaaagtatttccccatggaagagtccacctcaattaagacagtttcttccagaagaatttatgaaaacacttgagaaaacaggacctcagctaacctctagaataaaaggcgattggattggactttaccggcatttcctaaagtctccaaattttgatggctggtttaagacccggaggaaggaaatgacccaaaaattggaggcactccatctagaagctctttgtgaagaggacttacttctctggatccagaaacacacagaagtagaaacagtagaccttgtcttgaagctgaaaaataagctgttgcaggctgatcgagagcacttacctgtgaaacctgacactatggaaaagttacggacacacatagatgccattatcttagcattgccagaggacttgcaaggcatactgctcaaaacgggcatgacatgatatttgccaagattttccagccaaaaaggattatgcatcatgaagcatactgacatttcaaccagacgcacaaaggagatctctcagtggcagcggagtggaaaattgccatgaatgctagttacagggtagaaagactgtattgtataaacagacctttttagtgcattactttttaaagtggatatctgtggtggttccactttaatactgaaacaccgaaaggcatttctatatttttaatcatgttctaaagtgctcttatgagagacttgtgggccatcagtattagtgatttcatactgcagtgctggcattgcagatatttttttaaattggtgctgctttgcccaatcatgttaaaactcagggggatataaaaataacattcacactggctatcttcttaagaacagaaagactgaactgtcctatggttagaaggaattgatgcttatgtagtgccttctgttgtcctacatgtttcacagttcagctgctagtcttgaagcttttccttagcttcattatgatacgtaattttataaggtattctgttgagtgatcattgtttaaaaaaaaagtttcttgctacccattgtgtttattaatagacatgatgggtttttttcagttgtcatatagattttcattattttcccttccattttcaaaatttaatgttaccagtttctccaaagacaagaaggcatctagtattaatgatggaagagtttattttctcttaccctttactaatttaaacattaggctgggtgtggtggctcacgcctgtaatcctagcactttgggaggccaaggtggacaggtcacttaaggtcgagagtccaagaccagcctggccaacatggtgaaaccccgtctctagtaaaaatacaaaaattagccaggcatggtggcacgcgcctgtaatcccagctacttgggaggctgagatgtgagaatcacttgaacctgggaggcggaggttgcagtgagctgagattacacccctggactccagcttgggtgacacagtgagactgtgtctcaacaaaaataaaaaattaaataaatactaatttaaatattattaaatgtttaaactaatgaacttggctgcttttcaaagacattttaattataaatctcataatcagctatttttttaaactgaactattcttatttcaaaggcattcatgagttttttatgtgatacttatttgagtgatgataagattgatttctggcattatttgtttggtagcgttttatttttcccaacattaatgtttcttaaaacacttttcctactattgtttgacatgggaactttcgcctgagtcactgtcatggttagcttttgttgttgttgtttttgtttctgttttgtttaaacaatactaccttgccaaaaatagaagaatgtgatttggtagagtagggttgtttggtttgtgtttgaataagagtatcctacagaagccactttttttttttttgagatggagttttgctcttgttgcccaggctggagtgcaatggcgcaatctcggctgactgcaacctccacctcccgggtgcaagtgattgtcctgcctcagcctcctgagtagctgggattacaggtatgtgccaccacgcctggctaattttgtatttttagtagagatggggtttctccatgttggtcaggctggtctcaaactcccgacctcaggtgatccgcccgcctcggcctcccaaagtgctgggattacaggtgtgagccaccgcacctggccagaagccactaactaaaataggcacacatgacacagcatgtggttaatagctgtgtcttgaattatcctctaaataaccaaatttagttgtatgtatttgtaaaggatatggcttcagaagctatcttttgttctctgtcgatataactcttaagggcattcctgacccaagaaagactccttgcgtttgtaactgtggtctaatacccaaatgtgccctgttcttatggatacagtctcttgaagcatacctcaaagtcatagagagaatatggcatttgaaagaaatcgtttgccttggatcatatgagttattttgtgaaacaacagctgacttttcagaaaaggagcaactacttttatatgctaaaagtatttcataactttctgggaaaccttatttaggtataaatggtcatcttattatttttcaaaaaggtatattttaataattgtacaatttatatacagtttgtgaccagaatttgtaagttgttggtgtcatatcaaggatcttttaaattatgccactacaggatgtatcatttcaagtctattttgcacagctaaacagtagcaaaagatgccaattagcatgataatggtgtcttcatttttactgtatttaactgaaacctaacacatgttgaaaaccatatcatacctagtttatctcttaatttcaaactatgtacttgtaaaaatgatgtaaatttgcactgggaacctgggaaagagtgactgataatttttggtgcgtgatttttagatttgtctttttttttttaagaagaatttgttactatgtaaaccctgacattaaatgttttatctctaccagcatcaggaggaatcactgctttaagggtattatgtaatgcctagtgccttctatttacagtgaaaaagaggttttgtgaaggcatttatggtcattaccaaaaactaaattaaaggccttggattttaaa

SEQ ID NO: 126294 - DNA, 503 bp, Homo sapiens
  Payload ID: 4764
  Gene Symbol: DENND6A
  Gene Name: DENN/MADD domain containing 6A
  ENST ID: ENST00000477344
  CDS Start-End: 1-503
tgatcgatggcctgccccagtgccagggaaaacattacacctgccaatcatgggggtggtaatgaaggtggacacaaatatatctgttattttacctactgttcatgaggtggatattttcaggtgtttctgcccagttttccttcatagtcagatgctctgggagctggtgctgttgggggagccccttgtggttatggcgccatcaccatcggaatcatcagagactgtattggcacttgttaactgtatttctccattaaagtacttcagtgatttccgaccttatttcactattcatgatagtgaattcaaagaatatactacccgtacccaagctccgccctcagttatattaggagtaaccaaccctttttttgctaagacactccagcactggccacacattattcgaataggagaccttaaacctacaggtgaaattcctaagcaggttaaagtgaaaaaactgaagaatctaaagactctggattccaaacctg

SEQ ID NO: 126295 - DNA, 406 bp, Homo sapiens
  Payload ID: 4764
  Gene Symbol: DENND6A
  Gene Name: DENN/MADD domain containing 6A
  ENST ID: ENST00000471531
  CDS Start-End: 1-376
tgaggctcaaagtgttattcttcgacgctattttttggaactgacacaaagtttcatcattccattagaaagatatgtggcaagcttgatgcctttgcagaaaagtatttccccatggaagagtccacctcaattaagacagtttcttccagaagaatttatgaaaacacttgagaaaacaggacctcagctaacctctagaataaaaggcgattggattggactttaccggcatttcctaaagtctccaaattttgatggctggtttaagacccggaggaaggaaatgacccaaaaattggaggcactccatctagaagctctttgtgaagaggttcgaaaactgtgtgtttgtgtaatgattaacaactgttgaaaataaagataattatgcttagaagttgaa

SEQ ID NO: 126296 - DNA, 4939 bp, Homo sapiens
  Payload ID: 4765
  Gene Symbol: DENND6B
  Gene Name: DENN/MADD domain containing 6B
  Uniprot ID: Q8NEG7
  ENST ID: ENST00000413817
  CDS Start-End: 73-1830
gactgttctgaggagcggcccggacgcgcgccgcccccgcccgcgtttccccggcaacccgcggccgccgccatggacgcgctgttgggcacagggcctcgccgggctcgcggctgcctgggcgcggctggacccacgtcttcaggtcgcgcggcgcggaccccggcggcgccctgggcgcgcttctccgcctggctggagtgtgtgtgcgtggtcaccttcgacctggagctgggccaggcgctggagctggtgtatccgaacgacttccggctcacagacaaggagaaaagcagcatctgctacctgtcttttcccgactcgcactcaggctgccttggagacactcagttcagcttccgcatgcgccagtgtggagggcagaggagcccctggcatgccgacgacaggcactacaacagcagggcccctgtggcactgcagagggagccggcacactacttcggctacgtgtacttcaggcaggtgaaggacagctctgtgaagaggggctacttccagaagtctttggtgctggtgtcccgcttgccctttgtccggctgttccaagcgctgctaagcctcatcgcccccgagtactttgacaagctggcgccctgcctggaagcagtgtgcagtgagatcgaccagtggccggcgcctgcacctgggcagaccctgaacctacctgtcatgggcgttgttgtccaggtgcgcatcccatccagggtggacaagtccgagtccagtcctccgaagcagtttgaccaagagaacctgctgccagccccagtggttcttgctagcgtccacgagctggacctgttcaggtgcttccggcctgtgctgactcatatgcagacactgtgggagctcatgctcctcggggagcccctgctagtcctggcaccctcgcccgacgtgtcctcggagatggtgctggccttgaccagctgcctgcagcccctcaggttctgctgcgacttccgtccctacttcaccatccatgacagcgagttcaaggagttcaccacacgcacgcaggccccaccaaacgtggtcctgggagtcacaaaccctttctttatcaaaacactccagcactggccccacatcctccgagtcggggagcccaagatgtcaggagacctgcctaagcaagtcaagctgaaaaagccttcaaggttgaagaccctggacaccaagccaggcctctacaccgcttacacggcccacctccaccgcgacaaggcgctgctcaaacggctgctcaagggcgtgcagaagaagcggccgtcagatgtgcagagcgccctgctgcggcggcacctcctggagctcacccagagcttcatcatccccctggagcactacatggccagcctcatgcccctgcagaagagcatcacgccctggaagactcccccccagatccagcccttcagccaggatgacttcctgcgtagcctggagcatgctgggccccagctcacctgcatcctcaagggcgactggctgggtctctacaggcggtttttcaagtccccccattttgatggctggtaccggcagcggcacaaggagatggccctgaagctggaggccctgcacctggaggctatctgtgaggcgaacatcgagacctggatgaaagacaagtccgaggtggaggtcgtggacctggtcctgaaacttcgtgagaagctggtgcgggctcagggccaccagctccctgtgaaggaggctacgctgcagcgggcacagctgtacatcgagacggtcatcggctccctgcccaaagacctgcaggctgtcttgtgccctccctagaacaaagccaagggccacggtcccagggccctaggtctgcctgagcctcccactccccagtggtggcggcactgggccaagcacacgctccccttccttggccccccgcccagactgcaggctccccttcctgcaccaccattgtctcagcagtaaaggcgacatttggaaccacagcatggccttgaccataggggttcctcgcaggcagagccttgcctcctcctgggtcccacctggcctctgcagaccttaggctgggacgggggcggggacaggctgggagcccttgctgatgtgggtgcgtctaccgtctgcccctcccggtgcccatctgttggcccccgacccccctgcgctgtgtgtgatgcttccctcagcccaacaggctgcccaggacaggagggaccctctcctgacacagcccccgtcttgtctggggatgggaggctattttgcatatagtcatcaacttgagaaagggagagaccactttgcagtgtgaagagctctgctcaccacccctggtgctcctctggacacccacctgcttggggctgtggtttgttgggaggtaggggttgggcagggggctgtgtgcagcccagcacctctgctaggagagctggctcagcctggctctcggagagccacagcaccttcctggctcccagtcctggagcccccaccaggcaccagctccgtgcgtcccttctgggaggtggacagggctcctgttgtccaagtgtgtccgtccatcccccacatgcagcccaaggggctctggacttcggcctgaccctgcctctggctggagcctgcatgtctccctttccttggtaaggggtgaacgtccctaagagccacctctgggttgtatgctccccccgtgacacctgcaggcactgaggccggtgaggtacggtgttgaccctgcacagcacacagtgacggtactgtcagggctccggacagccaagccctgctcagcatcacgcactgtgtgcccgggagcaggtcccctgaccactcagaccctcagactcctcatctgagcgagccagccatgcagatgcccgacagggtgctgggagggccactcatggagactgggctttgtaccctgtgaggccgggcgggtgctggccaggggacacagggctgggggagggactttttctttttttttctttttgaaatggagtctcgctctgttgcccaggctggagtgcagtggcatgatctcggctcactgcaagctctgcctcccgggttcacgccattctcctgcctcagcctcccgagtagctgggactacaggcacccaccactgcgcttggttaattttttgtatttgtagtagagacagggtttcaccatgttagccaggatggtctcgatctcctgacctcgtaatccgcccgcctcggcctcccaacgtgctaggattacaggcatgagccaccgcgcccggccgggacttttctttttcttctgaggcccccattcagtccgaggaatgtagccttcattcagcgcaacgtactgtttgtgttctcattggtgctctcagacctccagccaggtggtggagagcgagcactgccagccacttcagtgcaggatgtgactgagccacaaggacagcggggtcaggtgtccgggcgccaggtagttctcagaacttggtacatgtcaacttgtccagcccaactgcagcccaggacagcctgtccctgttcccattctacagacaagacgcggaggcagccgggagggtgaccaaggggagctgttaagccccagatgtctggtgcagggtccaaggatgtgaccacatgaaacagaacacatagaggccgaggtggcaaacctgttctgtggcagggacaagccggggacccgagggtgagaaaggtcctggccccaaatgcagcttgggcctcctgactgtagcacagggggaccagcctccccactgagggcttggtctctagagggtctgcagagatgctggcacctcttgtgtgggcagcttgaatgctgacctccataagatggggcctggggggccagtacaggccctgccatcagctgccctccaccagggccctctgcaaaagccttatgctggtgaccagccccctgaggaccaccacttcaaggtgtcggggcagcttgggaagacaacccacctctctcacaactgtgaccccactttggggagcgcaccccaaggaccgtggcagcatgtgcttccccacagcacagtctcgcctcacttggctttctgagggctgccgcacagcacagagggctgcagacccacatggctgcaggggaggggcttcaggctggtctctgaggagcccccagggaccctggccactgtgtatccagaaatgcacaagcagatttccctggagggctctggtgaggccacatagtggcgtgtgaagggggaacttgaggggggaaccgggctgggtggccagcattgccctgggcagaagctaaggctaaggtggggggtagtgtcccagcccctcttcctcagggcctgtccccacctgtgcagaagaggcctggggtggaatgtggcctggggtggatgggtgggggctgggcgtggagacctgccagctccatctgtccggatgcctcttgtggcccccccagtgtcagggccgctctgagttggctgagcctctgtccagggctaggccatggccctccccgccccacgcactccaggccaggggcagtcagtgaagaggcaggaaggtccagacagctctacccctggccagagtgccagcccccgcaggcaagagggcttgctgggcagaacttagttggcgagggtgaggactgctgtggtcacaggcctcccgaaggacagggaccacagaacctagagggtgggaagggctgggagcaggtctggagtggggctcggggctgagggtgcacacagggggcctgctcagggacaggaaggacagctgctcaccctcaagcttcctgctggctatttaaagactcccttttagtctagaacagtggccttcccacagttttggtattaaaatgtccttttgtgactgga

SEQ ID NO: 126297 - DNA, 920 bp, Homo sapiens
  Payload ID: 4765
  Gene Symbol: DENND6B
  Gene Name: DENN/MADD domain containing 6B
  ENST ID: ENST00000433760
  CDS Start-End: 27-920
ctgctgggacggtcacagtccagcagatgctgtcgaggggtgtcgcctcctcggacagatggtgtcaccaagcactctgtcttcctctgcagctggtgtatccgaacgacttccggctcacagacaaggagaaaagcagcatctgctacctgtcttttcccgactcgcactcaggctgccttggagacactcagttcagcttccgcatgcgccagtgtggagggcagaggagcccctggcatgccgacgacaggcactacaacagcagggcccctgtggcactgcagagggagccggcacactacttcggctacgtgtacttcaggcaggtgaaggacagctctgtgaagaggggctacttccagaaggccctagggtccagccccaccggccgccacccagggagttcagtgttgggttttctcctgtctaataattctggggtccaagtcaggcgttcctggggcagctgtcctgtgaagttggtgggacgtgctaccctgggccagctccagtctttggtgctggtgtcccgcttgccctttgtccggctgttccaagcgctgctaagcctcatcgcccccgagtactttgacaagctggcgccctgcctggaagcagtgtgcagtgagatcgaccagtggccggcgcctgcacctgggcagaccctgaacctacctgtcatgggcgttgttgtccaggtgcgcatcccatccagggtggacaagtccgagtccagtcctccgaagcagtttgaccaagagaacctgctgccagccccagtggttcttgctagcgtccacgagctggacctgttcaggtgcttccggcctgtgctgactcatatgcagacactgtgggagctcatgctcctcggggagcccctgctagtcctggcaccctcgcccgacgtgtcctcg

SEQ ID NO: 126298 - DNA, 2769 bp, Homo sapiens
  Payload ID: 4766
  Gene Symbol: DENR
  Gene Name: density-regulated protein
  Uniprot ID: O43583
  ENST ID: ENST00000280557
  CDS Start-End: 187-783
ctcgcgacatccgcccagcggcggccggaatctcgcgataaaggctcattgtctcgcgggagcgctgctggcggtcgggcgctcgggcggccctggccggggagacgagttgcatgtgttggttcagctggcgatagcggcgggagcggagccggcggggcctgtgcgaccgcctgggtttgtgaaatggctgctgacatttctgaatccagcggggctgactgcaaaggagacccaaggaacagtgccaagttagatgccgattacccacttcgagtcctttattgtggagtctgttcattaccaacagagtactgtgaatatatgcctgatgttgctaaatgtagacaatggttagagaagaattttccaaatgaatttgcaaaacttactgtagaaaattcacccaaacaagaagctggaattagtgagggtcaaggaacagcaggggaagaagaggagaagaaaaaacagaagagaggtggaaggggtcaaataaaacaaaaaaagaagaccgtaccacaaaaggttactatagccaaaattcccagagcaaagaagaaatatgtgacaagagtatgtggccttgcaacttttgaaattgatcttaaagaagcacaaagattttttgctcaaaaattctcctgtggtgcctcagtaacaggggaggatgaaattatcattcagggagattttacagatgacataattgatgtcattcaggaaaaatggccagaggtagatgatgacagcatcgaagatcttggagaagtaaagaagtgaatttgaaaatttgtctgtatttaatggcctgaactgagagttgatatggccaaagggagagaggccttttaaaatatatatatatatacacatatatatgtatatatacacatatatgtatgtatacacatatacacatgtatatatacatgtgtgtatgtatacatgtatatatatatacatacacatatatgtatacatatatacacatatatgtatacatatatacacatatgtatacatatatatatattctacagtaaaactgtagactgtcctcgtccttggcattttcactgttctgtacaaggctgcttgtttttttattgccaaagtcaaataaacgggagactgtcatgctcatgcatgaatagaatttagtcaaataaaaaattttggtcatttggtactgactttctctctctctctctctctcttttttttttttgacagagtctcgcactgttgcctgggctggaatgcagtggtgcgatctcggctcactgcaacctccgcctcccgggttcaagtgattctcctgcctcagcctcccaagtaggtgggattacaggcgcccgccaccacgcccagctaatttttgtatttttagtagagatggggtttcactatgttggccaggctggtctcgaactcctgacctcgtgattggcccacctcagcctcccaaagtgctggtattacagatgtgagccaccgcacccagcctgagtttctctttctctctttttaactttattttttgaaaaacccggtagactttttgtggggagcatttttgttgataattttactgatctaaagctgagtgattttttaaaagaatttgaatttggcttcctcaccagtaatatgtctccttgcttctttgatgtgatagttttgagatgggtgagaatctaatagatctgtggttgaatttgctgtgttgttatgaagtccaccctgtgggcacaataacataactgttggtaggagttgtttgagctattctggagattatttggtaaagtatactaaaagccttaaaaccatgtatgtgcgctgtttgaacccgtaagccacttctttgacattagaagacattagaagaaataatcagccttgcataaaacttatggatgaaagtattcatcacaatattatttataataaaaaattgcaaatgttataaatgaacaattgggaaatggttaaagaagtgatggtgcattgtgtggtagaatattatgcatatgtttaaagaatcatattttctaagattatttggaagcatgtttggtaatgtcaagtggagtaccccagatacattttagacatttatcgtcatcatctgctctgagtggaaggccgttcagagaggctagaggttcttattctggctataaattatgtgagtaaaattgtgctaaccagttaaaagtactgtacacccatgctcaatatatagtcctggaaatagcaattgaaacatgtcttctcacaagagaaaatgacagttttaatgatgtatttgatgaatttaaactttaagtcaggtgctgcaaattggaaagaagacttgtggtgttttaagttgctgtggacacttttaagaaacttagaacccatggaacccttgtttatcgccatgcaaattacaatcttgaatgagtgttttttaaaaataaagtattagaaaaatgtgtagtaaagatgtaaaattaaaaaatggaattctccattaactgtggattttactaaatagaattactggtgaagcagatttatccatcgagactatctggtatgcgttatgtatgtagtctgttgctgctgaaagatgtctgtgtgcctgtatcaacatgtgacttcatgtaaagtttctttgtgttcacagttcttagcaaatgcagttacaatccatagatagccagcagtggatgttactccaggaaaatgcaggattaaaattgtccttgtgtataa

SEQ ID NO: 126299 - DNA, 1052 bp, Homo sapiens
  Payload ID: 4766
  Gene Symbol: DENR
  Gene Name: density-regulated protein
  ENST ID: ENST00000455982
  CDS Start-End: 137-619
gtctcgcgggagcgctgctggcggtcgggcgctcgggcggccctggccggggagacgagttgcatgtgttggttcagctggcgatagcggcgggagcggagccggcggggcctgtgcgaccgcctgggtttgtgaaatggctgctgacatttctgaatccagcggggctgactgcaaaggagacccaaggaacagtgccaagttagatgccgattacccacttcgagtcctttattgtggagtctgttcattaccaacagagtactgtgaatatatgcctgatgttgctaaatgtagacaatggttagagaagaattttccaaatgaatttgcaaaacttactgtagaaaattcacccaaacaagaagctggaattagtgagggtcaaggaacagcaggggaagaagaggagaagaaaaaacagaagagaggtggaaggggtcaaataaaacaaaaaaagaagaccgtaccacaaaaggttactatagccaaaattcccagagcaaagaagaaatatgtgacaagagtatgtggccttgcaacttttgaaattgatcttaaagaagcacaaagattttttgctcaaaaattctcctgtggtgcctcacctcccaagtaggtgggattacaggcgcccgccaccacgcccagctaatttttgtatttttagtagagatggggtttcactatgttggccaggctggtctcgaactcctgacctcgtgattggcccacctcagcctcccaaagtgctggtattacagatgtgagccaccgcacccagcctgagtttctctttctctctttttaactttattttttgaaaaacccggtagactttttgtggggagcatttttgttgataattttactgatctaaagctgagtgattttttaaaagaatttgaatttggcttcctcaccagtaatatgtctccttgcttctttgatgtgatagttttgagatgggtgagaatctaatagatctgtggttgaatttgctgtgttgttatgaagtccaccctgtgggcacaataacataactgttggta

SEQ ID NO: 126300 - DNA, 4573 bp, Homo sapiens
  Payload ID: 4767
  Gene Symbol: DTL
  Gene Name: denticleless E3 ubiquitin protein ligase homolog (Drosophila)
  Uniprot ID: Q9NZJ0
  ENST ID: ENST00000366991
  CDS Start-End: 315-2507
cgcggtttgtccgcgcctctgctaccccctgcgcaggcgctcaaggagctcttggactccaggttcccgcggctgggagaaaaggaggcggggatccgaagggggaaatgactctgaggcgcccggacgtcgctcggaagccaatcagagagcgtgacgtcagtttggcgcggagtttggcggccggggcttacagtggcgggagttggaggcgataacgatttgtgttgtgagaggcgcaagctgcgatttctgctgaacttggaggcatttctacgacttttctctcagctgaggcttttcctccgaccctgatgctcttcaattcggtgctccgccagccccagcttggcgtcctgagaaatggatggtcttcacaataccctcttcaatcccttctgactggttatcagtgcagtggtaatgatgaacacacttcttatggagaaacaggagtcccagttcctccttttggatgtaccttctcttctgctcccaatatggaacatgtactagcagttgccaatgaagaaggctttgttcgattgtataacacagaatcacaaagtttcagaaagaagtgcttcaaagaatggatggctcactggaatgccgtctttgacctggcctgggttcctggtgaacttaaacttgttacagcagcaggtgatcaaacagccaaattttgggacgtaaaagctggtgagctgattggaacatgcaaaggtcatcaatgcagcctcaagtcagttgccttttctaagtttgagaaagctgtattctgtacgggtggaagagatggcaacattatggtctgggataccaggtgcaacaaaaaagatgggttttataggcaagtgaatcaaatcagtggagctcacaatacctcagacaagcaaaccccttcaaaacccaagaagaaacagaattcaaaaggacttgctccttctgtggatttccagcaaagtgttactgtggtcctctttcaagacgagaataccttagtctcagcaggagctgtggatgggataatcaaagtatgggatttacgtaagaattatactgcttatcgacaagaacccatagcatccaagtctttcctgtacccaggtagcagcactcgaaaacttggatattcaagtctgattttggattccactggctctactttatttgctaattgcacagacgataacatctacatgtttaatatgactgggttgaagacttctccagtggctattttcaatggacaccagaactctaccttttatgtaaaatccagccttagtccagatgaccagtttttagtcagtggctcaagtgatgaagctgcctacatatggaaggtctccacaccctggcaacctcctactgtgctcctgggtcattctcaagaggtcacgtctgtgtgctggtgtccatctgacttcacaaagattgctacctgttctgatgacaatacactaaaaatctggcgcttgaatagaggcttagaggagaaaccaggaggtgataaactttccacggtgggttgggcctctcagaagaaaaaagagtcaagacctggcctagtaacagtaacgagtagccagagtactcctgccaaagcccccagggcaaagtgcaatccatccaattcttccccgtcatccgcagcttgtgccccaagctgtgctggagacctccctcttccttcaaatactcctacgttctctattaaaacctctcctgccaaggcccggtctcccatcaacagaagaggctctgtctcctccgtctctcccaagccaccttcatctttcaagatgtcgattagaaactgggtgacccgaacaccttcctcatcaccacccatcactccacctgcttcggagaccaagatcatgtctccgagaaaagcccttattcctgtgagccagaagtcatcccaagcagaggcttgctctgagtctagaaatagagtaaagaggaggctagactcaagctgtctggagagtgtgaaacaaaagtgtgtgaagagttgtaactgtgtgactgagcttgatggccaagttgaaaatcttcatttggatctgtgctgccttgctggtaaccaggaagaccttagtaaggactctctaggtcctaccaaatcaagcaaaattgaaggagctggtaccagtatctcagagcctccgtctcctatcagtccgtatgcttcagaaagctgtggaacgctacctcttcctttgagaccttgtggagaagggtctgaaatggtaggcaaagagaatagttccccagagaataaaaactggttgttggccatggcagccaaacggaaggctgagaatccatctccacgaagtccgtcatcccagacacccaattccaggagacagagcggaaagaaattgccaagcccggtcaccatcacgcccagctccatgaggaaaatctgcacatacttccatagaaagtcccaggaggacttctgtggtcctgaacactcaacagaattatagattctaatctgagtgagttactgagctttggtccactaaaacaagctgagctttggtccactaaaacaagatgaaaaatacaagagtgactctataactctggtctttaagaaagctgccttttcatttttagacaaaatcttttcaacgctgaaatgtacctaatctggttctactaccataatgtatatgcagcttcccgaggatgaatgctgtgtttaaatttcataaagtaaatttgtcactctagcattttgaatgaatagtcttcactttttaaattattcatcttctctataataatgacatcccagttcatggaggcaaaaaacaagtttcttgttatcctgaaactttctatgctcagtggaaagtatctgccagccacagcatgaggcctgtgaaggctgactgagaaatcctctgctgaagacccctggttctgttctgcctccaacatgtataattttatttgaaatacataatcttttcactatgcttttgtggggttttttttaagtatgtgtaaaaatgtgatgctcagataagtacatttatatcagttcagtgttaaaatgcagtctcttgagttaaagtcatctttattttaaatgcagtgataaatgtcaactcttcggagaaactaggagaacaacaacagaaagctgtgtttgtcttttttctctcaaatatatctcccgtatgagatttcaggtccccatgttttcaccaagcaatctgctatgtcagccaacccaacatcactttctacaggaggttatgatttttgccatttactagaggaagatgttttatgaaatcaatttggggtttgaattcaggtgcagtcatcagttctttaggggctgcaatgttttaaaaaaaataagtcatcagattttaagaaaaaagtgatgatttcttattgatatttttgtaacagaatatagctcttaactgaaaatccagaaccagaaacataaatcttgagtttcttttcatgtacataaaaagcaatagccttttagtatagatagccctgagccaaaaagtaatagaattttctctagatatttaatacagagagtgtatagactgactctaagttaataatgtgcaaaatatcttaaacatccctccccttattcaacaattatgtatcagtgatcttgaaccattgttttatatttttcacctttgtaacctcatggaaagaggctttacatactttctatgtactatttacttagaagggagcccccttccagtcatgaaacttcatttgttttatccatatccctgaggactgtgtagactttatgtcagtttttgtcattatttgaaaatctattctgacaactttttaattcctttgatcttataagttaaagctgtaacaactgaaattgcatggatcaagtaagcatagttttatccagggagaaaaataaaaggaagccatagaattgctctggtcaaaaccaagcacaccatagccttaactgaatatttaggaaatctgcctaatctgcttatatttggtgtttgttttttgactgttgggctttgggaagatgttatttatgaccaatatctgccagtaacgctgtttatctcacttgctttgaaagccaatgggggaaaaaaatccatgaaaaaaaaaagattgataaagtagatgattttgtttgtatccctacccatctcctggcagccctactgagtgaaattgggatacatttggctgtcagaaattataccgagtctactgggtataacatgtctcacttggaaagctagtacttttaaatgggtgccaaaggtcaactgtaatgagataattatccctgcctgtgtccatgtcagactttgagctgatcctgaataataaagccttttaccttatctgatgtccttttctgagctttttgcattacctagaagcagtctacaaaaaagaactatagtagtcaagaatcccttctacttgttcattaaaatgtttattcccaaagttataatctatttcaagctgaaagagcttttaataaaaaacatcttgcttg

SEQ ID NO: 126301 - DNA, 4471 bp, Homo sapiens
  Payload ID: 4767
  Gene Symbol: DTL
  Gene Name: denticleless E3 ubiquitin protein ligase homolog (Drosophila)
  ENST ID: ENST00000542077
  CDS Start-End: 339-2405
gttacgcatgcgccctggtcaccccgcggtttgtccgcgcctctgctaccccctgcgcaggcgctcaaggagctcttggactccaggttcccgcggctgggagaaaaggaggcggggatccgaagggggaaatgactctgaggcgcccggacgtcgctcggaagccaatcagagagcgtgacgtcagtttggcgcggagtttggcggccggggcttacagtggcgggagttggaggcgataacgatttgtgttgtgagaggcgcaagctgcgatttctgctgaacttggaggcatttctacgacttttctctcagctgaggcttttcctccgaccctgatgctcttcaattcggtgctccgccagccccagcttggcgtcctgagaaatgctcccaatatggaacatgtactagcagttgccaatgaagaaggctttgttcgattgtataacacagaatcacaaagtttcagaaagaagtgcttcaaagaatggatggctcactggaatgccgtctttgacctggcctgggttcctggtgaacttaaacttgttacagcagcaggtgatcaaacagccaaattttgggacgtaaaagctggtgagctgattggaacatgcaaaggtcatcaatgcagcctcaagtcagttgccttttctaagtttgagaaagctgtattctgtacgggtggaagagatggcaacattatggtctgggataccaggtgcaacaaaaaagatgggttttataggcaagtgaatcaaatcagtggagctcacaatacctcagacaagcaaaccccttcaaaacccaagaagaaacagaattcaaaaggacttgctccttctgtggatttccagcaaagtgttactgtggtcctctttcaagacgagaataccttagtctcagcaggagctgtggatgggataatcaaagtatgggatttacgtaagaattatactgcttatcgacaagaacccatagcatccaagtctttcctgtacccaggtagcagcactcgaaaacttggatattcaagtctgattttggattccactggctctactttatttgctaattgcacagacgataacatctacatgtttaatatgactgggttgaagacttctccagtggctattttcaatggacaccagaactctaccttttatgtaaaatccagccttagtccagatgaccagtttttagtcagtggctcaagtgatgaagctgcctacatatggaaggtctccacaccctggcaacctcctactgtgctcctgggtcattctcaagaggtcacgtctgtgtgctggtgtccatctgacttcacaaagattgctacctgttctgatgacaatacactaaaaatctggcgcttgaatagaggcttagaggagaaaccaggaggtgataaactttccacggtgggttgggcctctcagaagaaaaaagagtcaagacctggcctagtaacagtaacgagtagccagagtactcctgccaaagcccccagggcaaagtgcaatccatccaattcttccccgtcatccgcagcttgtgccccaagctgtgctggagacctccctcttccttcaaatactcctacgttctctattaaaacctctcctgccaaggcccggtctcccatcaacagaagaggctctgtctcctccgtctctcccaagccaccttcatctttcaagatgtcgattagaaactgggtgacccgaacaccttcctcatcaccacccatcactccacctgcttcggagaccaagatcatgtctccgagaaaagcccttattcctgtgagccagaagtcatcccaagcagaggcttgctctgagtctagaaatagagtaaagaggaggctagactcaagctgtctggagagtgtgaaacaaaagtgtgtgaagagttgtaactgtgtgactgagcttgatggccaagttgaaaatcttcatttggatctgtgctgccttgctggtaaccaggaagaccttagtaaggactctctaggtcctaccaaatcaagcaaaattgaaggagctggtaccagtatctcagagcctccgtctcctatcagtccgtatgcttcagaaagctgtggaacgctacctcttcctttgagaccttgtggagaagggtctgaaatggtaggcaaagagaatagttccccagagaataaaaactggttgttggccatggcagccaaacggaaggctgagaatccatctccacgaagtccgtcatcccagacacccaattccaggagacagagcggaaagaaattgccaagcccggtcaccatcacgcccagctccatgaggaaaatctgcacatacttccatagaaagtcccaggaggacttctgtggtcctgaacactcaacagaattatagattctaatctgagtgagttactgagctttggtccactaaaacaagctgagctttggtccactaaaacaagatgaaaaatacaagagtgactctataactctggtctttaagaaagctgccttttcatttttagacaaaatcttttcaacgctgaaatgtacctaatctggttctactaccataatgtatatgcagcttcccgaggatgaatgctgtgtttaaatttcataaagtaaatttgtcactctagcattttgaatgaatagtcttcactttttaaattattcatcttctctataataatgacatcccagttcatggaggcaaaaaacaagtttcttgttatcctgaaactttctatgctcagtggaaagtatctgccagccacagcatgaggcctgtgaaggctgactgagaaatcctctgctgaagacccctggttctgttctgcctccaacatgtataattttatttgaaatacataatcttttcactatgcttttgtggggttttttttaagtatgtgtaaaaatgtgatgctcagataagtacatttatatcagttcagtgttaaaatgcagtctcttgagttaaagtcatctttattttaaatgcagtgataaatgtcaactcttcggagaaactaggagaacaacaacagaaagctgtgtttgtcttttttctctcaaatatatctcccgtatgagatttcaggtccccatgttttcaccaagcaatctgctatgtcagccaacccaacatcactttctacaggaggttatgatttttgccatttactagaggaagatgttttatgaaatcaatttggggtttgaattcaggtgcagtcatcagttctttaggggctgcaatgttttaaaaaaaataagtcatcagattttaagaaaaaagtgatgatttcttattgatatttttgtaacagaatatagctcttaactgaaaatccagaaccagaaacataaatcttgagtttcttttcatgtacataaaaagcaatagccttttagtatagatagccctgagccaaaaagtaatagaattttctctagatatttaatacagagagtgtatagactgactctaagttaataatgtgcaaaatatcttaaacatccctccccttattcaacaattatgtatcagtgatcttgaaccattgttttatatttttcacctttgtaacctcatggaaagaggctttacatactttctatgtactatttacttagaagggagcccccttccagtcatgaaacttcatttgttttatccatatccctgaggactgtgtagactttatgtcagtttttgtcattatttgaaaatctattctgacaactttttaattcctttgatcttataagttaaagctgtaacaactgaaattgcatggatcaagtaagcatagttttatccagggagaaaaataaaaggaagccatagaattgctctggtcaaaaccaagcacaccatagccttaactgaatatttaggaaatctgcctaatctgcttatatttggtgtttgttttttgactgttgggctttgggaagatgttatttatgaccaatatctgccagtaacgctgtttatctcacttgctttgaaagccaatgggggaaaaaaatccatgaaaaaaaaaagattgataaagtagatgattttgtttgtatccctacccatctcctggcagccctactgagtgaaattgggatacatttggctgtcagaaattataccgagtctactgggtataacatgtctcacttggaaagctagtacttttaaatgggtgccaaaggtcaactgtaatgagataattatccctgcctgtgtccatgtcagactttgagctgatcctgaataataaagccttttaccttatctgatgtccttttctgagctttttgcattacctagaagcagtctacaaaaaagaactatagtagtcaagaatcccttctacttgttcattaaaatgtttattcccaaagttataatctatttcaagctgaaagagcttttaataaaaaacatcttgcttg

SEQ ID NO: 126302 - DNA, 2634 bp, Homo sapiens
  Payload ID: 4768
  Gene Symbol: DMP1
  Gene Name: dentin matrix acidic phosphoprotein 1
  Uniprot ID: Q13316
  ENST ID: ENST00000282479
  CDS Start-End: 100-1593
tgggcatagatttcctctttgagaacatcaacctgatttttgagactttttgaaaaaattctttgtgaactacggagggtagaggtatcacacccaactatgaagatcagcatcctgctcatgttcctttggggattatcctgtgctctcccagtaaccaggtatcaaaataatgaatctgaggattctgaagaatggaagggtcatttggctcaggcaccaacaccacccttggcaaatgaagaccccagtgacagcactcagtcagaggagggcctgggctctgatgatcatcaatacatttataggctagctggtggcttctccaggagcacaggaaaaggaggagatgataaagatgacgatgaagatgacagtggagatgacacctttggtgacgatgacagtggcccagggcccaaagacagacaagaaggaggaaactccagactgggaagtgatgaggactctgatgacaccatacaagccagtgaagagagtgccccacaagggcaagacagtgcccaagataccaccagtgagagcagggaacttgacaatgaggaccgggtggacagcaagcctgagggaggtgactccactcaagagagtgagagtgaagagcactgggtgggaggtggcagtgatggggagagcagccatggagacggctccgagttggacgatgagggaatgcagagtgatgacccagagagcatcaggagtgaaaggggaaactccagaatgaacagtgcaggcatgaaatcaaaagaatctggagaaaacagtgagcaagcaaacactcaagattcaggtggcagccaattgctggagcatcccagtaggaaaatttttaggaagtctcgcatctcagaggaagatgacagaagcgagcttgatgacaacaacacaatggaagaagtcaagagtgactctacagaaaacagcaactccagagacactggcctcagccaacccaggagagacagcaagggtgactctcaagaagacagcaaggagaatctgtcccaggaagagagccaaaacgtagatggtcccagcagtgagtccagccaagaggccaacctgtcatctcaagagaacagcagtgagtctcaggaagaggtggtgagtgagtccaggggagataaccccgaccccacaactagttatgtagaagaccaggaagacagtgactccagcgaggaggacagctcgcacacactctcccactcaaaaagtgaatccagagaggagcaagcagacagcgaatccagtgagagcctcaacttctcagaggaaagcccggagtcccctgaggatgagaacagctccagccaggagggcctccagtctcacagcagctcagcagagagtcagagcgaggaaagccattctgaggaagacgacagtgactctcaagacagcagcagatccaaagaagatagcaactccacggagagcaaatcaagcagtgaggaagatggccagttgaaaaacattgagatagagagccggaaattaacagttgatgcctatcacaacaaacccattggggaccaagatgacaatgactgccaagacggctattagcatcagctgtcctaagaagcagttgtcacataaaggagtcttagggacttgaaaatgtatcatgataactataatttattgatgttttgatcaaaagaataaccagatgccatatttttcctgaaaggaattgctggacattacacttgtttttagggtgtcatcatttcacagaggtttaaatactgtggagtgacaccagaacacagccaaagaggctagaagcaagaaaggatctgcatgataactttgcagctgagatagttcctaattcatcaacgtaacaaacaaagctattgggtgtccatgatataccaggcactatgctaggtgttgagaatgtaaagcaggttaagacttgtttcttgctcctgaggagcgtatagaaggacccacaaagctacagagttaaagagggatatgtataagagaaacaagaattgttacaacccagtatggtgagtgccaagacagagagctatgaacacgatatctatctgggaacactgagaagggtgaccaatgcgttggagaacgagggagggcttcatagcagaagacattggagttggaaggttgcatagggtttcctcattggagaccgggaaattctattcttgggataaataatagtaaattctataggattcaatacttagtttgcaaaagcactttgaaattatggcacagtgagttgttttggataagaaaatctttttctcccaattaatttaccaattcatcatttttttttttttgtagaactcccataaacatcaccttactaatcactggtgatgataagaaggattgggtcaggaagagtgggagaaagaaattcctctttacgtagatactttttagctttattttttctaaaatcagtttgcgtgcaatgctagaaaaaaactgttctctgagtcctttacagagcaaaattctgtatgtaagattcaattgatttttgacaaataccatttgaaatattacctcaacataaaatacttgttttgtaataaagattataatacccagaagaaa

SEQ ID NO: 126303 - DNA, 2682 bp, Homo sapiens
  Payload ID: 4768
  Gene Symbol: DMP1
  Gene Name: dentin matrix acidic phosphoprotein 1
  Uniprot ID: Q13316
  ENST ID: ENST00000339673
  CDS Start-End: 100-1641
tgggcatagatttcctctttgagaacatcaacctgatttttgagactttttgaaaaaattctttgtgaactacggagggtagaggtatcacacccaactatgaagatcagcatcctgctcatgttcctttggggattatcctgtgctctcccagtaaccaggtatcaaaataatgaatctgaggattctgaagaatggaagggtcatttggctcaggcaccaacaccacccttggagagcagtgagtcatcagaaggcagtaaagttagctcagaggaacaggcaaatgaagaccccagtgacagcactcagtcagaggagggcctgggctctgatgatcatcaatacatttataggctagctggtggcttctccaggagcacaggaaaaggaggagatgataaagatgacgatgaagatgacagtggagatgacacctttggtgacgatgacagtggcccagggcccaaagacagacaagaaggaggaaactccagactgggaagtgatgaggactctgatgacaccatacaagccagtgaagagagtgccccacaagggcaagacagtgcccaagataccaccagtgagagcagggaacttgacaatgaggaccgggtggacagcaagcctgagggaggtgactccactcaagagagtgagagtgaagagcactgggtgggaggtggcagtgatggggagagcagccatggagacggctccgagttggacgatgagggaatgcagagtgatgacccagagagcatcaggagtgaaaggggaaactccagaatgaacagtgcaggcatgaaatcaaaagaatctggagaaaacagtgagcaagcaaacactcaagattcaggtggcagccaattgctggagcatcccagtaggaaaatttttaggaagtctcgcatctcagaggaagatgacagaagcgagcttgatgacaacaacacaatggaagaagtcaagagtgactctacagaaaacagcaactccagagacactggcctcagccaacccaggagagacagcaagggtgactctcaagaagacagcaaggagaatctgtcccaggaagagagccaaaacgtagatggtcccagcagtgagtccagccaagaggccaacctgtcatctcaagagaacagcagtgagtctcaggaagaggtggtgagtgagtccaggggagataaccccgaccccacaactagttatgtagaagaccaggaagacagtgactccagcgaggaggacagctcgcacacactctcccactcaaaaagtgaatccagagaggagcaagcagacagcgaatccagtgagagcctcaacttctcagaggaaagcccggagtcccctgaggatgagaacagctccagccaggagggcctccagtctcacagcagctcagcagagagtcagagcgaggaaagccattctgaggaagacgacagtgactctcaagacagcagcagatccaaagaagatagcaactccacggagagcaaatcaagcagtgaggaagatggccagttgaaaaacattgagatagagagccggaaattaacagttgatgcctatcacaacaaacccattggggaccaagatgacaatgactgccaagacggctattagcatcagctgtcctaagaagcagttgtcacataaaggagtcttagggacttgaaaatgtatcatgataactataatttattgatgttttgatcaaaagaataaccagatgccatatttttcctgaaaggaattgctggacattacacttgtttttagggtgtcatcatttcacagaggtttaaatactgtggagtgacaccagaacacagccaaagaggctagaagcaagaaaggatctgcatgataactttgcagctgagatagttcctaattcatcaacgtaacaaacaaagctattgggtgtccatgatataccaggcactatgctaggtgttgagaatgtaaagcaggttaagacttgtttcttgctcctgaggagcgtatagaaggacccacaaagctacagagttaaagagggatatgtataagagaaacaagaattgttacaacccagtatggtgagtgccaagacagagagctatgaacacgatatctatctgggaacactgagaagggtgaccaatgcgttggagaacgagggagggcttcatagcagaagacattggagttggaaggttgcatagggtttcctcattggagaccgggaaattctattcttgggataaataatagtaaattctataggattcaatacttagtttgcaaaagcactttgaaattatggcacagtgagttgttttggataagaaaatctttttctcccaattaatttaccaattcatcatttttttttttttgtagaactcccataaacatcaccttactaatcactggtgatgataagaaggattgggtcaggaagagtgggagaaagaaattcctctttacgtagatactttttagctttattttttctaaaatcagtttgcgtgcaatgctagaaaaaaactgttctctgagtcctttacagagcaaaattctgtatgtaagattcaattgatttttgacaaataccatttgaaatattacctcaacataaaatacttgttttgtaataaagattataatacccagaagaaa

SEQ ID NO: 126304 - DNA, 4281 bp, Homo sapiens
  Payload ID: 4769
  Gene Symbol: DSPP
  Gene Name: dentin sialophosphoprotein
  Uniprot ID: Q9NZW4
  ENST ID: ENST00000282478
  CDS Start-End: 34-3939
tacagccattgattattattattcctaaagaaaatgaagataattacatatttttgcatttgggcagtagcatgggccattccagttcctcaaagcaaaccactggagagacatgtcgaaaaatccatgaatttgcatctcctagcaagatcaaatgtgtcagtacaggatgagttaaatgccagtggaaccatcaaagaaagtggtgtcctggtgcatgaaggtgatagaggaaggcaagagaatacccaagatggtcacaagggagaagggaatggctctaagtgggcagaagtaggagggaagagtttttctacatattccacattagcaaacgaagaggggaatattgagggctggaatggggacacaggaaaagcagaaacatatggtcatgatggaatacatgggaaagaagaaaacatcacagcaaatggcatccagggacaagtaagcatcattgacaatgctggagccacaaacagaagcaacactaatggaaatactgataagaatacccaaaatggggatgttggcgatgcaggtcacaatgaggatgtcgctgttgtccaagaagatggacctcaagtagctggaagcaataacagtacagacaatgaggatgaaataattgagaattcctgtagaaacgagggtaatacaagtgaaataacacctcagatcaacagcaagagaaatgggactaaggaagctgaggtaacaccaggcactggagaagatgctggcctggataattccgatgggagtcctagtgggaatggagcagatgaggatgaagacgagggttctggtgatgatgaagatgaagaagcagggaatggaaaagacagtagtaataacagcaagggccaggagggccaggaccatgggaaagaagatgatcatgatagtagcataggtcaaaattcagatagtaaagaatattatgaccctgaaggcaaagaagatccccataatgaagttgatggagacaagacctccaagagtgaggagaattctgctggtattccagaagacaatggcagccaaagaatagaggacacccagaagctcaaccatagagaaagcaaacgcgtagaaaatagaatcaccaaagaatcagagacacatgctgttgggaagagccaagataagggaatagaaatcaagggtcccagcagtggcaacagaaatattaccaaagaagttgggaaaggcaacgaaggtaaagaggataaaggacaacatggaatgatcttgggcaaaggcaatgtcaagacacaaggagaggttgtcaacatagaaggacctggccaaaaatcagaaccaggaaataaagttggacacagcaatacaggtagtgacagcaatagtgatggatatgacagttatgattttgatgataagtccatgcaaggagatgatcccaatagcagtgatgaatctaatggcaatgatgatgctaattcagaaagtgacaataacagcagtagccgaggagatgcttcttataactctgatgaatcaaaagataatggcaatggcagtgactcaaaaggagcagaagatgatgacagtgatagcacatcagacactaataatagtgacagtaatggcaatggtaacaatgggaatgatgacaatgacaaatcagacagtggcaaaggtaaatcagatagcagtgacagtgatagtagtgatagcagcaatagcagtgatagtagtgacagcagtgacagtgacagcagtgatagcaacagtagcagtgatagtgacagcagtgacagtgacagcagtgatagcagtgacagtgatagtagtgatagcagcaatagcagtgacagtagtgacagcagtgatagcagtgacagtagtgatagtagtgacagcagtgacagcaagtcagacagcagcaaatcagagagcgacagcagtgatagtgacagtaagtcagacagcagtgacagcaacagcagtgacagtagtgacaacagtgatagcagcgacagcagcaatagcagtaacagcagtgatagtagtgacagcagtgatagcagtgacagcagcagtagcagtgacagcagcaacagcagtgatagtagtgacagtagtgacagcagcaatagcagtgagagcagtgatagtagtgacagcagtgatagtgacagcagtgatagtagtgacagcagtaatagtaacagcagcgatagtgacagcagcaacagcagcgatagcagtgacagcagcaacagcagtgacagcagtgatagcagtgacagcagcaacagcagtgacagtagcgatagcagtgacagcagcaacagcagtgacagcagtgatagcagtgacagcagtgatagtagtgacagcagcaacagcagtgatagcaacgacagcagcaatagcagtgacagcagtgatagcagcaacagcagtgatagcagcaacagcagtgatagcagtgatagcagtgacagcagtgatagcgacagcagcaatagcagtgacagcagtaatagtagtgacagcagcgatagcagcaacagcagtgatagcagcgacagcagcgatagcagtgacggcagtgatagcgacagcagcaatagaagtgacagtagtaatagtagtgacagcagcgatagcagtgacagcagcaacagcagtgacagcagtgatagcagtgacagcaacgaaagcagcaatagcagtgacagcagtgatagcagcaacagcagtgatagtgacagcagtgatagcagcaacagcagtgacagcagtgatagcagcaacagcagtgatagcagtgaaagcagtaatagtagtgacaacagcaatagcagtgacagcagcaacagcagtgacagcagtgatagcagtgacagcagtaatagtagtgacagcagcaatagcagtgacagcagcaacagcagtgacagcagtgatagcaatagcagcgacagcagtgacagcagcaacagcagcgatagcagtgacagcagtgatagcagtgacagcagtgacagcagtgatagcagcaacagcagtgatagcagtgacagcagtgacagcagtgatagcagtaatagtagtgacagcagcaatagcagtgacagcagcaacagcagtgacagcagcgatagcagtgacagcagcgatagcagtgacagcagcgatagcagtgacagcagtgacagcagcaatagcagtgacagcagtgacagcagcgacagcagtgatagcagtgacagcagtgacagcagcgacagcagtgatagcagtgaaagcagtgatagcagtgacagcagcaatagcagtgacagcagcgatagcagcgacagcagcgacagcagcgatagcagtgacagcagcgatagcagtgacagcagtgacagcagcaatagcagtgacagcagtgacagcagcgacagcagtgatagcagtgacagcagcaacagcagtgacagcagtgacagcagtgaaagcagcgacagcagtgacagcagcgacagcagtgacagcagcgatagcagcgacagcagcgacagcagcgatagcagtgacagcagcaatagcagtgatagcagcgacagcagtgatagcagtgacagcagcgacagcagcgatagcagcgacagcagcgatagtagtgatagcagtgacagcagtgacagcagcgacagcagtgacagcagcgacagcagtgacagcagcgacagcagtgacagcaatgaaagcagcgacagcagtgacagcagcgatagcagtgacagcagcaacagcagtgacagcagcgacagcagtgatagcagtgacagcacatctgacagcaatgatgagagtgacagccagagcaagtctggtaacggtaacaacaatggaagtgacagtgacagtgacagtgaaggcagtgacagtaaccactcaaccagtgatgattagaacaaaagaaaaacccgtaagattccttttgtgaaaagtttggtaatgggataggaaaaaaagatttccaagaaagtaaagaaaggggagaaataaacataagacgtatgtaaacaaaaacaactgggggaatcaaatcaaacagttggattcagaaccaagacctaactcctgcagagacagactctgaatgcatgacctttggtacatgcctgttaatattcatgttctgaaaatattttgttaaaagtgtaaatctaaacataaaagaacaattaaaatattctttaatacttcacacagaaacctcaagtaatcactacatgataacttcaatttaag

SEQ ID NO: 126305 - DNA, 4331 bp, Homo sapiens
  Payload ID: 4769
  Gene Symbol: DSPP
  Gene Name: dentin sialophosphoprotein
  Uniprot ID: Q9NZW4
  ENST ID: ENST00000399271
  CDS Start-End: 121-4026
atgcaaaagtccaggacagtgggccactttcagtcttcaaagagaaagataagaaattctggattttcaaaatccttttgaagccttttaagccattgattattattattcctaaagaaaatgaagataattacatatttttgcatttgggcagtagcatgggccattccagttcctcaaagcaaaccactggagagacatgtcgaaaaatccatgaatttgcatctcctagcaagatcaaatgtgtcagtacaggatgagttaaatgccagtggaaccatcaaagaaagtggtgtcctggtgcatgaaggtgatagaggaaggcaagagaatacccaagatggtcacaagggagaagggaatggctctaagtgggcagaagtaggagggaagagtttttctacatattccacattagcaaacgaagaggggaatattgagggctggaatggggacacaggaaaagcagaaacatatggtcatgatggaatacatgggaaagaagaaaacatcacagcaaatggcatccagggacaagtaagcatcattgacaatgctggagccacaaacagaagcaacactaatggaaatactgataagaatacccaaaatggggatgttggcgatgcaggtcacaatgaggatgtcgctgttgtccaagaagatggacctcaagtagctggaagcaataacagtacagacaatgaggatgaaataattgagaattcctgtagaaacgagggtaatacaagtgaaataacacctcagatcaacagcaagagaaatgggactaaggaagctgaggtaacaccaggcactggagaagatgctggcctggataattccgatgggagtcctagtgggaatggagcagatgaggatgaagacgagggttctggtgatgatgaagatgaagaagcagggaatggaaaagacagtagtaataacagcaagggccaggagggccaggaccatgggaaagaagatgatcatgatagtagcataggtcaaaattcagatagtaaagaatattatgaccctgaaggcaaagaagatccccataatgaagttgatggagacaagacctccaagagtgaggagaattctgctggtattccagaagacaatggcagccaaagaatagaggacacccagaagctcaaccatagagaaagcaaacgcgtagaaaatagaatcaccaaagaatcagagacacatgctgttgggaagagccaagataagggaatagaaatcaagggtcccagcagtggcaacagaaatattaccaaagaagttgggaaaggcaacgaaggtaaagaggataaaggacaacatggaatgatcttgggcaaaggcaatgtcaagacacaaggagaggttgtcaacatagaaggacctggccaaaaatcagaaccaggaaataaagttggacacagcaatacaggtagtgacagcaatagtgatggatatgacagttatgattttgatgataagtccatgcaaggagatgatcccaatagcagtgatgaatctaatggcaatgatgatgctaattcagaaagtgacaataacagcagtagccgaggagatgcttcttataactctgatgaatcaaaagataatggcaatggcagtgactcaaaaggagcagaagatgatgacagtgatagcacatcagacactaataatagtgacagtaatggcaatggtaacaatgggaatgatgacaatgacaaatcagacagtggcaaaggtaaatcagatagcagtgacagtgatagtagtgatagcagcaatagcagtgatagtagtgacagcagtgacagtgacagcagtgatagcaacagtagcagtgatagtgacagcagtgacagtgacagcagtgatagcagtgacagtgatagtagtgatagcagcaatagcagtgacagtagtgacagcagtgatagcagtgacagtagtgatagtagtgacagcagtgacagcaagtcagacagcagcaaatcagagagcgacagcagtgatagtgacagtaagtcagacagcagtgacagcaacagcagtgacagtagtgacaacagtgatagcagcgacagcagcaatagcagtaacagcagtgatagtagtgacagcagtgatagcagtgacagcagcagtagcagtgacagcagcaacagcagtgatagtagtgacagtagtgacagcagcaatagcagtgagagcagtgatagtagtgacagcagtgatagtgacagcagtgatagtagtgacagcagtaatagtaacagcagcgatagtgacagcagcaacagcagcgatagcagtgacagcagcaacagcagtgacagcagtgatagcagtgacagcagcaacagcagtgacagtagcgatagcagtgacagcagcaacagcagtgacagcagtgatagcagtgacagcagtgatagtagtgacagcagcaacagcagtgatagcaacgacagcagcaatagcagtgacagcagtgatagcagcaacagcagtgatagcagcaacagcagtgatagcagtgatagcagtgacagcagtgatagcgacagcagcaatagcagtgacagcagtaatagtagtgacagcagcgatagcagcaacagcagtgatagcagcgacagcagcgatagcagtgacggcagtgatagcgacagcagcaatagaagtgacagtagtaatagtagtgacagcagcgatagcagtgacagcagcaacagcagtgacagcagtgatagcagtgacagcaacgaaagcagcaatagcagtgacagcagtgatagcagcaacagcagtgatagtgacagcagtgatagcagcaacagcagtgacagcagtgatagcagcaacagcagtgatagcagtgaaagcagtaatagtagtgacaacagcaatagcagtgacagcagcaacagcagtgacagcagtgatagcagtgacagcagtaatagtagtgacagcagcaatagcagtgacagcagcaacagcagtgacagcagtgatagcaatagcagcgacagcagtgacagcagcaacagcagcgatagcagtgacagcagtgatagcagtgacagcagtgacagcagtgatagcagcaacagcagtgatagcagtgacagcagtgacagcagtgatagcagtaatagtagtgacagcagcaatagcagtgacagcagcaacagcagtgacagcagcgatagcagtgacagcagcgatagcagtgacagcagcgatagcagtgacagcagtgacagcagcaatagcagtgacagcagtgacagcagcgacagcagtgatagcagtgacagcagtgacagcagcgacagcagtgatagcagtgaaagcagtgatagcagtgacagcagcaatagcagtgacagcagcgatagcagcgacagcagcgacagcagcgatagcagtgacagcagcgatagcagtgacagcagtgacagcagcaatagcagtgacagcagtgacagcagcgacagcagtgatagcagtgacagcagcaacagcagtgacagcagtgacagcagtgaaagcagcgacagcagtgacagcagcgacagcagtgacagcagcgatagcagcgacagcagcgacagcagcgatagcagtgacagcagcaatagcagtgatagcagcgacagcagtgatagcagtgacagcagcgacagcagcgatagcagcgacagcagcgatagtagtgatagcagtgacagcagtgacagcagcgacagcagtgacagcagcgacagcagtgacagcagcgacagcagtgacagcaatgaaagcagcgacagcagtgacagcagcgatagcagtgacagcagcaacagcagtgacagcagcgacagcagtgatagcagtgacagcacatctgacagcaatgatgagagtgacagccagagcaagtctggtaacggtaacaacaatggaagtgacagtgacagtgacagtgaaggcagtgacagtaaccactcaaccagtgatgattagaacaaaagaaaaacccgtaagattccttttgtgaaaagtttggtaatgggataggaaaaaaagatttccaagaaagtaaagaaaggggagaaataaacataagacgtatgtaaacaaaaacaactgggggaatcaaatcaaacagttggattcagaaccaagacctaactcctgcagagacagactctgaatgcatgacctttggtacatgcctgttaatattcatgttctgaaaatattttgttaaaagtgtaaatctaaacataaaagaacaattaaaatattctttaatacttcacacagaa

SEQ ID NO: 126306 - DNA, 2716 bp, Homo sapiens
  Payload ID: 4770
  Gene Symbol: DCK
  Gene Name: deoxycytidine kinase
  Uniprot ID: P27707
  ENST ID: ENST00000286648
  CDS Start-End: 398-1180
acccgactccggaacctcttcccgcgccctgcccgggcgcctggctgcttggggtagaggccttccgccacacgcgcggccccgccccggccttcacgtgacctggcgtgcggagcgcgcacgcgggaacccgcgctggaggcgggcgagggccgaggggcagctagggagcgcggcttgaggagggcggggccgccccgcaggcccgccagtgtcctcagctgcctccgcgcgccaaagtcaaaccccgacacccgccggcgggccggtgagctcactagctgacccggcaggtcaggatctggcttagcggcgccgcgagctccagtgcgcgcacccgtggccgcctcccagccctctttgccggacgagctctgggccgccacaagactaaggaatggccaccccgcccaagagaagctgcccgtctttctcagccagctctgaggggacccgcatcaagaaaatctccatcgaagggaacatcgctgcagggaagtcaacatttgtgaatatccttaaacaattgtgtgaagattgggaagtggttcctgaacctgttgccagatggtgcaatgttcaaagtactcaagatgaatttgaggaacttacaatgtctcagaaaaatggtgggaatgttcttcagatgatgtatgagaaacctgaacgatggtcttttaccttccaaacatatgcctgtctcagtcgaataagagctcagcttgcctctctgaatggcaagctcaaagatgcagagaaacctgtattattttttgaacgatctgtgtatagtgacaggtatatttttgcatctaatttgtatgaatctgaatgcatgaatgagacagagtggacaatttatcaagactggcatgactggatgaataaccaatttggccaaagccttgaattggatggaatcatttatcttcaagccactccagagacatgcttacatagaatatatttacggggaagaaatgaagagcaaggcattcctcttgaatatttagagaagcttcattataaacatgaaagctggctcctgcataggacactgaaaaccaacttcgattatcttcaagaggtgcctatcttaacactggatgttaatgaagactttaaagacaaatatgaaagtctggttgaaaaggtcaaagagtttttgagtactttgtgatcttgctgaagactacaggcagccaaatggttccagatacttcagctttgtgtatcttcgtaacttcatattaatataagtttctttagaaaacccaagtttttaatcgtttttgttttaaggaaaaaagatttttaaaatgaatcttatgcaaaactttttgaccagtttcttttcttttgttttttttttaaaaaagacatttaaagacaaagacattatttctcatagcaggaaatgtagaggtagatggttccagtatcagcatagtgactaaactacattataaaagatccagcttccttctgtcattcccctcttttgtcttcctcagcaggttggcttttttccctggtgcctctcacttcgttggtgaccagtttcttaaactgaaagctttaatgttacatagtaaatggtagtgtgtcctgtgtaaattagtgtacctattaaaagttgcaaagtggaattaaaggaatccctagaataaggattctgaagttttattttaaattattatcttcttaacagtttagtcccacctcttacttcctgcctcagtctgctttctctactgtctggattaattaggcagcctgctataaagttaaagtcacacatttctattttgcaaacactgtgattactctttgctttgtagtttgctttgctttgtagggttctgcttttaagtttttctctttttcagacaaattactgataaaaatgatattgctctatatgtaatatatcctgaaagcattattttttgttgaataggaaataaaattaatgaagacagaggctagaaagcatccattaattaatgagacacacttaactacttatctctaaaccatctatgtgaatatttgtaaaaataatgaatggactcatcttagttctgtatataaatatattttctttctagtttgtttagttaaggtgtgcagtgtttttcctgtgtattaaacctttccattttacgttttagaaaattttatgtattttaaaataaggggaagagtcattttcacttttaaactactatttttctttccaagtcatttttgtttttggtttcttattcaaagatgataatttagtggattaaccagtccagacgcactgatctttgcaaaggagacttaatttcaaatctgtaattaccatacataaactgtctcattatacgtatgcatttttttagtttgtttttgtttggtataaattaatttgttaattaaatatttcttaagtataaaccttatgaactacagtggagctacactcattgaaatgtaatttcagttctaaaaagatgtaataatcattttagaattaaaatttattctacttttaaataaattatgaatattaaaggtgaaaattgtataaattactttgattccattttaagtggagacatatttcagtgatttttagtaacctttaaaaatgtataatgacttttaaaatttgtagaattgaaaagacgctaataaaaatttattatttatttgtcatgactcaaaa

SEQ ID NO: 126307 - DNA, 2614 bp, Homo sapiens
  Payload ID: 4770
  Gene Symbol: DCK
  Gene Name: deoxycytidine kinase
  ENST ID: ENST00000504952
  CDS Start-End: 199-1152
gcaggcccgccagtgtcctcagctgcctccgcgcgccaaagtcaaaccccgacacccgccggcgggccggtgagctcactagctgacccggcaggtcaggatctggcttagcggcgccgcgagctccagtgcgcgcacccgtggccgcctcccagccctctttgccggacgagctctgggccgccacaagactaaggaatggccaccccgcccaagagaagctgcccgtctttctcagccagctctgaggggacccgcatcaagaaaatctccatcgaagggaacatcgctgcagggaagtcaacatttgtgaatatccttaaacaattgtgtgaagattgggaagtggttcctgaacctgttgccagatggtgcaatgttcaaagtactcaagatgaatttgaggaacttacaatgtctcagaaaaatggtgggaatgttcttcagatgatgtatgagaaacctgaacgatggtcttttaccttccaaacatatgcctgtctcagtcgaataagagctcagcttgcctctctgaatggcaagctcaaagatgcagagaaacctgtattattttttgaacgatctgtgtatagtgacaggtatatttttgcatctaatttgtatgaatctgaatgcatgaatgagacagagtggacaatttatcaagactggcatgactggatgaataaccaatttggccaaagccttgaattggatggaatcatttatcttcaagccactccagagacatgcttacatagaatatatttacggggaagaaatgaagagcaaggcattcctcttgaatatttagagaagcttcattataaacatgaaagctggctcctgcataggacactgaaaaccaacttcgattatcttcaagaggtgcctatcttaacactggatgttaatgaagactttaaagacaaatatgaaagtctggttgaaaagtcttgctccgtcgcccaggctggagtgcaatggcacaatcttggctcactgccatctccacctcccaggttcaaccagttctgcctcagcctcctaagtcaaagagtttttgagtactttgtgatcttgctgaagactacaggcagccaaatggttccagatacttcagctttgtgtatcttcgtaacttcatattaatataagtttctttagaaaacccaagtttttaatcgtttttgttttaaggaaaaaagatttttaaaatgaatcttatgcaaaactttttgaccagtttcttttcttttgttttttttttaaaaaagacatttaaagacaaagacattatttctcatagcaggaaatgtagaggtagatggttccagtatcagcatagtgactaaactacattataaaagatccagcttccttctgtcattcccctcttttgtcttcctcagcaggttggcttttttccctggtgcctctcacttcgttggtgaccagtttcttaaactgaaagctttaatgttacatagtaaatggtagtgtgtcctgtgtaaattagtgtacctattaaaagttgcaaagtggaattaaaggaatccctagaataaggattctgaagttttattttaaattattatcttcttaacagtttagtcccacctcttacttcctgcctcagtctgctttctctactgtctggattaattaggcagcctgctataaagttaaagtcacacatttctattttgcaaacactgtgattactctttgctttgtagtttgctttgctttgtagggttctgcttttaagtttttctctttttcagacaaattactgataaaaatgatattgctctatatgtaatatatcctgaaagcattattttttgttgaataggaaataaaattaatgaagacagaggctagaaagcatccattaattaatgagacacacttaactacttatctctaaaccatctatgtgaatatttgtaaaaataatgaatggactcatcttagttctgtatataaatatattttctttctagtttgtttagttaaggtgtgcagtgtttttcctgtgtattaaacctttccattttacgttttagaaaattttatgtattttaaaataaggggaagagtcattttcacttttaaactactatttttctttccaagtcatttttgtttttggtttcttattcaaagatgataatttagtggattaaccagtccagacgcactgatctttgcaaaggagacttaatttcaaatctgtaattaccatacataaactgtctcattatacgtatgcatttttttagtttgtttttgtttggtataaattaatttgttaattaaatatttcttaagtataaaccttatgaactacagtggagctacactcattgaaatgtaatttcagttctaaaaagatgtaataatcattttagaattaaaatttattctacttttaaataaattatgaatattaaaggtgaaaattgtataaattactttgattccattttaagtggagacatatttcagtgatttttagtaacctttaaaaatgtataatgacttttaaaatttgtagaattgaaaagacgctaataaaaatttattatttatttgtcatgactcaaaa

SEQ ID NO: 126308 - DNA, 428 bp, Homo sapiens
  Payload ID: 4770
  Gene Symbol: DCK
  Gene Name: deoxycytidine kinase
  ENST ID: ENST00000509617
  CDS Start-End: 384-428
gaggacaatcagaggcgatgtggaaacttctgtcttgtaatcacaggagtgaaggtgtcgggcaggctgagttaacagctgaacagaaacctacctacccaacgtgctaacttctatacagcatggtcgtgcatccaaatcaaatggaaagcggtatgggagatctggaaaggcctcctgtgggtggcatctgactacctaaattcccatcccagtttcacttactgactttgacacttggaacaagcagcctctcagtgcctgttttcccactggcaggtcaggatctggcttagcggcgccgcgagctccagtgcgcgcacccgtggccgcctcccagccctctttgccggacgagctctgggccgccacaagactaaggaatggccaccccgcccaagagaagctgcccgtctttctcagccagc

SEQ ID NO: 126309 - DNA, 2401 bp, Homo sapiens
  Payload ID: 4770
  Gene Symbol: DCK
  Gene Name: deoxycytidine kinase
  ENST ID: ENST00000504730
  CDS Start-End: 199-798
gcaggcccgccagtgtcctcagctgcctccgcgcgccaaagtcaaaccccgacacccgccggcgggccggtgagctcactagctgacccggcaggtcaggatctggcttagcggcgccgcgagctccagtgcgcgcacccgtggccgcctcccagccctctttgccggacgagctctgggccgccacaagactaaggaatggccaccccgcccaagagaagctgcccgtctttctcagccagctctgaggggacccgcatcaagaaaatctccatcgaagggaacatcgctgcagggaagtcaacatttgtgaatatccttaaacaattgtgtgaagattgggaagtggttcctgaacctgttgccagatggtgcaatgttcaaagtactcaagatgaatttgaggaacttacaatgtctcagaaaaatggtgggaatgttcttcagatgatgtatgagaaacctgaacgatggtcttttaccttccaaacatatgcctgtctcagtcgaataagagctcagcttgcctctctgaatggcaagctcaaagatgcagagaaacctgtattattttttgaacgatctgtgtatagtgacaggtatatttttgcatctaatttgtatgaatctgaatgcatgaatgagacagagtggacaatttatcaagactggcatgactggatgaataaccaatttggccaaagccttgaattggatggaatcatttatcttcaagccactccagagaaccaacttcgattatcttcaagaggtgcctatcttaacactggatgttaatgaagactttaaagacaaatatgaaagtctggttgaaaaggtcaaagagtttttgagtactttgtgatcttgctgaagactacaggcagccaaatggttccagatacttcagctttgtgtatcttcgtaacttcatattaatataagtttctttagaaaacccaagtttttaatcgtttttgttttaaggaaaaaagatttttaaaatgaatcttatgcaaaactttttgaccagtttcttttcttttgttttttttttaaaaaagacatttaaagacaaagacattatttctcatagcaggaaatgtagaggtagatggttccagtatcagcatagtgactaaactacattataaaagatccagcttccttctgtcattcccctcttttgtcttcctcagcaggttggcttttttccctggtgcctctcacttcgttggtgaccagtttcttaaactgaaagctttaatgttacatagtaaatggtagtgtgtcctgtgtaaattagtgtacctattaaaagttgcaaagtggaattaaaggaatccctagaataaggattctgaagttttattttaaattattatcttcttaacagtttagtcccacctcttacttcctgcctcagtctgctttctctactgtctggattaattaggcagcctgctataaagttaaagtcacacatttctattttgcaaacactgtgattactctttgctttgtagtttgctttgctttgtagggttctgcttttaagtttttctctttttcagacaaattactgataaaaatgatattgctctatatgtaatatatcctgaaagcattattttttgttgaataggaaataaaattaatgaagacagaggctagaaagcatccattaattaatgagacacacttaactacttatctctaaaccatctatgtgaatatttgtaaaaataatgaatggactcatcttagttctgtatataaatatattttctttctagtttgtttagttaaggtgtgcagtgtttttcctgtgtattaaacctttccattttacgttttagaaaattttatgtattttaaaataaggggaagagtcattttcacttttaaactactatttttctttccaagtcatttttgtttttggtttcttattcaaagatgataatttagtggattaaccagtccagacgcactgatctttgcaaaggagacttaatttcaaatctgtaattaccatacataaactgtctcattatacgtatgcatttttttagtttgtttttgtttggtataaattaatttgttaattaaatatttcttaagtataaaccttatgaactacagtggagctacactcattgaaatgtaatttcagttctaaaaagatgtaataatcattttagaattaaaatttattctacttttaaataaattatgaatattaaaggtgaaaattgtataaattactttgattccattttaagtggagacatatttcagtgatttttagtaacctttaaaaatgtataatgacttttaaaatttgtagaattgaaaagacgctaataaaaatttattatttatttgtcatgactcaaaa

SEQ ID NO: 126310 - DNA, 2683 bp, Homo sapiens
  Payload ID: 4770
  Gene Symbol: DCK
  Gene Name: deoxycytidine kinase
  ENST ID: ENST00000503359
  CDS Start-End: 274-420
gggaacccgcgctggaggcgggcgagggccgaggggcagctagggagcgcggcttgaggagggcggggccgccccgcaggcccgccagtgtcctcagctgcctccgcgcgccaaagtcaaaccccgacacccgccggcgggccggtgagctcactagctgacccggcaggtcaggatctggcttagcggcgccgcgagctccagtgcgcgcacccgtggccgcctcccagccctctttgccggacgagctctgggccgccacaagactaaggaatggccaccccgcccaagagaagctgcccgtctttctcagccagctctgaggggacccgcatcaagaaaatctccatcgaagggaacatcggtaaggagcctccggaaatgtgggacgcaaggctggggtgtcgcggcagtggctgaagcttcccttcgccgcatctctctgcagcaactcgctgcagggaagtcaacatttgtgaatatccttaaacaattgtgtgaagattgggaagtggttcctgaacctgttgccagatggtgcaatgttcaaagtactcaagatgaatttgaggaacttacaatgtctcagaaaaatggtgggaatgttcttcagatgatgtatgagaaacctgaacgatggtcttttaccttccaaacatatgcctgtctcagtcgaataagagctcagcttgcctctctgaatggcaagctcaaagatgcagagaaacctgtattattttttgaacgatctgtgtatagtgacaggtatatttttgcatctaatttgtatgaatctgaatgcatgaatgagacagagtggacaatttatcaagactggcatgactggatgaataaccaatttggccaaagccttgaattggatggaatcatttatcttcaagccactccagagacatgcttacatagaatatatttacggggaagaaatgaagagcaaggcattcctcttgaatatttagagaagcttcattataaacatgaaagctggctcctgcataggacactgaaaaccaacttcgattatcttcaagaggtgcctatcttaacactggatgttaatgaagactttaaagacaaatatgaaagtctggttgaaaaggtcaaagagtttttgagtactttgtgatcttgctgaagactacaggcagccaaatggttccagatacttcagctttgtgtatcttcgtaacttcatattaatataagtttctttagaaaacccaagtttttaatcgtttttgttttaaggaaaaaagatttttaaaatgaatcttatgcaaaactttttgaccagtttcttttcttttgttttttttttaaaaaagacatttaaagacaaagacattatttctcatagcaggaaatgtagaggtagatggttccagtatcagcatagtgactaaactacattataaaagatccagcttccttctgtcattcccctcttttgtcttcctcagcaggttggcttttttccctggtgcctctcacttcgttggtgaccagtttcttaaactgaaagctttaatgttacatagtaaatggtagtgtgtcctgtgtaaattagtgtacctattaaaagttgcaaagtggaattaaaggaatccctagaataaggattctgaagttttattttaaattattatcttcttaacagtttagtcccacctcttacttcctgcctcagtctgctttctctactgtctggattaattaggcagcctgctataaagttaaagtcacacatttctattttgcaaacactgtgattactctttgctttgtagtttgctttgctttgtagggttctgcttttaagtttttctctttttcagacaaattactgataaaaatgatattgctctatatgtaatatatcctgaaagcattattttttgttgaataggaaataaaattaatgaagacagaggctagaaagcatccattaattaatgagacacacttaactacttatctctaaaccatctatgtgaatatttgtaaaaataatgaatggactcatcttagttctgtatataaatatattttctttctagtttgtttagttaaggtgtgcagtgtttttcctgtgtattaaacctttccattttacgttttagaaaattttatgtattttaaaataaggggaagagtcattttcacttttaaactactatttttctttccaagtcatttttgtttttggtttcttattcaaagatgataatttagtggattaaccagtccagacgcactgatctttgcaaaggagacttaatttcaaatctgtaattaccatacataaactgtctcattatacgtatgcatttttttagtttgtttttgtttggtataaattaatttgttaattaaatatttcttaagtataaaccttatgaactacagtggagctacactcattgaaatgtaatttcagttctaaaaagatgtaataatcattttagaattaaaatttattctacttttaaataaattatgaatattaaaggtgaaaattgtataaattactttgattccattttaagtggagacatatttcagtgatttttagtaacctttaaaaatgtataatgacttttaaaatttgtagaattgaaaagacgctaataaaaatttattatttatttgtcatgactcaaaa

SEQ ID NO: 126311 - DNA, 1144 bp, Homo sapiens
  Payload ID: 4771
  Gene Symbol: DGUOK
  Gene Name: deoxyguanosine kinase
  Uniprot ID: Q16854
  ENST ID: ENST00000264093
  CDS Start-End: 86-919
aacggtgcgctggagcgagtgagcagcgatacctagggcggaagtgctctcggcggaagtgatcgctgtgtgaatcgtgggtgggatggccgcgggccgcctctttctaagtcggcttcgagcacccttcagttccatggccaagagcccactcgagggcgtttcctcctccagaggcctgcacgcggggcgcgggccccgaaggctctccatcgaaggcaacattgctgtgggaaagtccacgtttgtgaagttactcacgaaaacttacccagaatggcacgtagctacagaacctgtagcaacatggcagaatatccaggctgctggcacccaaaaagcctgcactgcccaaagtcttggaaacttgctggatatgatgtaccgggagccagcacgatggtcctacacattccagacattttcctttttgagccgcctgaaagtacagctggagcccttccctgagaaactcttacaggccaggaagccagtacagatctttgagaggtctgtgtacagtgacaggtatatctttgcaaagaatctttttgaaaatggttccctcagtgacatcgagtggcatatctatcaggactggcattcttttctcctgtgggagtttgccagccggatcacattacatggcttcatctacctccaggcttctccccaggtttgtttgaagagactgtaccagagggccagggaggaggagaaaggaattgagctggcctatctagagcagctgcatggccaacacgaagcctggcttattcacaagacaacgaagctccactttgaggctctgatgaacattccagtgctggtgttggatgtcaatgatgatttttctgaggaagtaaccaaacaagaagacctcatgagagaggtaaacacctttgtaaagaatctgtaaccaataccatgaagttcaggctgtgatctgggctccctgactttctgaagctagaaaaatgttgtgtctcccaaccacctttccatccccagcccctctcatccctggagcactctgccgctcaagagctggtttgttaattattgttagactttgccattgttttcttttgtacctgaagcattttgaaaataaagtttacttaagttatgcttgtttttctaa

SEQ ID NO: 126312 - DNA, 880 bp, Homo sapiens
  Payload ID: 4771
  Gene Symbol: DGUOK
  Gene Name: deoxyguanosine kinase
  Uniprot ID: Q16854
  ENST ID: ENST00000348222
  CDS Start-End: 86-655
aacggtgcgctggagcgagtgagcagcgatacctagggcggaagtgctctcggcggaagtgatcgctgtgtgaatcgtgggtgggatggccgcgggccgcctctttctaagtcggcttcgagcacccttcagttccatggccaagagcccactcgagggcgtttcctcctccagaggcctgcacgcggggcgcgggccccgaaggctctccatcgaaggcaacattgctgtgggaaagtccacgtttgtgaagttactcacgaaaacttacccagaatggcacgtagctacagaacctgtagcaacatggcagaatatccaggctgctggcacccaaaaagcctgcactgcccaaagtcttggaaacttgctggatatgatgtaccgggagccagcacgatggtcctacacattccagacattttcctttttgagccgcctgaaagtacagctggagcccttccctgagaaactcttacaggccaggaagccagtacagatctttgagaggtctgtgtacagtgacaggctccactttgaggctctgatgaacattccagtgctggtgttggatgtcaatgatgatttttctgaggaagtaaccaaacaagaagacctcatgagagaggtaaacacctttgtaaagaatctgtaaccaataccatgaagttcaggctgtgatctgggctccctgactttctgaagctagaaaaatgttgtgtctcccaaccacctttccatccccagcccctctcatccctggagcactctgccgctcaagagctggtttgttaattattgttagactttgccattgttttcttttgtacctgaagcattttgaaaataaagtttacttaagttatgcttgtttttctaa

SEQ ID NO: 126313 - DNA, 703 bp, Homo sapiens
  Payload ID: 4771
  Gene Symbol: DGUOK
  Gene Name: deoxyguanosine kinase
  Uniprot ID: Q16854
  ENST ID: ENST00000418996
  CDS Start-End: 37-306
tcggcggaagtgatcgctgtgtgaatcgtgggtgggatggccgcgggccgcctctttctaagtcggcttcgagcacccttcagttccatggccaagagcccactcgagggcgtttcctcctccagaggcctgcacgcggggcgcgggccccgaaggctctccatcgaaggcaacattggcctgcactgcccaaagtcttggaaacttgctggatatgatgtaccgggagccagcacgatggtcctacacattccagacattttcctttttgagccgcctgaaagtacagctggagcccttccctgagaaactcttacaggccaggaagccagtacagatctttgagaggtctgtgtacagtgacaggctccactttgaggctctgatgaacattccagtgctggtgttggatgtcaatgatgatttttctgaggaagtaaccaaacaagaagacctcatgagagaggtaaacacctttgtaaagaatctgtaaccaataccatgaagttcaggctgtgatctgggctccctgactttctgaagctagaaaaatgttgtgtctcccaaccacctttccatccccagcccctctcatccctggagcactctgccgctcaagagctggtttgttaattattgttagactttgccattgttttcttttgtacctgaagcattttgaaaataaagtttacttaagtta

SEQ ID NO: 126314 - DNA, 1029 bp, Homo sapiens
  Payload ID: 4771
  Gene Symbol: DGUOK
  Gene Name: deoxyguanosine kinase
  Uniprot ID: Q16854
  ENST ID: ENST00000629438
  CDS Start-End: 86-355
aacggtgcgctggagcgagtgagcagcgatacctagggcggaagtgctctcggcggaagtgatcgctgtgtgaatcgtgggtgggatggccgcgggccgcctctttctaagtcggcttcgagcacccttcagttccatggccaagagcccactcgagggcgtttcctcctccagaggcctgcacgcggggcgcgggccccgaaggctctccatcgaaggcaacattggcctgcactgcccaaagtcttggaaacttgctggatatgatgtaccgggagccagcacgatggtcctacacattccagacattttcctttttgagccgcctgaaagtacagctggagcccttccctgagaaactcttacaggccaggaagccagtacagatctttgagaggtctgtgtacagtgacaggtatatctttgcaaagaatctttttgaaaatggttccctcagtgacatcgagtggcatatctatcaggactggcattcttttctcctgtgggagtttgccagccggatcacattacatggcttcatctacctccaggcttctccccaggtttgtttgaagagactgtaccagagggccagggaggaggagaaaggaattgagctggcctatctagagcagctgcatggccaacacgaagcctggcttattcacaagacaacgaagctccactttgaggctctgatgaacattccagtgctggtgttggatgtcaatgatgatttttctgaggaagtaaccaaacaagaagacctcatgagagaggtaaacacctttgtaaagaatctgtaaccaataccatgaagttcaggctgtgatctgggctccctgactttctgaagctagaaaaatgttgtgtctcccaaccacctttccatccccagcccctctcatccctggagcactctgccgctcaagagctggtttgttaattattgttagactttgccattgttttcttttgtacctgaagcattttgaaaataaagtttacttaagttatgcttgtttttct

SEQ ID NO: 126315 - DNA, 1757 bp, Homo sapiens
  Payload ID: 4772
  Gene Symbol: DOHH
  Gene Name: deoxyhypusine hydroxylase/monooxygenase
  Uniprot ID: Q9BU89
  ENST ID: ENST00000250937
  CDS Start-End: 178-1086
gcggcaggtgaagcggtggtggcagaggcgcctgcggttactggccgggccgacgggtcctgagtctccagagctcggtgaggcgtcccggaggcggcgatcacggttcttacatccccgcgtccccaggtttagcctgagcagggttgtggaaggccgggacccattgacagcacgatggtgacggagcaggaggtggatgccatcgggcagacgctggtggaccccaagcagcccctgcaggcccgcttccgggcgctgttcacgctgcgtgggctcggcggcccaggcgccattgcatggatcagccaggccttcgatgacgattccgccctgctcaagcacgagctggcctactgcctgggccagatgcaggatgcccgcgccatccccatgctggtggacgtgctgcaagacacccgtcaggagcccatggtgcgccatgaggcaggggaggccctgggggccatcggggacccggaagttctggagatcctgaagcagtattcctcggaccccgtcatcgaggtggccgagacctgccagctggccgtgcgcaggctggagtggctgcagcagcacggcggggagccggcggcgggaccctacctctccgtggaccctgccccgccggctgaggagcgtgacgtggggcgcctgcgggaggcgctgctggatgagtcccggccgctcttcgagcgataccgcgccatgttcgccctgcgcaacgcgggaggcgaggaggccgccctggcgctggccgagggtctgcactgtgggagcgccctcttccgccacgaggtcggctacgtcctgggacagctgcagcacgaggcggcggtgccccagctggcggccgccctggcccgatgcaccgagaaccccatggtgcggcacgagtgcgcggaggccctgggcgccattgcccggcccgcctgcctggccgcgctgcaggctcacgcggacgacccagagcgcgtggtgcgtgagagctgcgaggtggctctggacatgtatgagcacgagaccgggcgggccttccagtacgcggacggcctggagcagctgcgcggggccccctcctagggccccaccctcacccggagctcccggaggactcttgagggccgctcctcccccgcagagctttggcgtctaaaccgggtgtgtgtaaatcggtgtcatcgcttgtgtcttgctgggcgcatggttgctgtccccctcctccgtctgggaccgaggagctgccgttgtgctgtgactccctgagtcccctgactgctcctcggggcctggcgcagggctgtagcgtggaagtttccaggcttggggtgggactctgcgggaggctctgggatgcccggctcaggacaggggaggattgcgagggaagccaggggaggatcgcgagggaagccaggggaggatcgcgagggaagccaggggaggatcgcgagggaagccaggggaggatcgcgagggaagccaagggaggatcgcgaggggagccaggggaggatcgcgagggaagccaggggcagagctggggctctgggaagaggctgacgttatggtggcttcagcttcactaggaatgggacacagggtctgggggcctctgactcccccaccccgaggcctgggtagggacagggtggtggtccctgagtgggtcaggtagggcacaggggccagggagggacaagcagacctcagagcgctgcccagatggaatattaaattatttttgccaagca

SEQ ID NO: 126316 - DNA, 2031 bp, Homo sapiens
  Payload ID: 4772
  Gene Symbol: DOHH
  Gene Name: deoxyhypusine hydroxylase/monooxygenase
  Uniprot ID: Q9BU89
  ENST ID: ENST00000427575
  CDS Start-End: 453-1361
agccagcccaggcagggcgctgaatcggcacaaaccagtctcacttcttgtaccgcagtggggaggttggagagaattttttcccatgaaagggcatacgttgcccgtccccttccccgaagaacgcactaggaatactgttcctgcgtttgcatgagctgtggcaccagcaccgactcagccttccgggcctccctcatgcacggagcctctcactaggtctcacccgcggctgcgttggtgccgtccggcacggtcacgtgggcgagaaaatggcggcccccagaccgcactgcgggcgtcgcggcaggtgaagcggtggtggcagaggcgcctgcggttactggccgggccgacgggtcctgagtctccagagctcggttcttacatccccgcgtccccaggtttagcctgagcagggttgtggaaggccgggacccattgacagcacgatggtgacggagcaggaggtggatgccatcgggcagacgctggtggaccccaagcagcccctgcaggcccgcttccgggcgctgttcacgctgcgtgggctcggcggcccaggcgccattgcatggatcagccaggccttcgatgacgattccgccctgctcaagcacgagctggcctactgcctgggccagatgcaggatgcccgcgccatccccatgctggtggacgtgctgcaagacacccgtcaggagcccatggtgcgccatgaggcaggggaggccctgggggccatcggggacccggaagttctggagatcctgaagcagtattcctcggaccccgtcatcgaggtggccgagacctgccagctggccgtgcgcaggctggagtggctgcagcagcacggcggggagccggcggcgggaccctacctctccgtggaccctgccccgccggctgaggagcgtgacgtggggcgcctgcgggaggcgctgctggatgagtcccggccgctcttcgagcgataccgcgccatgttcgccctgcgcaacgcgggaggcgaggaggccgccctggcgctggccgagggtctgcactgtgggagcgccctcttccgccacgaggtcggctacgtcctgggacagctgcagcacgaggcggcggtgccccagctggcggccgccctggcccgatgcaccgagaaccccatggtgcggcacgagtgcgcggaggccctgggcgccattgcccggcccgcctgcctggccgcgctgcaggctcacgcggacgacccagagcgcgtggtgcgtgagagctgcgaggtggctctggacatgtatgagcacgagaccgggcgggccttccagtacgcggacggcctggagcagctgcgcggggccccctcctagggccccaccctcacccggagctcccggaggactcttgagggccgctcctcccccgcagagctttggcgtctaaaccgggtgtgtgtaaatcggtgtcatcgcttgtgtcttgctgggcgcatggttgctgtccccctcctccgtctgggaccgaggagctgccgttgtgctgtgactccctgagtcccctgactgctcctcggggcctggcgcagggctgtagcgtggaagtttccaggcttggggtgggactctgcgggaggctctgggatgcccggctcaggacaggggaggattgcgagggaagccaggggaggatcgcgagggaagccaggggaggatcgcgagggaagccaggggaggatcgcgagggaagccaggggaggatcgcgagggaagccaagggaggatcgcgaggggagccaggggaggatcgcgagggaagccaggggcagagctggggctctgggaagaggctgacgttatggtggcttcagcttcactaggaatgggacacagggtctgggggcctctgactcccccaccccgaggcctgggtagggacagggtggtggtccctgagtgggtcaggtagggcacaggggccagggagggacaagcagacctcagagcgctgcccagatggaatattaaattatttttgccaagc

SEQ ID NO: 126317 - DNA, 1095 bp, Homo sapiens
  Payload ID: 4772
  Gene Symbol: DOHH
  Gene Name: deoxyhypusine hydroxylase/monooxygenase
  ENST ID: ENST00000592858
  CDS Start-End: 426-1095
gcacaaaccagtctcacttcttgtaccgcagtggggaggttggagagaattttttcccatgaaagggcatacgttgcccgtccccttccccgaagaacgcactaggaatactgttcctgcgtttgcatgagctgtggcaccagcaccgactcagccttccgggcctccctcatgcacggagcctctcactaggtctcacccgcggctgcgttggtgccgtccggcacggtcacgtgggcgagaaaatggcggcccccagaccgcactgcgggcgtcgcggcaggtgaagcggtggtggcagaggcgcctgcggttactggccgggccgacgggtcctgagtctccagagctcggttcttacatccccgcgtccccaggtttagcctgagcagggttgtggaaggccgggacccattgacagcacgatggtgacggagcaggaggtggatgccatcgggcagacgctggtggaccccaagcagcccctgcaggcccgcttccgggcgctgttcacgctgcgtgggctcggcggcccaggcgccattgcatggatcagccaggccttcgatgacgattccgccctgctcaagcacgagctggcctactgcctgggccagatgcaggatgcccgcgccatccccatgctggtggacgtgctgcaagacacccgtcaggagcccatggtgcgccatgaggcaggggaggccctgggggccatcggggacccggaagttctggagatcctgaagcagtattcctcggaccccgtcatcgaggtggccgagacctgccagctggccgtgcgcaggctggagtggctgcagcagcacggcggggagccggcggcgggaccctacctctccgtggaccctgccccgccggctgaggagcgtgacgtggggcgcctgcgggaggcgctgctggatgagtcccggccgctcttcgagcgataccgcgccatgttcgccctgcgcaacgcgggaggcgaggaggccgccctggcgctggccgagggtctgcactgtgggagcgccctcttccgccacgaggtcggctacgtcctgggacagctgcagcacgaggcggcggtgcccc

SEQ ID NO: 126318 - DNA, 703 bp, Homo sapiens
  Payload ID: 4772
  Gene Symbol: DOHH
  Gene Name: deoxyhypusine hydroxylase/monooxygenase
  ENST ID: ENST00000587122
  CDS Start-End: 1-586
cgattccgccctgctcaagcacgagctggcctactgcctgggccagatgcaggatgcccgcgccatccccatgctggtggacgtgctgcaagacacccgtcaggagcccatggtgcgccatgaggcaggggaggccctgggggccatcggggacccggaagttctggagatcctgaagcagtattcctcggaccccgtcatcgaggtggccgagacctgccagctggccgtgcgcaggctggagtggctgcagcagcacggcggggagccggcggcgggaccctacctctccgtggaccctgccccgccggctgaggagcgtgacgtggggcgcctgcgggaggcgctgctggatgagtcccggccgctcttcgagcgataccgcgccatgttcgccctgcgcaacgcgggaggcgaggaggccgccctggcgctggccgagggtgaggaggggcttctggggtggggtcctgggcagtgcctcgctgtgaggttcagtgatggcatctgtgcagtggggccgcggcctgcccccgggaacggcatcccgggcctggccccaagcatttcccatggggcctcttaagaacccgtgcaagcgtccctcttggtccccatagctcccagcttttcccgcccccatagctgcggtcagttcccccgggcatccctaatcactggggctgggggcaggggtgtcttc

SEQ ID NO: 126319 - DNA, 1363 bp, Homo sapiens
  Payload ID: 4773
  Gene Symbol: DHPS
  Gene Name: deoxyhypusine synthase
  Uniprot ID: P49366
  ENST ID: ENST00000210060
  CDS Start-End: 137-1246
tccggtctttcgcccaaagcacgttccctacttcctgtgctcttgcggagacgcgcgcgtcggggtttaacgcgtttctgggccgccgtaagcccggcctaggggcagctttgactcgagagccggctataggcgcatggaaggttccctggaacgggaggcgccagcgggggcgctggccgccgtgctaaagcacagctcgacgttgccgcccgaaagcacccaggtccggggctacgacttcaaccgcggtgtgaattaccgcgcactgctggaggccttcggcaccaccggcttccaagcaaccaacttcgggcgcgctgtacagcaagtcaatgccatgatcgagaagaagctggaaccactgtcacaggatgaagaccagcacgcggacctgacccagagccgccgcccacttaccagctgcaccattttcctgggatatacatccaacctcatcagttcaggcatccgtgagaccattcgctaccttgtgcagcacaacatggtggacgtattggtgaccacagctggcggcgtggaggaagacctcatcaagtgcctggcgcccacatacttgggcgagtttagcctcagggggaaggagctccgggagaacgggatcaataggatcggaaacctgctggtgcccaatgagaattactgcaagtttgaggactggctgatgcccattctggaccagatggtgatggagcagaacacagagggtgtaaagtggacgccttctaagatgatcgcccggctgggcaaggagatcaacaacccagagtccgtgtattactgggcccagaagaaccacatccctgtgtttagtcccgcacttacagacggctcgctgggcgacatgatcttcttccattcctacaagaacccgggcctggtcctggacatcgttgaggacctgaggctcatcaacacacaggccatctttgccaagtgcactgggatgatcattctgggcgggggcgtggtcaagcaccacattgccaatgccaacctcatgcggaacggggccgactacgctgtttacatcaacacagcccaggagtttgatggctctgactcaggtgcccgaccagacgaggctgtctcctggggcaagatccgggtggatgcacagcccgtcaaggtctatgctgacgcctccctggtcttccccctgcttgtggctgaaacctttgcccagaagatggatgccttcatgcatgagaagaacgaggactgagcggctgcggtcccaggaaggtcttaccccctcttctatttattaatttgcagacccagcccctcccctactttttggtcagctacgtctctagaataagatggtatctgaagtcct

SEQ ID NO: 126320 - DNA, 1090 bp, Homo sapiens
  Payload ID: 4773
  Gene Symbol: DHPS
  Gene Name: deoxyhypusine synthase
  Uniprot ID: P49366
  ENST ID: ENST00000351660
  CDS Start-End: 6-974
ggcgcatggaaggttccctggaacgggaggcgccagcgggggcgctggccgccgtgctaaagcacagctcgacgttgccgcccgaaagcacccaggtccggggctacgacttcaaccgcggtgtgaattaccgcgcactgctggaggccttcggcaccaccggcttccaagcaaccaacttcgggcgcgctgtacagcaagtcaatgccatgatcgagaagaagctggaaccactgtcacaggatgaagaccagcacgcggacctgacccagagccgccgcccacttaccagctgcaccattttcctgggatatacatccaacctcatcagttcaggcatccgtgagaccattcgctaccttgtgcagcacaacatggtggacgtattggtgaccacagctggcggcgtggaggaagacctcatcaagtgcctggcgcccacatacttgggcgagtttagcctcagggggaaggagctccgggagaacgggatcaataggatcggaaacctgctggtgcccaatgagaattactgcaagtttgaggactggctgatgcccattctggaccagatggtgatggagcagaacacagagggtgtaaagtggacgccttctaagatgatcgcccggctgggcaaggagatcaacaacccagagtccgtgtattactgggcccagaagaaccacatccctgtgtttagtcccgcacttacagacggctcgctgggcgacatgatcttcttccattcctacaagaacccgggcctggtcctggacatcgttgaggcccaggagtttgatggctctgactcaggtgcccgaccagacgaggctgtctcctggggcaagatccgggtggatgcacagcccgtcaaggtctatgctgacgcctccctggtcttccccctgcttgtggctgaaacctttgcccagaagatggatgccttcatgcatgagaagaacgaggactgagcggctgcggtcccaggaaggtcttaccccctcttctatttattaatttgcagacccagcccctcccctactttttggtcagctacgtctctagaataagatggtatctgaagtcc

SEQ ID NO: 126321 - DNA, 603 bp, Homo sapiens
  Payload ID: 4773
  Gene Symbol: DHPS
  Gene Name: deoxyhypusine synthase
  ENST ID: ENST00000595100
  CDS Start-End: 73-471
gtttaacgcgtttctgggccgccgtaagcccggcctaggggcagctttgactcgagagccggctataggcgcatggaaggttccctggaacgggaggcgccagcgggggcgctggccgccgtgctaaagcacagctcgacgttgccgcccgaaagcacccaggtccggggctacgacttcaaccgcggtgtgaattaccgcgcactgctggaggccttcggcaccaccggcttccaagcaaccaacttcgggcgcgctgtacagcaagtcaatgccatgatcgagaagaagctggaaccactgtcacaggatgaagaccagcacgcggacctgacccagagccgccgcccacttaccagctgcaccattttcctgggatatacatccaacctcatcagttcaggcatccgtgagaccattcgctaccttgtgcagcacaacatggtggggacctggtggacgtattggtgaccacagctggcggcgtggaggaagacctcatcaagtgcctggcgcccacatacttgggcgagtttagcctcagggggaaggagctccgggagaacgggatcaataggatcggaaacctgctggtgcccaatg

SEQ ID NO: 126322 - DNA, 895 bp, Homo sapiens
  Payload ID: 4773
  Gene Symbol: DHPS
  Gene Name: deoxyhypusine synthase
  ENST ID: ENST00000595912
  CDS Start-End: 103-522
ctgtgctcttgcggagacgcgcgcgtcggggtttaacgcgtttctgggccgccgtaagcccggcctaggggcagctttgactcgagagccggctataggcgcatggaaggttccctggaacgggaggcgccagcgggggcgctggccgccgtgctaaagcacagctcgacgttgccgcccgaaagcacccaggtccggggctacgacttcaaccgcggtgtgaattaccgcgcactgctggaggccttcggcaccaccggcttccaagcaaccaacttcgggcgcgctgtacagcaagtcaatgccatgatcgagaagaagctggaaccactgtcacaggatgaagaccagcacgcggacctgacccagagccgccgcccacttaccagctgcaccattttcctgggatatacatccaacctcatcagttcaggcatccgtggacgtattggtgaccacagctggcggcgtggaggaagacctcatcaagtgcctggcgcccacatacttgggcgagtttagcctcagggggaaggagctccgggagaacgggatcaataggatcggaaacctgctggtgcccaatgagaattactgcaagtttgaggactggctgatgcccattctggaccagatggtgatggagcagaacacagagggtgtaaagtggacgccttctaagatgatcgcccggctgggcaaggagatcaacaacccagagtccgtgtattactgggcccagaagaaccacatccctgtgtttagtcccgcacttacagacggctcgctgggcgacatgatcttcttccattcctacaagaacccgggcctggtcctggacatcgttgaggacctgaggctcatcaacacacaggccatctttgccaagtgcact

SEQ ID NO: 126323 - DNA, 285 bp, Homo sapiens
  Payload ID: 4773
  Gene Symbol: DHPS
  Gene Name: deoxyhypusine synthase
  ENST ID: ENST00000600639
  CDS Start-End: 1-83
gaccagacgaggctgtctcctggggcaagatccgggtggatgcacagcccgtcaaggttcccccctacccaggtctatgctgacgcctccctggtcttccccctgcttgtggctgaaacctttgcccagaagatggatgccttcatgcatgagaagaacgaggactgagcggctgcggtcccaggaaggtcttaccccctcttctatttattaatttgcagacccagcccctcccctactttttggtcagctacgtctctagaataagatggtatctgaagtcct

SEQ ID NO: 126324 - DNA, 540 bp, Homo sapiens
  Payload ID: 4773
  Gene Symbol: DHPS
  Gene Name: deoxyhypusine synthase
  ENST ID: ENST00000593423
  CDS Start-End: 99-371
aatttagatttgcttttcccagcggggaagggaccggatctgaaaggagatgctctctgattcctaaaagggtgggggctggctgggcgcggtggcgcatgcctataatcccagcattttgggaagccgaggcgggtggatcaagagaagaggagttcgagacaagcctggccaacatgatcgagaagaagctggaaccactgtcacaggatgaagaccagcacgcggacctgacccagagccgccgcccacttaccagctgcaccattttcctgggatatacatccaacctcatcagttcaggcatccgtgagaccattcgctaccttgtgcagcacaacatggtggggacctggtggacgtattggtgaccacagctggcggcgtggaggaagacctcatcaagtgcctggcgcccacatacttgggcgagtttagcctcagggggaaggagctccgggagaacgggatcaataggatcggaaacctgctggtgcccaatgagaattactgcaagtttgaggactggctgatgcccat

SEQ ID NO: 126325 - DNA, 498 bp, Homo sapiens
  Payload ID: 4773
  Gene Symbol: DHPS
  Gene Name: deoxyhypusine synthase
  ENST ID: ENST00000600451
  CDS Start-End: 1-169
cgcggacctgacccagagccgccgcccacttaccagctgcaccattttcctgggatatacatccaacctcatcagttcaggcatccgtggacgtattggtgaccacagctggcggcgtggaggaagacctcatcaagtgcctggcgcccacatacttgggcgagtttagcctcagggggaaggagctccgggagaacgggatcaataggatcggaaacctgctggtgcccaatgagaattactgcaagtttgaggactggctgatgcccattctggaccagatggtgatggagcagaacacagagggtgtaaagtggacgccttctaagatgatcgcccggctgggcaaggagatcaacaacccagagtccgtgtattactgggcccagaagtcccgcacttacagacggctcgctgggcgacatgatcttcttccattcctacaagaacccgggcctggtcctggacatcgttgagggtgaggcgctagggccacag

SEQ ID NO: 126326 - DNA, 677 bp, Homo sapiens
  Payload ID: 4773
  Gene Symbol: DHPS
  Gene Name: deoxyhypusine synthase
  ENST ID: ENST00000598850
  CDS Start-End: 1-205
catgatcgagaagaagctggaaccactgtcacaggatgaagaccagcacgcggacctgacccagagccgccgcccacttaccagctgcaccattttcctgggatatacatccaacctcatcagttcaggcatccgtgagaccattcgctaccttgtgcagcacaacatgcagagctccctcataagagtcactggacaaggatgaggttagaagttctgcccagaatgagggcaggggcttccttcttgggccaaattcactgccttgtggctgcaggtggacgtattggtgaccacagctggcggcgtggaggaagacctcatcaagtgcctggcgcccacatacttgggcgagtttagcctcagggggaaggagctccgggagaacgggatcaataggatcggaaacctgctggtgcccaatgagaattactgcaagtttgaggactggctgatgcccattctggaccagatggtgatggagcagaacacagagggtgtaaagtggacgccttctaagatgatcgcccggctgggcaaggagatcaacaacccagagtccgtgtattactgggcccagaagaaccacatccctgtgtttagtcccgcacttacagacggctcgctgggcgacatgatcttcttccattcctacaagaacccgggcctggtcctgg

SEQ ID NO: 126327 - DNA, 553 bp, Homo sapiens
  Payload ID: 4773
  Gene Symbol: DHPS
  Gene Name: deoxyhypusine synthase
  ENST ID: ENST00000598246
  CDS Start-End: 1-478
gatgatcgcccggctgggcaaggagatcaacaacccagagtccgtgtattactgggcccagaagaaccacatccctgtgtttagtcccgcacttacagacggctcgctgggcgacatgatcttcttccattcctacaagaacccgggcctggtcctggacatcgttgaggacctgaggctcatcaacacacaggccatctttgccaagtgcactgggatgatcattctgggcgggggcgtggtcaagcaccacattgccaatgccaacctcatggtgcccgaccagacgaggctgtctcctggggcaagatccgggtggatgcacagcccgtcaaggtctatgctgacgcctccctggtcttccccctgcttgtggctgaaacctttgcccagaagatggatgccttcatgcatgagaagaacgaggactgagcggctgcggtcccaggaaggtcttaccccctcttctatttattaatttgcagacccagcccctcccctactttttggtcagctacgtctctagaataagatggtatctgaagtccttcca

SEQ ID NO: 126328 - DNA, 1172 bp, Homo sapiens
  Payload ID: 4773
  Gene Symbol: DHPS
  Gene Name: deoxyhypusine synthase
  Uniprot ID: P49366
  ENST ID: ENST00000594424
  CDS Start-End: 94-1077
agatttgcttttcccagcggggaagggaccggatctgaaaggagatgctctctgattcctaaaagggtgggggctggctgggcgcggtggcgcatgcctataatcccagcattttgggaagccgaggcgggtggatcaagagaagaggagttcgagacaagcctggccaacatgatcgagaagaagctggaaccactgtcacaggatgaagaccagcacgcggacctgacccagagccgccgcccacttaccagctgcaccattttcctgggatatacatccaacctcatcagttcaggcatccgtgagaccattcgctaccttgtgcagcacaacatggtggacgtattggtgaccacagctggcggcgtggaggaagacctcatcaagtgcctggcgcccacatacttgggcgagtttagcctcagggggaaggagctccgggagaacgggatcaataggatcggaaacctgctggtgcccaatgagaattactgcaagtttgaggactggctgatgcccattctggaccagatggtgatggagcagaacacagagggtgtaaagtggacgccttctaagatgatcgcccggctgggcaaggagatcaacaacccagagtccgtgtattactgggcccagaagaaccacatccctgtgtttagtcccgcacttacagacggctcgctgggcgacatgatcttcttccattcctacaagaacccgggcctggtcctggacatcgttgaggacctgaggctcatcaacacacaggccatctttgccaagtgcactgggatgatcattctgggcgggggcgtggtcaagcaccacattgccaatgccaacctcatgcggaacggggccgactacgctgtttacatcaacacagcccaggagtttgatggctctgactcaggtgcccgaccagacgaggctgtctcctggggcaagatccgggtggatgcacagcccgtcaaggtctatgctgacgcctccctggtcttccccctgcttgtggctgaaacctttgcccagaagatggatgccttcatgcatgagaagaacgaggactgagcggctgcggtcccaggaaggtcttaccccctcttctatttattaatttgcagacccagcccctcccctactttttggtcagctacgtctctaga

SEQ ID NO: 126329 - DNA, 605 bp, Homo sapiens
  Payload ID: 4773
  Gene Symbol: DHPS
  Gene Name: deoxyhypusine synthase
  ENST ID: ENST00000597152
  CDS Start-End: 191-605
tgattcttggtgtgggggcgggttctagatcgagaagaagctggaaccactgtcacaggatgaagaccagcacgcggacctgacccagagccgccgcccacttaccagctgcaccattttcctgggatatacatccaacctcatcagttcaggcatccgtgagaccattcgctaccttgtgcagcacaacatggtggacgtattggtgaccacagctggcggcgtggaggaagacctcatcaagtgcctggcgcccacatacttgggcgagtttagcctcagggggaaggagctccgggagaacgggatcaataggatcggaaacctgctggtgcccaatgagaattactgcaagtttgaggactggctgatgcccattctggaccagatggtgatggagcagaacacagagggtgtaaagtggacgccttctaagatgatcgcccggctgggcaaggagatcaacaacccagagtccgtgtattactgggcccagaagaaccacatccctgtgtttagtcccgcacttacagacggctcgctgggcgacatgatcttcttccattcctacaagaacccgggcctggtcctggacatcgttgagg

SEQ ID NO: 126330 - DNA, 464 bp, Homo sapiens
  Payload ID: 4773
  Gene Symbol: DHPS
  Gene Name: deoxyhypusine synthase
  ENST ID: ENST00000600864
  CDS Start-End: 1-348
gtaaagtggacgccttctaagatgatcgcccggctgggcaaggagatcaacaacccagagtccgtgtattactgggcccagaagaaccacatccctgtgtttagtcccgcacttacagacggctcgctgggcgacatgatcttcttccattcctacaagaacccgggcctggtcctggacatcgttgagggtgcccgaccagacgaggctgtctcctggggcaagatccgggtggatgcacagcccgtcaaggtctatgctgacgcctccctggtcttccccctgcttgtggctgaaacctttgcccagaagatggatgccttcatgcatgagaagaacgaggactgagcggctgcggtcccaggaaggtcttaccccctcttctatttattaatttgcagacccagcccctcccctactttttggtcagctacgtctctagaataagatggtatctgaagtcc

SEQ ID NO: 126331 - DNA, 1176 bp, Homo sapiens
  Payload ID: 4773
  Gene Symbol: DHPS
  Gene Name: deoxyhypusine synthase
  ENST ID: ENST00000601537
  CDS Start-End: 95-928
ttgcggagacgcgcgcgtcggggtttaacgcgtttctgggccgccgtaagcccggcctaggggcagctttgactcgagagccggctataggcgcatggaaggttccctggaacgggaggcgccagcgggggcgctggccgccgtgctaaagcacagctcgacgttgccgcccgaaagcacccaggtccggggctacgacttcaaccgcggtgtgaattaccgcgcactgctggaggccttcggcaccaccggcttccaagcaaccaacttcgggcgcgctgtacagcaagtcaatgccatgatcgagaagaagctggaaccactgtcacaggatgaagaccagcacgcggacctgacccagagccgccgcccacttaccagctgcaccattttcctgggatatacatccaacctcatcagttcaggcatccgtgagaccattcgctaccttgtgcagcacaacatggtggacgtattggtgaccacagctggcggcgtggaggaagacctcatcaagtgcctggcgcccacatacttgggcgagtttagcctcagggggaaggagctccgggagaacgggatcaataggatcggaaacctgctggtgcccaatgagaattactgcaagtttgaggactggctgatgcccattctggaccagatggtgatggagcagaacacagagggtgtaaagtggacgccttctaagatgatcgcccggctgggcaaggagatcaacaacccagagtccgtgtattactgggcccagaagaaccacatccctgtgtttagtcccgcacttacagacggctcgctgggcgacatgatcttcttccattcctacaagaacccgggcctggtcctggacatcgttgaggcggaacggggccgactacgctgtttacatcaacacagcccaggagtttgatggctctgactcaggtgcccgaccagacgaggctgtctcctggggcaagatccgggtggatgcacagcccgtcaaggtctatgctgacgcctccctggtcttccccctgcttgtggctgaaacctttgcccagaagatggatgccttcatgcatgagaagaacgaggactgagcggctgcggtcccaggaaggtcttaccccctcttctatttattaatttgcagacccagcccctcccctacttttt

SEQ ID NO: 126332 - DNA, 1133 bp, Homo sapiens
  Payload ID: 4773
  Gene Symbol: DHPS
  Gene Name: deoxyhypusine synthase
  ENST ID: ENST00000601639
  CDS Start-End: 42-440
ggcctaggggcagctttgactcgagagccggctataggcgcatggaaggttccctggaacgggaggcgccagcgggggcgctggccgccgtgctaaagcacagctcgacgttgccgcccgaaagcacccaggtccggggctacgacttcaaccgcggtgtgaattaccgcgcactgctggaggccttcggcaccaccggcttccaagcaaccaacttcgggcgcgctgtacagcaagtcaatgccatgatcgagaagaagctggaaccactgtcacaggatgaagaccagcacgcggacctgacccagagccgccgcccacttaccagctgcaccattttcctgggatatacatccaacctcatcagttcaggcatccgtgagaccattcgctaccttgtgcagcacaacatggatcggaaacctgctggtgcccaatgagaattactgcaagtttgaggactggctgatgcccattctggaccagatggtgatggagcagaacacagagggtgtaaagtggacgccttctaagatgatcgcccggctgggcaaggagatcaacaacccagagtccgtgtattactgggcccagaagaaccacatccctgtgtttagtcccgcacttacagacggctcgctgggcgacatgatcttcttccattcctacaagaacccgggcctggtcctggacatcgttgaggacctgaggctcatcaacacacaggccatctttgccaagtgcactgggatgatcattctgggcgggggcgtggtcaagcaccacattgccaatgccaacctcatgcggaacggggccgactacgctgtttacatcaacacagcccaggagtttgatggctctgactcaggtgcccgaccagacgaggctgtctcctggggcaagatccgggtggatgcacagcccgtcaaggtctatgctgacgcctccctggtcttccccctgcttgtggctgaaacctttgcccagaagatggatgccttcatgcatgagaagaacgaggactgagcggctgcggtcccaggaaggtcttaccccctcttctatttattaatttgcagacccagcccctcccctactttttggtcagctacgtctctagaataagatgg

SEQ ID NO: 126333 - DNA, 595 bp, Homo sapiens
  Payload ID: 4773
  Gene Symbol: DHPS
  Gene Name: deoxyhypusine synthase
  ENST ID: ENST00000596162
  CDS Start-End: 50-595
gggcgggagtttctgtcctgggaaggggattttgcactctggtagttacatgctgatcgagaagaagctggaaccactgtcacaggatgaagaccagcacgcggacctgacccagagccgccgcccacttaccagctgcaccattttcctgggatatacatccaacctcatcagttcaggcatccgtgagaccattcgctaccttgtgcagcacaacatggtggacgtattggtgaccacagctggcggcgtggaggaagacctcatcaagtgcctggcgcccacatacttgggcgagtttagcctcagggggaaggagctccgggagaacgggatcaataggatcggaaacctgctggtgcccaatgagaattactgcaagtttgaggactggctgatgcccattctggaccagatggtgatggagcagaacacagagggtgtaaagtggacgccttctaagatgatcgcccggctgggcaaggagatcaacaacccagagtccgtgtattactgggcccagaagaaccacatccctgtgtttagtcccgcacttacagacggctcgctgggcgacatgatcttcttccattcc

SEQ ID NO: 126334 - DNA, 1124 bp, Homo sapiens
  Payload ID: 4773
  Gene Symbol: DHPS
  Gene Name: deoxyhypusine synthase
  ENST ID: ENST00000614126
  CDS Start-End: 6-1118
ggcgcatggaaggttccctggaacgggaggcgccacgggggcgcgccgccgtgctaaagcacagctcgacgttgccgcccgaaagcacccaggtccggggctacgacttcaaccgcggtgtgaattaccgcgcactgctggaggccttcggcaccaccggcttccaagcaaccaacttcgggcgcgctgtacagcaagtcaatgccatgatcgagaagaagctggaaccactgtcacaggatgaagaccagcacgcggacctgacccagagccgccgcccacttaccagctgcaccattttcctgggatatacatccaacctcatcagttcaggcatccgtgagaccattcgctaccttgtgcagcacaacatggtggacgtattggtgaccacagctggcggcgtggaggaagacctcatcaagtgcctggcgcccacatacttgggcgagtttagcctcagggggaaggagctccgggagaacgggatcaataggatcggaaacctgctggtgcccaatgagaattactgcaagtttgaggactggctgatgcccattctggaccagatggtgatggagcagaacacagagggtgtaaagtggacgccttctaagatgatcgcccggctgggcaaggagatcaacaacccagagtccgtgtattactgggcccagaagaaccacatccctgtgtttagtcccgcacttacagacggctcgctgggcgacatgatcttcttccattcctacaagaacccgggcctggtcctggacatcgttgaggacctgaggctcatcaacacacaggccatctttgccaagtgcactgggatgatcattctgggcgggggcgtggtcaagcaccacattgccaatgccaacctcatggtgagtgggaacggggccgactacgctgtttacatcaacacagcccaggagtttgatggctctgactcaggtgcccgaccagacgaggctgtctcctggggcaagatccgggtggatgcacagcccgtcaaggtctatgctgacgcctccctggtcttccccctgcttgtggctgaaacctttgcccagaagatggatgccttcatgcatgagaagaacgaggactgagcggct

SEQ ID NO: 126335 - DNA, 1290 bp, Homo sapiens
  Payload ID: 4774
  Gene Symbol: DNTTIP1
  Gene Name: deoxynucleotidyltransferase, terminal, interacting protein 1
  Uniprot ID: Q9H147
  ENST ID: ENST00000372622
  CDS Start-End: 69-1058
agtgacgtcacggcgccactttccggccggtgacagagtccagcggagttgtgggggccgggggcgccatgggagccactggcgacgccgagcagccgcggggacctagcggggccgagaggggcggcttggagctgggggatgcgggcgcagcggggcagctggttcttacgaacccttggaacataatgataaagcaccggcaggtgcagcggaggggccgccgctcacagatgacaacaagtttcacagatcctgccatctccatggatctcctccgagctgtcctgcagcccagcatcaacgaggagatccagactgtcttcaacaagtacatgaagttcttccagaaggcagcactgaacgtgcgagacaatgttggggaggaggtggacgcagagcagctgatccaggaagcctgtcggagctgcctggagcaggctaaactgctcttttcagatggagaaaaagtaatacccagattgacccatgagcttccaggaataaagcgtggccgtcaggcagaagaagaatgtgcccatcgaggaagcccccttcctaaaaagaggaaaggacggcctcctggacacatcctgtcaagcgaccgggcagccgccggcatggtatggaaaccaaaatcctgtgaaccaattcgccgggaaggccccaagtgggacccagctcgcctgaatgaatctaccacctttgtgttgggatctcgagccaacaaagccctggggatggggggcaccagaggaagaatctacatcaagcacccacacctctttaagtatgcagctgacccccaggataagcactggctggctgagcagcatcacatgcgggcaacagggggcaagatggcctacctcctcatcgaggaggacatccgggaccttgcggccagtgatgattacagaggatgcctggatctgaagctagaggaattgaaatcctttgtcctaccctcctggatggtggagaagatgagaaagtatatggagacactacggacagagaatgagcatcgtgctgttgaagcacctccacagacctgaggccgggtcccctggccacacttggcagccctcctccaaagccctcttcctcacgtggctgaggccaccgctgggactgctcctagatggatctcagcggcattaagctgtgcctgagcgagtttgtagtgactcactgcacagcacccccagactagcatgtggttctatatttgtaaagttattgggataagaaacaattaaacagtttgtagtaaacacagatggtgaa

SEQ ID NO: 126336 - DNA, 591 bp, Homo sapiens
  Payload ID: 4774
  Gene Symbol: DNTTIP1
  Gene Name: deoxynucleotidyltransferase, terminal, interacting protein 1
  ENST ID: ENST00000415790
  CDS Start-End: 157-591
atcgtcccaccccaaggcgggagagatggtgacggatctgagaagcagggatgtccaggtttaacttcatacccaccctccacctccaccccaccccagtgtcacaggccgcagtgacatttgttccgttggtccccacagaacccttggaacataatgataaagcaccggcaggtgcagcggaggggccgccgctcacagatgacaacaagtttcacagatcctgccatctccatggatctcctccgagctgtcctgcagcccagcatcaacgaggagatccagactgtcttcaacaagtacatgaagttcttccagaaggcagcactgaacgtgcgagacaatgttggggaggaggtggacgcagagcagctgatccaggaagcctgtcggagctgcctggagcaggctaaactgctcttttcagatggagaaaaagtaatacccagattgacccatgagcttccaggaataaagcgtggccgtcaggcagaagaagaatgtgcccatcgaggaagcccccttcctaaaaagaggaaaggacggcctcctggacacatcctgtcaagcgaccgggcagccgccggcatg

SEQ ID NO: 126337 - DNA, 473 bp, Homo sapiens
  Payload ID: 4774
  Gene Symbol: DNTTIP1
  Gene Name: deoxynucleotidyltransferase, terminal, interacting protein 1
  ENST ID: ENST00000449078
  CDS Start-End: 1-453
gacgccgagcagccgcggggacctagcggggccgagaggggcggcttggagctgggggatgcgggcgcagcggggcagctggttcttacgaacccttggaacataatgataaagcaccggcaggtgcagcggaggggccgccgctcacagatgacaacaagtttcacagatcctgccatctccatggatctcctccgagctgtcctgcagcccagcatcaacgaggagatccagactgtcttcaacaagtacatgaagttcttccagaaggcagcactgaacgtgcgagacaatgttggggaggaggtggacgcagagcagctgatccaggaagcctgtcggagctgcctggagcaggtgcgtggtggatcaagttatcatggccccatttggtatcatggggatgagcaccctgctgcctccctgcctctctggtgtggtcaggaagcatgacatcaggtctataaatgact

SEQ ID NO: 126338 - DNA, 930 bp, Homo sapiens
  Payload ID: 4774
  Gene Symbol: DNTTIP1
  Gene Name: deoxynucleotidyltransferase, terminal, interacting protein 1
  ENST ID: ENST00000435014
  CDS Start-End: 1-698
tgcagcccagcatcaacgaggagatccagactgtcttcaacaagtacatgaagttcttccagaaggcagcactgaacgtgcgagacaatgttggggaggaggtggacgcagagcagctgatccaggaagcctgtcggagctgcctggagcaggctaaactgctcttttcagatggagaaaaagtaatacccagattgacccatgagcttccaggaataaagcgtggccgtcaggcagaagaagaatgtgcccatcgaggaagcccccttcctaaaaagaggaaaggacggcctcctggacacatcctgtcaagcgaccgggcagccgccggcatggtatggaaaccaaaatcctgtgaaccaattcgccgggaaggccccaagtgggacccagctcgcctgaatgaatctaccacctttgtgttgggatctcgagccaacaaagccctggggatggggggcaccagaggaagaatctacatcaagcacccacacctctttaaggcctacctcctcatcgaggaggacatccgggaccttgcggccagtgatgattacagaggatgcctggatctgaagctagaggaattgaaatcctttgtcctaccctcctggatggtggagaagatgagaaagtatatggagacactacggacagagaatgagcatcgtgctgttgaagcacctccacagacctgaggccgggtcccctggccacacttggcagccctcctccaaagccctcttcctcacgtggctgaggccaccgctgggactgctcctagatggatctcagcggcattaagctgtgcctgagcgagtttgtagtgactcactgcacagcacccccagactagcatgtggttctatatttgtaaagttattgggataagaaacaattaaacagtttgtagtaaacacagatggtgaa

SEQ ID NO: 126339 - DNA, 1073 bp, Homo sapiens
  Payload ID: 4774
  Gene Symbol: DNTTIP1
  Gene Name: deoxynucleotidyltransferase, terminal, interacting protein 1
  ENST ID: ENST00000456939
  CDS Start-End: 1-841
gaggggcggcttggagctgggggatgcgggcgcagcggggcagctggttcttacgaacccttggaacataatgataaagcaccggcaggtgcagcggaggggccgccgctcacagatgacaacaagtttcacagatcctgccatctccatggatctcctccgagctgtcctgcagcccagcatcaacgaggagatccagactgtcttcaacaagtacatgaaggctaaactgctcttttcagatggagaaaaagtaatacccagattgacccatgagcttccaggaataaagcgtggccgtcaggcagaagaagaatgtgcccatcgaggaagcccccttcctaaaaagaggaaaggacggcctcctggacacatcctgtcaagcgaccgggcagccgccggcatggtatggaaaccaaaatcctgtgaaccaattcgccgggaaggccccaagtgggacccagctcgcctgaatgaatctaccacctttgtgttgggatctcgagccaacaaagccctggggatggggggcaccagaggaagaatctacatcaagcacccacacctctttaagtatgcagctgacccccaggataagcactggctggctgagcagcatcacatgcgggcaacagggggcaagatggcctacctcctcatcgaggaggacatccgggaccttgcggccagtgatgattacagaggatgcctggatctgaagctagaggaattgaaatcctttgtcctaccctcctggatggtggagaagatgagaaagtatatggagacactacggacagagaatgagcatcgtgctgttgaagcacctccacagacctgaggccgggtcccctggccacacttggcagccctcctccaaagccctcttcctcacgtggctgaggccaccgctgggactgctcctagatggatctcagcggcattaagctgtgcctgagcgagtttgtagtgactcactgcacagcacccccagactagcatgtggttctatatttgtaaagttattgggataagaaacaattaaacagtttgtagtaaacacagatggtgaa

SEQ ID NO: 126340 - DNA, 2199 bp, Homo sapiens
  Payload ID: 4775
  Gene Symbol: DNTTIP2
  Gene Name: deoxynucleotidyltransferase, terminal, interacting protein 2
  ENST ID: ENST00000359208
  CDS Start-End: 15-1820
agggagccggaaagatggtggttaccagatctgcacgggctaaggccagcatccaagccgcgtcggctgaaagttccgggcaaaagagttttgctgctaatgggattcaagcgcatccagaaagtagtactggatctgatgcccgaactactgctgaatcacagaccactgggaagcaaagtttaatccctagaactcctaaagctagaaagaggaagagcagaactacaggctcactaccaaaggggactgaaccatctacggatggagaaacctctgaggcagagtcaaattattctgtgtctgagcaccatgataccattttaagggtaactaggagaaggcagatcttaattgcatgctccccagtgtccagtgttaggaaaaagccgaaagtaactccaacaaaggagtcttacactgaagaaatagtgtctgaagcagaatctcatgtttcaggtatttctagaattgtgcttcctacagaaaaaactacaggagccagaagaagtaaggctaaatctctgacagatccaagccaagaatctcatacagaagctatatctgatgctgagacatcaagctcagacatttcattctctggaattgcaactagaagaaccaggagtatgcagaggaaattaaaggcacaaactgaaaagaaagatagtaagattgtaccaggaaatgagaaacagatcgtgggtacacctgtgaattcagaggattcagataccagacaaacttcccatttacaagcaagatctctttctgagataaataagccaaatttctataataatgactttgatgatgatttctcccacagaagttcagaaaatatattaacagtgcacgaacaggccaatgttgaatctcttaaagaaacaaaacagaattgtaaggatttggatgaagatgccaatggaataacagatgaggggaaagaaattaatgagaaaagttctcagctgaagaatctttctgaacttcaggacactagccttcaacagttagtttctcagagacattcaaccccccaaaataaaaatgctgtatcagtgcactctaatctgaactctgaggctgtaatgaaatcattaactcaaacatttgcaactgtggaagtaggcagatggaataacaacaaaaagagccccataaaagcaagtgacttgacaaagtttggtgattgtggtggtagtgatgatgaagaagagtccacagttataagtgtcagtgaagacatgaacagtgaagggaatgtagattttgaatgtgataccaaactatacacgtctgcgcccaacacatctcagggtaaagataattctgtcttactagttctcagcagtgatgaaagccaacagtctgaaaacagtgagaatgaagaggatactttatgttttgttgaaaatagtggccaaagggagtcattaagtggagacacaggaagtctgtcatgtgacaatgcattgtttgtaattgacacaactcctggaatgagtgctgataaaaatttttacttggaagaggaagacaaggcaagtgaggttgccattgaggaagaaaaagaagaggaagaggatgaaaaaagtgaagaagattcatcagaccatgacgaaaatgaagatgagtttagtgatgaagaagacttcctaaatagcacaaaggctaaactcttctgcagaaagccgtcattacacctgattttgaaaaaaaccactgtgttccaccatatagtgaatcaaagtatcaacttcagaaaaaacgcagaaaagaacgacaaaaaacagcaggggatggctggtttggtatgaaagctccagaaatgacaaatgaactgaaaaatgatctcaaagcactgaagatgagagccagcatggacccgaaaagattttacaagaaaaatgatagagatggcttccccaagtacttccagattggaaccattgttgacaatccagctgatttctaccattcacgaattcccaagaagcaaaggaaaagaactattgtggaagaactgctggctgattctgaattcagaagatacaaccgaaggaagtactcagagatcatggctgaaaaagcagcaaatgcagcaggaaaaaagttccgaaagaagaagaaatttcgcaattaagatttaccaagcaaactgcaacattttacattgctcctttatttacttattaa

SEQ ID NO: 126341 - DNA, 5897 bp, Homo sapiens
  Payload ID: 4775
  Gene Symbol: DNTTIP2
  Gene Name: deoxynucleotidyltransferase, terminal, interacting protein 2
  Uniprot ID: Q5QJE6
  ENST ID: ENST00000436063
  CDS Start-End: 59-2329
gcatttccggagcgccagggaagagggaagtcgtggtggtcgcgagggagccggaaagatggtggttaccagatctgcacgggctaaggccagcatccaagccgcgtcggctgaaagttccgggcaaaagagttttgctgctaatgggattcaagcgcatccagaaagtagtactggatctgatgcccgaactactgctgaatcacagaccactgggaagcaaagtttaatccctagaactcctaaagctagaaagaggaagagcagaactacaggctcactaccaaaggggactgaaccatctacggatggagaaacctctgaggcagagtcaaattattctgtgtctgagcaccatgataccattttaagggtaactaggagaaggcagatcttaattgcatgctccccagtgtccagtgttaggaaaaagccgaaagtaactccaacaaaggagtcttacactgaagaaatagtgtctgaagcagaatctcatgtttcaggtatttctagaattgtgcttcctacagaaaaaactacaggagccagaagaagtaaggctaaatctctgacagatccaagccaagaatctcatacagaagctatatctgatgctgagacatcaagctcagacatttcattctctggaattgcaactagaagaaccaggagtatgcagaggaaattaaaggcacaaactgaaaagaaagatagtaagattgtaccaggaaatgagaaacagatcgtgggtacacctgtgaattcagaggattcagataccagacaaacttcccatttacaagcaagatctctttctgagataaataagccaaatttctataataatgactttgatgatgatttctcccacagaagttcagaaaatatattaacagtgcacgaacaggccaatgttgaatctcttaaagaaacaaaacagaattgtaaggatttggatgaagatgccaatggaataacagatgaggggaaagaaattaatgagaaaagttctcagctgaagaatctttctgaacttcaggacactagccttcaacagttagtttctcagagacattcaaccccccaaaataaaaatgctgtatcagtgcactctaatctgaactctgaggctgtaatgaaatcattaactcaaacatttgcaactgtggaagtaggcagatggaataacaacaaaaagagccccataaaagcaagtgacttgacaaagtttggtgattgtggtggtagtgatgatgaagaagagtccacagttataagtgtcagtgaagacatgaacagtgaagggaatgtagattttgaatgtgataccaaactatacacgtctgcgcccaacacatctcagggtaaagataattctgtcttactagttctcagcagtgatgaaagccaacagtctgaaaacagtgagaatgaagaggatactttatgttttgttgaaaatagtggccaaagggagtcattaagtggagacacaggaagtctgtcatgtgacaatgcattgtttgtaattgacacaactcctggaatgagtgctgataaaaatttttacttggaagaggaagacaaggcaagtgaggttgccattgaggaagaaaaagaagaggaagaggatgaaaaaagtgaagaagattcatcagaccatgacgaaaatgaagatgagtttagtgatgaagaagacttcctaaatagcacaaaggctaaacttctgaagttgacaagcagcagcatagaccctggtctgagtatcaagcagttgggtggtttgtatattaattttaatgcagataaactacagtctaacaagagaaccctaacacagatcaaggagaaaaagaaaaatgagcttctgcagaaagccgtcattacacctgattttgaaaaaaaccactgtgttccaccatatagtgaatcaaagtatcaacttcagaaaaaacgcagaaaagaacgacaaaaaacagcaggggatggctggtttggtatgaaagctccagaaatgacaaatgaactgaaaaatgatctcaaagcactgaagatgagagccagcatggacccgaaaagattttacaagaaaaatgatagagatggcttccccaagtacttccagattggaaccattgttgacaatccagctgatttctaccattcacgaattcccaagaagcaaaggaaaagaactattgtggaagaactgctggctgattctgaattcagaagatacaaccgaaggaagtactcagagatcatggctgaaaaagcagcaaatgcagcaggaaaaaagttccgaaagaagaagaaatttcgcaattaagatttaccaagcaaactgcaacattttacattgctcctttatttacttattaaagacgtttggaaaactaacaccatcatctaaattaatttaccatagactggccctgttcatacaggaatttgtatttggaaaaagttgatttgagaatcgattacatgcccttagaaaataggggtgtctaaaagacccaccctggtgtagactctttatgggaaaaaaggaaaaaaaatctcaaccattttaagataactgatggtttgtaaagttttcaatgcttagttatttaaagaaaatttaattaaaagataggaagtataaagtttgctaacatgttcaaagaactttaaaaaatgatcaaagatatataaacattattgtaattaataggtagttttatgtgtgtatgtgtgtgtgtgtctgtgtaggggacgggagatggtagagaggcaatgccctatagttagctataaaattcagatccagaaagttgggatacaaagatatgaagaatatgacctagaaagcttgggcagaggagctgttttccttgcttggcaactgaaacagggaggaataattggtttttatctagatttaagtgttgtggtccaagtaaaacaggattaaactataatttaagttggccagggtttcttcgaagttaacccagcttacctcttctccagtggtacagtatgcaccctggctaagctggtttctggcacccaaggagtgttggtcatttctgttgatacttggtgagttgtagcttcctttatgttactattcactttacctctatttttccagcatactgcttccttgagatatcagcaaatatgaaatcttttttttttttaataatagttttggggtacatgtgtagaacatgcaggttacataggtatacacgtgccatggtggtttgctgcacccatcaacctatctacattaggtatttctcctagtgctatccctcccctagtcccccacccacaacaggccccagtgtgtgatgttcccctccctgtgtccatgtgttctcattgtttacctcccacttacgagtaagaacatgcagtgtttggttttctgttcttgtgttagttttctgttcttgctgagatgatttccagcttcagccatgtccctgcaaaggacatgaactcatgcttttttatggccacatagtattccatggtgtatatgtgccacattttctttatccagtctatcattcatgggcatttgggttggttccaagtcttttctattgtgaacagtgccacagtaaacatacttgtgtatgtgtctttatagtagaatgatttataatcctttgggtatatacccagtaatgggattgctgggtcaaatggtatttctggtcctagatccttgcggaatcaccacactgtcttccacaatggttgaactagtttacactcccaccaacagtgtaaaagtgttcctagttctccatatcctctccagcatctgttgtttcctgactttttaatgattgccattctaactggcaatgagatggtatctcattgtggttttgatttgcatttctctaatgagcagtgataatgagcgttttttcatgtttgttggctgcataaatgtcttcttttgagaagtgtctgttcatatccttcacccactttttgatggggttttttcttgtaaatttgtttaagttctttgtagattctggatattagccctttgtcagatggatagattacagaaattttctcccattctgtagattgcctgtgcactctgataatagtttcttttgctgtgcagaaactctttagtttaattagatcccacttgtcaattttgccttttgttgccattgcttttggtgttttagtcatgcagtctgcccatacctatgtccaaaatctcatatttactgcttggagtcaaaagctagtaatagcagaactgacaataacattcatagttggagttagggaagcatctatgtctgttctcttttattttaaaaaaaaactacttttgtttctggaatactatgttttgccttctactggataaaataaggacccagtatgagagaattgtatcctttagtgcttctggccttctacaaatacctggatatttaaataatggatgaagttatgttttgctttttaataagcaagtcttttgagaaacaggttttactgactttggcctgtgtcactaaactcagttcacctactggaacttttttttttttttttgagacgtctcactccatcacccaggttggagtgcagtggtgccatctcagctcactgcaacctccgcctcccaagttcaagcgattatcatacctcagcctgccaagtagctgggactactgggcatgccattatgcccagctaacttttgtatttttagtagagatggggttttgccatccttacctcaagtgatccacccgcctcggcctcccaaagtgctgggattacaggtgtgagccaccatgcccagccaactggaactatttgaaggctttataccagaaaagtataaagaatccaaagggctgccacagtcaggtgtgctggtgaaagagaccttcaagatacccctgagaagatcttgaaagatttcgaaaagaatgctgtatttatacaccatctggctccaagatgctttttttttttttttttttgagagacggactctcgctctgtcgcccaggctggagtgtagtggcatgatcttggttcactgcaacctccgcctcccgggttcaagcaattctgcctcagcctcccaagtacctgggattaacaggcacccaccaccacacccggctaatttttgtatttttagtagagacggggtttcaccatgttggccaggctggtcttgaacttctgacctcaggtgatccaccggcctcagcctcccaaagtgctgggattacaggcaggagccaccacgtctggcccaaaatgttcttaaaacaaagtagatgctgtaagactacagttgataaagttgggctctgggctaggttcttagcatccaacacaatcagttctgtgttcagtgttctgctgtatgataaaccaactgctctagagaaacaccaatattcctcttctgaaacctgggaaaatgtcttttttgggtcccataactagatgtcacaaaaggagtggggagtggggaggctatataaaaaagttcaacaaaaccttagtaactggtatacattaataggatcccattcttagaaacagcaagttaaagaaaataccataatgggaaaaaaaagttaacatttctgagagatgtaccaggtattcagtctctcaggcagtgacaacttgttcagaataattacctacaatagatcccaaaccattgaaaaatgcctaattgtttacttaatggaatttgtacttactatttaattagatgaatatctttattgaaagttttcagtaagggttgcaacaaaaagggctttctaattaaccaattccccaagcatctgtctaattaaaatgtaaagtgcaattat

SEQ ID NO: 126342 - DNA, 499 bp, Homo sapiens
  Payload ID: 4775
  Gene Symbol: DNTTIP2
  Gene Name: deoxynucleotidyltransferase, terminal, interacting protein 2
  ENST ID: ENST00000528680
  CDS Start-End: 17-499
cgagggagccggaaagatggtggttaccagatctgcacgggctaaggccagcatccaagccgcgtcggctgaaagttccgggcaaaagtgtgttttctctggtttgcagagttttgctgctaatgggattcaagcgcatccagaaagtagtactggatctgatgcccgaactactgctgaatcacagaccactgggaagcaaagtttaatccctagaactcctaaagctagaaagaggaagagcagaactacaggctcactaccaaaggggactgaaccatctacggatggagaaacctctgaggcagagtcaaattattctgtgtctgagcaccatgataccattttaagggtaactaggagaaggcagatcttaattgcatgctccccagtgtccagtgttaggaaaaagccgaaagtaactccaacaaaggagtcttacactgaagaaatagtgtctgaagcagaatctcatgtttcaggtatttctagaattgtg

SEQ ID NO: 126343 - DNA, 4200 bp, Homo sapiens
  Payload ID: 4776
  Gene Symbol: DNASE1
  Gene Name: deoxyribonuclease I
  Uniprot ID: P24855
  ENST ID: ENST00000246949
  CDS Start-End: 3210-4058
cagaaaagagatccacgagggagaagtgagagtgctggagactccacaagccacaggctgcaggggcaggatggcttcttagaaggtgaaatgattgttctgggaatctatcagaggaagacatagaggctccagacggttgaaggcccaacagtgatcccagacgggccccatgtcagaccaggctcctccagggctgtgctgccctcaccaaagcccgtcctgagggcagccacacagcaggcagcactcgccatttgtacaagcgaggcccaagttccagccttccttctggcaggtagaggaagcaggggcactatgcctgggagttcctgaaagcagatggggcagcatttggtcaagagccaggaggggatgacagaccagaggggaaccctcgtcccacgtgctgagcacacgtagggggttgggcacttgctctgtgagctataattggtgtccctgtgccccgccggaagctgcaccaggcagtttcttggtggaggacagtggccgccctctagctttactcccttccccgtgatgggtcgctgtcagatgtgtgtccaggaaaggcaaacaccaaaggcagaggactagtccctacaccgaatactccggtggccttgcttgggggctgggttttgacgtgctggaggctgtcctagacttagagattaaaaacagggaagaaccattgctgaaacctttggaaaagcctgcaatggggcctctggcagcctgaggagtggtggtgtttccatctggtagacgccgtctcaataggagggacagatgagtgcaccagtgctgccagccagaggcgtctgttggcgtgtctttatggaatggggtgccagtcttgtggagggtggtttaccttcctgtttctagtccccactgggcctgccttctgcttcatggccagctggccagaccgagcactttcctgactttcgaccttggcccctgctgactcttgccgttgaggcctcctgcagaccccatttgtattcatttcctgcagttctcatacctgaatcccgcctggacttctgccaagccttccaggccctcctcccccagggggaccacagatgctacgtgcagggctgtccttggagggccagcacagccccttccaagtgggcaagacccaggggtggctcaaaagatagctgtgccctagccctggaacctctgaatgttgatttttgtagcaaaaaaggacttgcagatgtgagtaaaggctgttgagataaggacatcctccctgctctctgggaggaccccaaatgcaggtgcacagatcttaagaagaagaggcagagactggggtgatgcagccacaactaaggaaagccaaggattgctggcagcctgcagaaactggagggcaaggagcatcccccaaccgcccggagcctccaggaggcgcaaggtcctactgactccctgacttcagacgtccagtctccggaattttgagaggatccatttctgttattttaagcaaccaaacttgtggtagtttcaccagtctcaggaaatgaatacgaatggaaagtcaaagattccaagaaatgagtggcggggtgcggtggctcacacttgtaatcccagcatttgcgggaagattgcttgggctcaggacttggagaccttgtgtctgtgagaaacttaaaaaataggctgggtgcgatggctcacgcctgtaatcccagcactttgggaggccgaggcaggcggatcacaaggtcacgagtttgagaccagtgtgaccaacatggtgaaaccctgtctctactaaaaatacaaaaattagccgggtgtggtggtgcgtgcctgtaatcccagctactcgggaggctgaggcagaagaattgcttgaacccaggaagcagaggttgcagtgagccgagatagtattactgcactccaggctgggcagcagagcaagattccgcctcaaaaaaaaaaaaaaaaaaaaaaaaaaaaaaaaaaactgagcatggtagcatgcacctgtggtcctggctacgccggaggattgcctgaagccaggagttcaagaccagtctggacaaaagagcaagaccccatctctaccaaaaaaatttaaaaattagccaggcatggtgccgtacccatagtcttagctactcaggaggctgaggagggaggattatctgagccctggcggttgaggctataatgagccatgattgtgccactgcactccagccttggcaacacagtgtgagaccctgtctcaaaaacaataaaaacccaaaacaaaagaaccaagaaattactggacctgaggcctggcctttagctgctgccctgcccttgtgacctggtcactcgggatcccctgggcctaaacacacagcctattgtctacctcaagaaggctccccactgcttggctggcaattggggtgggctttgcaggccccacctgtcctggccccacggcgctggtgctgcaggcccccaccactgcttgttccgagctccccagcctcctgcagagttgcctgcacctgatggcgatgaatcaggaaggcaggcgtgtcctgggccacagagcagtcatggctgtcagccaccagggggctccatttgcaactttggatgtggctttggcctctttgtccaaagtgaccttggggcccccagacaagagacagggagactggagcccagccccaccctcccgcacatacctggcccatccctgccctatcctggaagatgggggccaccacacgtgcaagggacacgggataggaacctttggccttgttatcagacattttaaaactaagtgcaaacgtgattatcaggtgcagtttttacagcagcaagaaacctgtgcttacagaaagaaacacgtgctagcaacccacctatgcggaaagccacacagagccattgttttctgcactctcaggtgacggctcacatttgccccagggaaggtcacagctgcctgaacttttaaaactcccagacacgcactgcctgtgcaggatccggagcccagcagcactgccagggccttgaagtgcttcttcagagacctttcttcatagactacttttttttctttaagcagcaaaaggagaaaattgtcatcaaaggatattccagattcttgacagcattctcgtcatctctgaggacatcaccatcatctcaggatgaggggcatgaagctgctgggggcgctgctggcactggcggccctactgcagggggccgtgtccctgaagatcgcagccttcaacatccagacatttggggagaccaagatgtccaatgccaccctcgtcagctacattgtgcagatcctgagccgctatgacatcgccctggtccaggaggtcagagacagccacctgactgccgtggggaagctgctggacaacctcaatcaggatgcaccagacacctatcactacgtggtcagtgagccactgggacggaacagctataaggagcgctacctgttcgtgtacaggcctgaccaggtgtctgcggtggacagctactactacgatgatggctgcgagccctgcgggaacgacaccttcaaccgagagccagccattgtcaggttcttctcccggttcacagaggtcagggagtttgccattgttcccctgcatgcggccccgggggacgcagtagccgagatcgacgctctctatgacgtctacctggatgtccaagagaaatggggcttggaggacgtcatgttgatgggcgacttcaatgcgggctgcagctatgtgagaccctcccagtggtcatccatccgcctgtggacaagccccaccttccagtggctgatccccgacagcgctgacaccacagctacacccacgcactgtgcctatgacaggatcgtggttgcagggatgctgctccgaggcgccgttgttcccgactcggctcttccctttaacttccaggctgcctatggcctgagtgaccaactggcccaagccatcagtgaccactatccagtggaggtgatgctgaagtgagcagcccctccccacaccagttgaactgcaggaagagaggacccatcctgccacaggacccagaaaaaaagcccaacacacactcgggttaagaaatacctttaaatttaggtaaataaagctcaaggaggtggggctgtca

SEQ ID NO: 126344 - DNA, 8552 bp, Homo sapiens
  Payload ID: 4776
  Gene Symbol: DNASE1
  Gene Name: deoxyribonuclease I
  Uniprot ID: P24855
  ENST ID: ENST00000407479
  CDS Start-End: 185-1033
ctcctgcccaggacccgaggagccggccaccgttcagaaggccccagcttgaaggcctggagagccgcccagcagcacaacacagggaagcttggggagcaaaaggagaaaattgtcatcaaaggatattccagattcttgacagcattctcgtcatctctgaggacatcaccatcatctcaggatgaggggcatgaagctgctgggggcgctgctggcactggcggccctactgcagggggccgtgtccctgaagatcgcagccttcaacatccagacatttggggagaccaagatgtccaatgccaccctcgtcagctacattgtgcagatcctgagccgctatgacatcgccctggtccaggaggtcagagacagccacctgactgccgtggggaagctgctggacaacctcaatcaggatgcaccagacacctatcactacgtggtcagtgagccactgggacggaacagctataaggagcgctacctgttcgtgtacaggcctgaccaggtgtctgcggtggacagctactactacgatgatggctgcgagccctgcgggaacgacaccttcaaccgagagccagccattgtcaggttcttctcccggttcacagaggtcagggagtttgccattgttcccctgcatgcggccccgggggacgcagtagccgagatcgacgctctctatgacgtctacctggatgtccaagagaaatggggcttggaggacgtcatgttgatgggcgacttcaatgcgggctgcagctatgtgagaccctcccagtggtcatccatccgcctgtggacaagccccaccttccagtggctgatccccgacagcgctgacaccacagctacacccacgcactgtgcctatgacaggatcgtggttgcagggatgctgctccgaggcgccgttgttcccgactcggctcttccctttaacttccaggctgcctatggcctgagtgaccaactggcccaagccatcagtgaccactatccagtggaggtgatgctgaagtgagcagcccctccccacaccagttgaactgcaggaagagaggacccatcctgccacaggacccagaaaaaaagcccaacacacactcgggttaagaaatacctttaaatttaggtaaataaagctcaaggaggtggggctgtcatctgtggtgtcagtccttctggccccctggctgtcagtgtcgctccagggccttgacaagcagctcattcaagcggcccaccatggccctagggtcgtcaacaagtccagcagcaatcatggcgttctcgtatatctgaaaggcaagaggagaaacccattatgaggggcatggggcaccttttcatttttttttttttgagacagagtctcactgttgccgaggctggagtgcagaggcacgatctcggctcactgcaacctcaggtgatccccccgcctcccaaagtgctgggattacaggcgtgagccaccacgcctggccatttttccgtttttaaaacagaatttggctgggcacggtggctcacgaggtcaggagattgagaccatcctggccaagatggtgaaaaccccatctctactaaaatacaaaattagccaggcgcatgcctgtagtcccagctactcgggaggctgaggcaggggaattgcttgaacccgggaggcagaggttgtagtgagccaagatcgcgccactgcactccagcctggcaacagagcaacactccatctcaaaaaacaaacaaacaaacaaaaagacaggattttagaggaaaccgctgttccaccctgaaggcaggctggcagggctggtagcctgggtccctgcagtcatcctaagctgctgcactcacctgatccaccagcagctgagccaggccaggctcgcttgcgcgcagctgattcagcttcttgatgagcgcgtgcctgcaacacagaacccaccagaaaaagcagctcagtaccacgtgctgtgaccctcccttcatgttttgggattatcaggatatttaaagaagcacagtaagactgtctgtagttttttaaataaggtatgttaatgatcatttatagataatatcattatatacccagaaaacccaagagaatcaggagtgtcagtattagaaaatgctgtaaggtagccaaactccaagattaatatacactaaagggacaaaaggagcttagtacgtgaagacatgccttggttcctagataaataataaaagagaagggagtaagacccacatgttgaaacatattatagggctctagtaaataaaacagtttaggtctggaaagggggaaggcaaacaactccatgtaacgagggtggacactgagtgtctgatgaggacagtatttcacagaagagggaggagacagatcactccatccagcagcactgggatgactgggagccatgcagaaaaccatttagaccagagtaaattccagagggatcaaagatgacaagcacaattctagggaagaaatgtttcatcatctcagaaggggaaagcctttccaagcaaaaccacaaaccaaaaagtaaagaatgattgacatatttgacgtcagaacaatatttttttctgcataggaaaaagcatcatgtagtatttaaccttaacatgaatattataatttttcacttagaagtctgataaaaccgagggctctggggaactgtaaatttgtacaacctctccagaggacaactggagtcgggaaaaccacatgtggatgatatgctgagactcagccattccatttcctaactgcatccctttaaacacttttttttttagatagatagatagatagatagatagatagactctcactccttcacccaagctagagtgaaatggcatgatcttggctcaccgcagcctcctggtttcaagaggttctcttgcctcagcctcccaagtaactgggattacaggcacccaccaccacccccagctagtttttgtatttttagtagagatgaggtctcgaactcctgacctcaagtgatccacccgcctaggcctcccaaaatgttgggattacaggcgtgaggcaccgcacccaacctaacagaggaaacacttcaaatgcacatcctcacatttctagtctacgtagctggaaaaaaaggacattcttaatatgctaatgtggaggtcacctagttaccctaagggagaaaagcaaggcaaggacccactgcacagcaagttcccccttggaagcccacgggcgcagctgcccacaaatgcacataatctctgcagaaatacaaaagccctaatgctggctgcactggggacacaggtaggaggaaattttcccctgtaagcagttttgaattctgaactatgtggacagaacaccaaattttaaaacaaatgaaagtgaagctggctgggcacagtggctctcgcctgtaatcccaccactttgggaggccaaggctgcagtgagctctgatggcgccactggtacactccagcctaggtgacagagcaagaccctgtctccaaaagtgaagtggcaacagacagaaacgagcacttctgcagctatctcacaaaactagtttgccaccaaaactagttaaagtgacctggtgtccgcctcactgagctgctccagcagaggcacaggcattctgcatactggcgctgctgtgcactgacagccataagccaagtcagcctttccccaggagtgccatggctaggaagatgcatctccctcgcctccagtataattttaaaagttatggttgtaaaatgacaaaagaaaaaaactagacatgtactaaagaacaaaacaaaaactggctgggggtggtagcccacacttgtaatcccagcacttcgggaggctaaggcaggtggattgtttgaggccaggaggtagaagttgcagtgagctgagattgccccactgcactccaacctgggggacagagtgagaccctgtctcaaaaattaaaatactacttaggctacattgtggggggggtggtaagtctatggattttgatttcctttttgctgttttctatttttggtaacatgtttatgtaacttcattttttaaaaaattgctacattcaaaatttcccccaaaaaagaaacttcatatacaagttagttcatatacaagttagaaaatgaaattttaaaataccccataagacacatcaaagaataattctttaaaaatggtaccagaaccctacagagaatgtaaggtaccaaaggatgttaaagacctaaatagatcacattcatgggtgcaaagaagtgatactgtaaaaagaaagaaactcaaaagatacctaaaggcaggtgaaaagacatttacaacagataaagggcatataaagaacaacaggaagaaacgagggaaatcttacggctcagccactgtcagggctggggggttctcggtgcaccctggaagcagctcccaccaccggggccacagagaaacccacacaagccccagacacgtggacaagaatactcagagcagcctggctctccacaacttctgaccaagaaccaccggaggcccagcagagcagaacggagcagtctgctgtgccgaggtgggtttctgcagcggacattattcggctatgaaaatgaacttgtggcagcccctctgcatgggcaaccctcatgccaagtgagcaacgtgagacttcagcaaacaccaagatccacgtacaaagctcaaaacaggcaaaactgagcatgtccaggacacgcacaggtggcaaagccataaagcaaaacgaggacatggtcacaggctgggatgtggctaacctcccaggtgacacctggggatggtaaggggctggccaggttccatttcacatgggtgcagcctaaactgcatacagctccttatagttacccacatgtccacaggcctcacgcacttttcttctgtgtcacattccacaacaaaagaacaccacacacaggattctggggaatcccacaggctggaagagccaggagcgtggcctcacctggggttgatctccagcgtgggctgcaggagctgtgcgcgctcctcctgggtcttggccagctgctgcatgcgcaggaagtggcgggcagcccccatctccagcacggtgaccatggcagggtgggtgtccagtcggagggtcacctgtgagcaaagcccggggttgagggtgatagaggttcccaatgtgagagggctggcaggatcttaccaggggtgaaggtcacccagaccacgaggtagcaggcggggtctcaaggactcccctggaccagcgctgctccctccccattacccactaacttgtgggccctgagctgatgccccacgcaaagatactgtgcccgaggggctccaccaccctggtgccccgctgctgcctccaggagctgcccgaatccatcgtcctctgctccatgccagcccaccctgcatgaggccccttcctccaagtgaccatgcatgggacgctcatttctcactctgagctagacaggttggtggggggagtcttagctctctgaagcccacccaaaacccccgactaagcacccaagtgagcatgtgagctcctgagggctggggtagcatgtcccttgtttggaacccccacgtcctcagccattgcagctcccactcaggatgctggtttttcagttctcagttcacacctgctctggagcagggctgggagaaagacacggccttcctgcctcagcggcactcccgagcaacacgtgccgagcagggacccacagggtctccacctgacaccaagggcttctgctgctgctggaaggacacccaacgggccaggtactgggagccaccagctggccagcctgttagggacactgcggccaagtggtggtccatccccgggaaagcctcaccttcacgttggtgacacgcgaccccagcacatttctcatccaggccatgagctcctccgtctccttctctgataggcactcggcggctgcggaagagcaggcgacagggagctcaggcctgcatcccaactccccggcttccatgggggccacgcagcatgcttccagctcccacctcctctcccaccaggatggagacacaagctagcaagatgcttttcatctaaaagtaaaacctcaaaggatgcttcaggttgcctgaggcccatacaacttggttagggctttaaaaaaatacacagcctctcaagaagctgggccagctccagaagccaccgtggcaggagcactggacagacccctgatatctaaaccaggaggcaccttcctccagtcaccagggtgctcccacaaggctcttctcgggggtggctgagcccaggtcaactgacgaaaacccaaaggaagccctcgctgcggggcaggagaggcgtgcggggagtggaaaccagccccacgcctagagagcaggggatgccgacctggggacctgtcctcaaacttctcctccttgtagtgatccacgactatgtccgtctccacagagatcagcttcttcttgtcaaactcacgaaggtgcagcagggtgagctcatcaaactgctcaaagcagaagagaacctgcaggtggccaagagcagctccatcagaccccgggggcctccagccaccacagaagaaaggatgagggcggcaggagggctgggggagccaagcgggccacactggggaacaccggggcagttggggttcctaggcctgcatgacagttactacgacacctgggtctaaggaaggctctgactgccttcaaggcagaagcactccacgcataaagaaatccacatgtggctgagtgcagtggctcacgcctgtaatcccagcactttgggaggccaaagcaggcagatcatgaggtcaggagttcgagaccaacatggtgaaatgccgtctctattaaaaatacaaaaatttgctgggtgtggtggtgtgcacctgtagtcccagctactcaggaggctgaggcaggagaatgacctgaacccaggaggcggaagttgcagtgagccgagatcgcaccactgcactctagcctgggcgagagagcaagactccatctcaaaaaaacaaaaaacaaacaaaaaaaaccacatgtgacctccaagtgggaaacagccgtcacagtcggtccggcctctgtgcccgtgaccctgacccactgtgcagccctgcccggagtcttgggcaggttcacccagcacagagctgagaaggtcaagaccctccccaggttgcagcccccggagcccgccccacccaccgctcacccacctctgtgtctttcttcttcatggcctcatagtagggtgagtgctctgccaggtgacggttgggggcgcacaggtagtagatgttgcgggtgccggcccgcatgcggctggcgtattctgagaggctggttagctgcccggagggcagcgccgaggactcgtagcgcagcagctttgctatgtcctcctagaagggacggggcaggtcaccacttattccaggcccatgggctcaatgttgcccaactaactgggcgcaaaccctccgatgcccatggcctcctggcactccaggctggccctgacccgagggacggtagtggactcgggggttgtccgagagcaggccttgctctgcccatcaggccccttttgggagctctgggggcttaggaagcacctcctgccccaggtggcccaggggctctccagggagctacgcgcaccacgccctgggaggggaccccacccaacagcagagcccggcctggacccagcgtcttccctctgccctcagtgacagagtcagtctctggtgggcacacggacacgggtgaagtccacggttcccggccctcctcacagctggctatggcagagactggctttgcccagtgggtttcagtgggatttggagaagggcccttaggggaggggtttgccctcctccccatcagctgaacgcagctgtgacctctagagctcatgggagctgcagctggaaggacgcagggggaaaacagaaagagggaaaagcaaggagctggacacccaaccagcagggcccaggccacccctgcacacatggtgggtctgcattgataagacatgtcacacgtgcacacctacaaagacctagaaatgtctctgactcttacctgtgtgctgttaactcaaatgaagataaaggagaatgaagaggcctgtgtcagaagctgccgaagtcggcaaacaaccagaacacggcctccttgggaccccacacacgtggtcaccctcctcctgctgctggggagaagggacaccagcacgggatgggctcctgggatgaaatgttctggggttacagtggaggcagccacaccacactgtgaatgcactaaatgccactgaattttacgtgttaaaaggtgaattctgtgaatctgatgctatgtaagttgtatctcaataaaaaatggacaaaaaatgtttatggaa

SEQ ID NO: 126345 - DNA, 2732 bp, Homo sapiens
  Payload ID: 4776
  Gene Symbol: DNASE1
  Gene Name: deoxyribonuclease I
  ENST ID: ENST00000570769
  CDS Start-End: 1638-1898
ggccagcgcttccggtcggcaggaggcggggcgaggcggaagcggcgcttgcttcaggtggagtctgttagtttttgagaaagagttagggcgagtttaaggcactgtggcagctgtgagataaagtctggttcctccccagctggctcaggaaatgttcgcggatacaacggcggccccctctgggcatacctgcctgtggagcggagagtggacggtgtgagggggaccgggagaggcaccaaatctggcctgggggcccgagaagcttcctctcagtgaccacaatatgaatgggaacagcaagatggcaaaagcttgctgagtggtacagcgccagcctgggtagtggcctccccagcaagttgcatgtcactagcttcctgtggctgtcactcctgggcccaggcacctccgaagatcagcacctcctcatgggctcaagcgaggacaggagcccgtcacccatgagctctcaagggcagagccactgtcctgtctcgatggctccaccgtgactccagtggactttggacagtggggagcaggcccaacagggccactcggatgtggtcactctggatttgggtggatcagcaccaagctagactcatccccagcccccaggtgctgttgctgctcctgcgtgaggccccatccacagctgcagctgtggcagggtggctagtggtggccagcatggccctgctgcagctccacgctgtggggggcgtggccctgaccagcagccacccctccatgtgggccacaggggaggagcttaggaagccgccttggcaaggttccgcaggctctgcgtctggtgtggaagagctcacggggaagcactcctgcccaggacccgaggagccggccaccgttcagaaggccccagcttgaaggcctggagagccgcccagcagcacaacacagggaagcttggggaggtttaatttaacctgagaaggctgcagatcctcggggttggtgtaaaaacacctcatcctgatctgagaaggcggtcagcttttctcctcgttgccgttggctgccagcacccattctctgtggatgtgaaaatcccagaagggctgggcttccttcttgggcattccccaggcctatctccagagtggggcccagcatgggaggattgtaccccactcactcccctgatgtggggcttggacctacagctcgacagcacccatggaatgtgggcagaagcgacagcagccagctccgccttggccttagggcggcacgtgttctgcttgtgccctgggagcctccaccttccacactgtgggaagagggtgcccagggagctgcagtctctccagcccagccccaggacgaggcccaggcagcagagccaccccagcagacctggcagtgtgagagaaatgcatgtgtatacactgagtttgcaggtggctgttacatggcagcattgactgacacagacagaaaagagatccacgagggagaagtgagagtgctggagactccacaagccacaggctgcaggggcaggatggcttcttagaagcaaaaggagaaaattgtcatcaaaggatattccagattcttgacagcattctcgtcatctctgaggacatcaccatcatctcaggatgaggggcatgaagctgctgggggcgctgctggcactggcggccctactgcagggggccgtgtccctgaagatcgcagccttcaacatccagacatttggggagaccaagatgtccaatgccaccctcgtcagctacattgtgcagatcctgagccgctatgacatcgccctggtccaggaggtcagagacagccacctgactgccgtggggaagctgctggacaacctcaatcagtgggtgacagtggcagggtcataggaagggatgcaccagacacctatcactacgtggtcagtgagccactgggacggaacagctataaggagcgctacctgttcgtgtacaggcctgaccaggtgtctgcggtggacagctactactacgatgatggctgcgagccctgcgggaacgacaccttcaaccgagagccagccattgtcaggttcttctcccggttcacagaggtcagggagtttgccattgttcccctgcatgcggccccgggggacgcagtagccgagatcgacgctctctatgacgtctacctggatgtccaagagaaatggggcttggaggtgaggccctcccaggggcagtgggcaccagcggcctccgcatgtcccagggccacaggcagcgtttcctggtaggacgtcatgttgatgggcgacttcaatgcgggctgcagctatgtgagaccctcccagtggtcatccatccgcctgtggacaagccccaccttccagtggctgatccccgacagcgctgacaccacagctacacccacgcactgtgcctatgacaggatcgtggttgcagggatgctgctccgaggcgccgttgttcccgactcggctcttccctttaacttccaggctgcctatggcctgagtgaccaactggcccaagccatcagtgaccactatccagtggaggtgatgctgaagtgagcagcccctccccacaccagttgaactgcaggaagagaggacccatcctgccacaggacccagaaaaaaagcccaacacacactcgggttaagaaatacctttaaatttaggtaaataaagctcaaggaggtggggctgtca

SEQ ID NO: 126346 - DNA, 766 bp, Homo sapiens
  Payload ID: 4776
  Gene Symbol: DNASE1
  Gene Name: deoxyribonuclease I
  ENST ID: ENST00000570807
  CDS Start-End: 1-272
atcactacgtggtcagtgagccactgggacggaacagctataaggagcgctacctgttcgtgtacaggcctgaccaggtgtctgcggtggacagctactactacgatgatggctgcgagccctgcgggaacgacaccttcaaccgagagccagccattgtcaggttcttctcccggttcacagggagtgtgcctcacacgacgtggctgtctccacagaggtcagggagtttgccattgttcccctgcatgcggccccgggggacgcagtagccgagatcgacgctctctatgacgtctacctggatgtccaagagaaatggggcttggaggacgtcatgttgatgggcgacttcaatgcgggctgcagctatgtgagaccctcccagtggtcatccatccgcctgtggacaagccccaccttccagtggctgatccccgacagcgctgacaccacagctacacccacgcactgtgcctatgacaggatcgtggttgcagggatgctgctccgaggcgccgttgttcccgactcggctcttccctttaacttccaggctgcctatggcctgagtgaccaactggcccaagccatcagtgaccactatccagtggaggtgatgctgaagtgagcagcccctccccacaccagttgaactgcaggaagagaggacccatcctgccacaggacccagaaaaaaagcccaacacacactcgggttaagaaatacctttaaatttaggtaaataaagctcaaggaggtggg

SEQ ID NO: 126347 - DNA, 528 bp, Homo sapiens
  Payload ID: 4776
  Gene Symbol: DNASE1
  Gene Name: deoxyribonuclease I
  ENST ID: ENST00000570664
  CDS Start-End: 1-327
aaccgagagccagccattgtcaggttcttctcccggttcacagaggtcagggagtttgccattgttcccctgcatgcggccccgggggacgcagtagccgagatcgacgctctctatgacgtctacctggatgtccaagagaaatggggcttggaggacgtcatgttgatgggcgacttcaatgcgggctgcagctatgtgagaccctcccagtggtcatccatccgcctgtggacaagccccaccttccagtggctgatccccgacagcgctgacaccacagctacacccacgcactgtgcctatgacaggctgcctatggcctgagtgaccaactggcccaagccatcagtgaccactatccagtggaggtgatgctgaagtgagcagcccctccccacaccagttgaactgcaggaagagaggacccatcctgccacaggacccagaaaaaaagcccaacacacactcgggttaagaaatacctttaaatttaggtaaataaagctcaaggaggtggggctgtca

SEQ ID NO: 126348 - DNA, 1377 bp, Homo sapiens
  Payload ID: 4776
  Gene Symbol: DNASE1
  Gene Name: deoxyribonuclease I
  ENST ID: ENST00000571460
  CDS Start-End: 380-562
taagtgcaaacgtgattatcaggtgcagtttttacagcagcaagaaacctgtgcttacagaaagaaacacgtgctagcaacccacctatgcggaaagccacacagagccattgttttctgcactctcaggtgacggctcacatttgccccagggaaggtcacagctgcctgaacttttaaaactcccagacacgcactgcctgtgcaggatccggagcccagcagcactgccagggccttgaagtgcttcttcagagacctttcttcatagactacttttttttctttaagcagcaaaaggagaaaattgtcatcaaaggatattccagattcttgacagcattctcgtcatctctgaggacatcaccatcatctcaggatgaggggcatgaagctgctgggggcgctgctggcactggcggccctactgcagggggccgtgtccctgaagatcgcagccttcaacatccagacatttggggagaccaagatgtccaatgccaccctcgtcagctacattgtgcagggatgcaccagacacctatcactacgtggtcagtgagccactgggacggaacagctataaggagcgctacctgttcgtgtacaggcctgaccaggtgtctgcggtggacagctactactacgatgatggctgcgagccctgcgggaacgacaccttcaaccgagagccagccattgtcaggttcttctcccggttcacaggacgtcatgttgatgggcgacttcaatgcgggctgcagctatgtgagaccctcccagtggtcatccatccgcctgtggacaagccccaccttccagtggctgatccccgacagcgctgacaccacagctacacccacgcactgtgcctatgacaggatcgtggttgcagggatgctgctccgaggcgccgttgttcccgactcggctcttccctttaacttccaggctgcctatggcctgagtgaccaactgttctcagttcacacctgctctggagcagggctgggagaaagacacggccttcctgcctcagcggcactcccgagcaacacgtgccgagcagggacccacagggtctccacctgacaccaagggcttctgctgctgctggaaggacacccaacgggccagagatcagcttcttcttgtcaaactcacgaaggtgcagcagggtgagctcatcaaactgctcaaagcagaagagaacctgcaggtggccaagagcagctccatcagaccccgggggcctccagccaccacagaagaaaggatgagggcggcaggagggctgggggagccaagcgggccacactggggaacaccggggcagttggggttcctaggcctgcatgacagttactacgacacctg

SEQ ID NO: 126349 - DNA, 580 bp, Homo sapiens
  Payload ID: 4776
  Gene Symbol: DNASE1
  Gene Name: deoxyribonuclease I
  ENST ID: ENST00000576792
  CDS Start-End: 1-219
tccatccgcctgtggacaagccccaccttccagtggctgatccccgacagcgctgacaccacagctacacccacgcactgtgcctatgacaggatcgtggttgcagggatgctgctccgaggcgccgttgttcccgactcggctcttccctttaacttccaggctgcctatggcctgagtgaccaactggtatgtgtcctcccttgcacagccacatgaggatgggacacaggagctcaggtaggctcagcccagaccctgtgcccacttgcctgcaggcccaagccatcagtgaccactatccagtggaggtgatgctgaagtgagcagcccctccccacaccagttgaactgcaggaagagaggacccatcctgccacaggacccagaaaaaaagcccaacacacactcgggttaagaaatacctttaaatttaggtaaataaagctcaaggaggtggggctgtcatctgtggtgtcagtccttctggccccctggctgtcagtgtcgctccagggccttgacaagcagctcattcaagcggcccaccatggccctagggtcgtcaacaagtccagca

SEQ ID NO: 126350 - DNA, 613 bp, Homo sapiens
  Payload ID: 4776
  Gene Symbol: DNASE1
  Gene Name: deoxyribonuclease I
  ENST ID: ENST00000575479
  CDS Start-End: 1-197
ccaccttccagtggctgatccccgacagcgctgacaccacagctacacccacgcactgtgcctatgacaggatcgtggttgcagggatgctgctccgaggcgccgttgttcccgactcggctcttccctttaacttccaggctgcctatggcctgagtgaccaactggtatgtgtcctcccttgcacagccacatgaggatgggacacaggagctcaggttggacaccagctcttcctgtgtcatcccgataccagtatcctgaggagagagacgcactaagtgccaagcccccagcacctggggagccgggtgagtgcaccagcagtcccagggactcaagtggtgtcaatgacattggccagacagggcccagccaggtagcaccagatgctcatcagaaaagactaattctaggggccgggagtgatggttcatgcctgtaatcccagcactatgggaggccaaggcaggcggatcacttgaggccaggagttcaagaccagcctggccaacatggtaaaaccccatctctactaaaaaagaaattagccaggcatgatggcgagcacctgtggttccagctactcggaggctgaggcaggaaaattgct

SEQ ID NO: 126351 - DNA, 541 bp, Homo sapiens
  Payload ID: 4776
  Gene Symbol: DNASE1
  Gene Name: deoxyribonuclease I
  ENST ID: ENST00000572237
  CDS Start-End: 1-227
agcgctacctgttcgtgtacaggcctgaccaggtgtctgcggtggacagctactactacgatgatggctgcgagccctgcgggaacgacaccttcaaccgagagccagccattgtcaggttcttctcccggttcacagggagtgtgcctcacacgacgtggctgtctccacagaggtcagggagtttgccattgttcccctgcatgcggccccgggggacgcagtagccgagatcgacgctctctatgacgtctacctggatgtccaagagaaatggggcttggagctatgtgagaccctcccagtggtcatccatccgcctgtggacaagccccaccttccagtggctgatccccgacagcgctgacaccacagctacacccacgcactgtgcctatgacaggatcgtggttgcagggatgctgctccgaggcgccgttgttcccgactcggctcttccctttaacttccaggctgcctatggcctgagtgaccaactggtatgtgtcctcccttgcacagccacatgaggatgggacac

SEQ ID NO: 126352 - DNA, 582 bp, Homo sapiens
  Payload ID: 4776
  Gene Symbol: DNASE1
  Gene Name: deoxyribonuclease I
  ENST ID: ENST00000570376
  CDS Start-End: 187-369
gcactgcctgtgcaggatccggagcccagcagcactgccagggccttgaagtgcttcttcagagacctttcttcatagactacttttttttctttaagcagcaaaaggagaaaattgtcatcaaaggatattccagattcttgacagcattctcgtcatctctgaggacatcaccatcatctcaggatgaggggcatgaagctgctgggggcgctgctggcactggcggccctactgcagggggccgtgtccctgaagatcgcagccttcaacatccagacatttggggagaccaagatgtccaatgccaccctcgtcagctacattgtgcagggatgcaccagacacctatcactacgtggtcagtgagccactgggacggaacagctataaggagcgctacctgttcgtgtacaggcctgaccaggtgtctgcggtggacagctactactacgatgatggctgcgagccctgcgggaacgacaccttcaaccgagagccagccattgtcaggttcttctcccggttcacagaggtcagggagtttgccattgttcccctgcatgcggccccgggggacgc

SEQ ID NO: 126353 - DNA, 965 bp, Homo sapiens
  Payload ID: 4776
  Gene Symbol: DNASE1
  Gene Name: deoxyribonuclease I
  ENST ID: ENST00000576050
  CDS Start-End: 243-425
gactcattccaggttccgcaggctctgcgtctggtgtggaagagctcacggggaagcactcctgcccaggacccgaggagccggccaccgttcagaaggccccagcttgaaggcctggagagccgcccagcagcacaacacagggaagcttggggagcaaaaggagaaaattgtcatcaaaggatattccagattcttgacagcattctcgtcatctctgaggacatcaccatcatctcaggatgaggggcatgaagctgctgggggcgctgctggcactggcggccctactgcagggggccgtgtccctgaagatcgcagccttcaacatccagacatttggggagaccaagatgtccaatgccaccctcgtcagctacattgtgcagggatgcaccagacacctatcactacgtggtcagtgagccactgggacggaacagctataaggagcgctacctgttcgtgtacaggcctgaccaggtgtctgcggtggacagctactactacgatgatggctgcgagccctgcgggaacgacaccttcaaccgagagccagccattgtcaggttcttctcccggttcacagaggtcagggagtttgccattgttcccctgcatgcggccccgggggacgcagtagccgagatcgacgctctctatgacgtctacctggatgtccaagagaaatggggcttggaggacgtcatgttgatgggcgacttcaatgcgggctgcagctatgtgagaccctcccagtggtcatccatccgcctgtggacaagccccaccttccagtggctgatccccgacagcgctgacaccacagctacacccacgcactgtgcctatgacaggatcgtggttgcagggatgctgctccgaggcgccgttgttcccgactcggctcttccctttaacttccaggctgcctatggcctgagtgaccaactggtatgtgtcct

SEQ ID NO: 126354 - DNA, 1130 bp, Homo sapiens
  Payload ID: 4777
  Gene Symbol: DNASE2B
  Gene Name: deoxyribonuclease II beta
  Uniprot ID: Q8WZ79
  ENST ID: ENST00000370662
  CDS Start-End: 529-990
catgcacagttaaaaatggactttctttcccctgtctttcatgtcacaggcttcatattgatggggaagctgcctattaggggaatagatgacttctcatgtgtattaatgaaagcaatgtattgcaggctgggtagctggtagaaatgttgtgggcgtttgtaagtggaagatttacgccattataaccctaatatattcctgcagagtaacaacacagcctatctaatatacaatgatggagtccctaaacctgtgaattacagcagaaagtatggacacaccaaaggtttactgctgtggaacagagttcaagggttctggctgattcattccatccctcagtttcctccaattccggaagaaggctatgattatccacccacagggagacgaaatggacaaagtggcatctgcataactttcaagtacaaccagtatgaggcaatagattctcagctcttggtctgcaaccccaacgtctatagctgctccatcccagccacctttcaccaggagctcattcacatgccccagctgtgcaccagggccagctcatcagagattcctggcaggctcctcaccacacttcagtcggcccagggacaaaaattcctccattttgcaaagtcggattcttttcttgacgacatctttgcagcctggatggctcaacggctgaagacacacttgttaacagaaacctggcagcgaaaaagacaagagcttccttcaaactgctcccttccttaccatgtctacaatataaaagcaattaaattatcacgacactcttatttcagttcttatcaagatcatgccaagtggtgtatttcccaaaagggcaccaaaaatcgctggacatgtattggagacctaaatcggagtccacaccaagccttcagaagtggaggattcatttgtacccagaattggcaaatttaccaagcatttcaaggattagtattatactatgaaagctgtaagtaaacttggtgaaaggacacaggtactatcattgaaaaccttgacaatgggtcttcttccattacaccttctttatattttaaaggcctgtgaatatacttataacctgcatatcacaaaataaaacatttttctctcatgtt

SEQ ID NO: 126355 - DNA, 1269 bp, Homo sapiens
  Payload ID: 4777
  Gene Symbol: DNASE2B
  Gene Name: deoxyribonuclease II beta
  Uniprot ID: Q8WZ79
  ENST ID: ENST00000370665
  CDS Start-End: 34-1119
atggggaaagtgtcctgctgtggcatgaaataaatgaaacagaaaatgatggcaagactgctaagaacatcctttgctttgctcttccttggcctctttggggtgctgggggcagcaacaatttcatgcagaaatgaagaagggaaagctgtggactggtttactttttataagttacctaaaagacaaaacaaggaaagtggagagactgggttagagtacctgtacctagactctacaactagaagctggaggaagagtgagcaactaatgaatgacaccaagagtgttttgggaaggacattacaacagctatatgaagcatatgcctctaagagtaacaacacagcctatctaatatacaatgatggagtccctaaacctgtgaattacagcagaaagtatggacacaccaaaggtttactgctgtggaacagagttcaagggttctggctgattcattccatccctcagtttcctccaattccggaagaaggctatgattatccacccacagggagacgaaatggacaaagtggcatctgcataactttcaagtacaaccagtatgaggcaatagattctcagctcttggtctgcaaccccaacgtctatagctgctccatcccagccacctttcaccaggagctcattcacatgccccagctgtgcaccagggccagctcatcagagattcctggcaggctcctcaccacacttcagtcggcccagggacaaaaattcctccattttgcaaagtcggattcttttcttgacgacatctttgcagcctggatggctcaacggctgaagacacacttgttaacagaaacctggcagcgaaaaagacaagagcttccttcaaactgctcccttccttaccatgtctacaatataaaagcaattaaattatcacgacactcttatttcagttcttatcaagatcatgccaagtggtgtatttcccaaaagggcaccaaaaatcgctggacatgtattggagacctaaatcggagtccacaccaagccttcagaagtggaggattcatttgtacccagaattggcaaatttaccaagcatttcaaggattagtattatactatgaaagctgtaagtaaacttggtgaaaggacacaggtactatcattgaaaaccttgacaatgggtcttcttccattacaccttctttatattttaaaggcctgtgaatatacttataacctgcatatcacaaaataaaacatttttctctcatgtttaccatttaa

SEQ ID NO: 126356 - DNA, 1955 bp, Homo sapiens
  Payload ID: 4778
  Gene Symbol: DNASE2
  Gene Name: deoxyribonuclease II, lysosomal
  Uniprot ID: O00115
  ENST ID: ENST00000222219
  CDS Start-End: 94-1176
gtgaaaggcgccaggtgccagtcctggcctctgatgtaacccagcgccccgcagtcccgacacagattcctggatctcagccccatagcagctatgatcccgctgctgctggcagcgctgctgtgcgtccccgccggggccctgacctgctacggggactccgggcagcctgtagactggttcgtggtctacaagctgccagctcttagagggtccggggaggcggcgcagagagggctgcagtacaagtatctggacgagagctccggaggctggcgggacggcagggcactcatcaacagcccggagggggccgtgggccgaagcctgcagccgctgtaccggagcaacaccagccagctcgccttcctgctctacaatgaccaaccgcctcaacccagcaaggctcaggactcttccatgcgtgggcacacgaagggtgtcctgctccttgaccacgatgggggcttctggctggtccacagtgtacctaacttccctccaccggcctcctctgctgcatacagctggcctcatagcgcctgtacctacgggcagaccctgctctgtgtgtcttttcccttcgctcagttctcgaagatgggcaagcagctgacctacacctacccctgggtctataactaccagctggaagggatctttgcccaggaattccccgacttggagaatgtggtcaagggccaccacgttagccaagaaccctggaacagcagcatcacactcacatcccaggccggggctgttttccagagctttgccaagttcagcaaatttggagatgacctgtactccggctggttggcagcagcccttggtaccaacctgcaggtccagttctggcacaaaactgtaggcatcctgccctctaactgctcggatatctggcaggttctgaatgtgaaccagatagctttccctggaccagccggcccaagcttcaacagcacagaggaccactccaaatggtgcgtgtccccaaaagggccctggacctgcgtgggtgacatgaatcggaaccagggagaggagcaacggggtgggggcacactgtgtgcccagctgccagccctctggaaagccttccagccgctggtgaagaactaccagccctgtaatggcatggccaggaagcccagcagagcttataagatctaacccttatggccaggtgcagtggctcacgtatgtaatcccagcactttgggaagccaaggagggaggatcacttgaactcaggaattcgagaccagcctgggctacatagtgagaccacatctctactagaacttaaaaaaagttagccaggcacggtgataaatgcctgtagtcccagccactgaagccagaggatcgattgaaccagggagatcatggtcacagtgaactatgattacgccaacctgggtcacatagcaagactctgtttcaaaaaaaaagggggggcgggggacgggtgggtgcagtggctcacatctgtaaccccagcactttgggaggctgagatgggcagatcacttgaggtcaggagttcgagaccagcctggccaacatggtgaaaccccatatccattaaaaatatttaaaaattagccagacatggtggcacgcgtctgtggtcctagctcctcgggaggctgaggcaggagaatcgcttgaactcgggaggcagaggttgtcatgagctgagctaacaccacggcacttcagcctgggtgacagaatgagactctgtgtcaaaaaaataaaaaataaaaaatctaagggctcaggaaccagtttggacttgattttgaatcccagttcatccccttcctagctgtatgaccttgattgtgtgccttaaccgctctgtgacacagtctacctgtctgcaaaatgggaaacataatacctgccatcaggattgttgaggagtaaataaatggaaattggtg

SEQ ID NO: 126357 - DNA, 745 bp, Homo sapiens
  Payload ID: 4778
  Gene Symbol: DNASE2
  Gene Name: deoxyribonuclease II, lysosomal
  ENST ID: ENST00000592506
  CDS Start-End: 92-745
gaaaggcgccaggtgccagtcctggcctctgatgtaacccagcgccccgcagtcccgacacagattcctggatctcagccccatagcagctatgatcccgctgctgctggcagcgctgctgtgcgtccccgccggggccctgacctgctacggggactccgggcagcctgtagactggttcgtggtctacaagctgccagctcttagagggtccggggaggcggcgcagagagggctgcagtacaagtatctggacgagagctccggaggctggcgggacggcagggcactcatcaacagcccggagggggccgtgggccgaagcctgcagccgctgtaccggagcaacaccagccagctcgccttcctgctctacaatgaccaaccgcctcaacccagcaaggctcaggactcttccatgcgtgggcacacgaagggcaagcagctgacctacacctacccctgggtctataactaccagctggaagggatctttgcccaggaattccccgacttggagaatgtggtcaagggccaccacgttagccaagaaccctggaacagcagcatcacactcacatcccaggccggggctgttttccagagctttgccaagttcagcaaatttggagatgacctgtactccggctggttggcagcagcccttggtaccaacctgcaggtccagttctggcacaaaactgtaggcatcctgccctctaactgctcggatatctggcaggtt

SEQ ID NO: 126358 - DNA, 2652 bp, Homo sapiens
  Payload ID: 4779
  Gene Symbol: DNASE1L1
  Gene Name: deoxyribonuclease I-like 1
  Uniprot ID: P49184
  ENST ID: ENST00000014935
  CDS Start-End: 795-1703
cttgaacgcctgacctcgtatccacccgcctcagcctcccaaagtgctgggattacaggcatgagccaccacgcccagcccataatttattgattttttaaaatttgtccagccttctattaccacgtcgaatccattagctacagccatcccatgagaagctgagtggattcagccccacctcctgctcacagaccctgtccgagcacctcatttgtcccaacagcattactgcaggacccccaggacgttggactgccagctccctgggtctcctcctctctggggcagatcctcagtcctcccttgacttcacgactgtggccagatcatgtgtggactgtccctctctttgggtctccagagcgcttgcatcaaacacccctaactcagaagtgtgcagccacactgggactcagaacccaacaacagggacagaagactcacgcccttggggtgcccggtctcgtggcatcaggcatgacttccagctcctgcgccttccccagcaactgctgactggggacccagaccgggagctgagcgacgggcctggcgagcgaagctcggggtctcactcaggcaccagcccctccttgccccaggcttgagtgactcacagccctattcaggcaggagctgctcttctggggtatcgcgatccacttaaggatgaggcagacttggtgacaagctggtctgagcagcgcttccagagccagaactgagcccagtgagagcgcaccctggggcagcctggattcctggggtgtccccggcagccacacacagccatgcactacccaactgcactcctcttcctcatcctggccaatggggcccaggcctttcgcatctgcgccttcaatgcccagcggctgacactggccaaggtggccagggagcaggtgatggacaccttagttcggatactggctcgctgtgacatcatggtgctgcaggaggtggtggactcttccggcagcgccatcccgctcctgcttcgagaactcaatcgatttgatggctctgggccctacagcaccctgagcagcccccagctggggcgcagcacctacatggagacgtatgtgtacttctatcggtcacacaaaacacaggtcctgagttcctacgtgtacaacgatgaggatgacgtctttgcccgggagccatttgtggcccagttctctttgcccagcaatgtccttcccagcctggtgttggtcccgctgcacaccactcctaaggccgtagagaaggagctgaacgccctctacgatgtgtttctggaggtctcccagcactggcagagcaaggacgtgatcctgcttggggacttcaatgctgactgcgcttcactgaccaaaaagcgcctggacaagctggagctgcggactgagccaggcttccactgggtgattgccgatggggaggacaccacagtgcgggccagcacccactgcacctatgaccgcgtcgtgctgcacggggagcgctgccggagtctgctgcacactgcggctgcctttgacttccccacgagcttccagctcaccgaggaggaggccctcaacatcagtgaccactaccccgtggaggtggagctgaagctgagccaggcgcacagcgtccagcctctcagcctcactgttctgttgctgctatcactcctgtcccctcagctgtgccctgctgcctgagcgtccccctacccccccagggcctgctgccttttgggacttaaaccccagcctcccccgtccatccagccctggggctggggggcttcaactatagttgccctgtgactgtagtccacccctgcctgccttgtttgatttggctcttgttctttggttgggcttgtgcctagattaggagaggaagccaggggccctgcactcatgccacctgccaggtagtgtagtatcaggagtggagacaaagtgggctctgggttggggtaggggaagggagggttcagaaagaggaatgaagatgttgtatgacaagaaggaaagttactgagaacaaaaacccagattggtgagataggacacttgtgcagcagatatgccaatgggccatgtttattgtggattggtaagaatcaccaggaaaccattaagccccaatagctacaaggagggtggttaatctgctatatcaaactccttccctgaaaccagcaaacaccgggaaacattttggctcattataatccggtgaacaatgcagtcaggcctgttataaccgctgagcagccacactcgcacctcctgggtgctgtagtctgtgttggtacaggcttctgcatgcctggtaaagtccagccaaggctggtcaaggcaacatctccacacagaaaatctgcaccagttatgtaagctaaaaagctgtgtgaacccaggtgtcccggaaaggggctgcaggacacagcaaaatgccagcagcatgccggacccctcccttccatcctcctctccaaagaagagaggtcaggaaaaacactggctgggacgctagaagggtcatgtgttaactataatcacatttatggtttggaaccatcaccccaaggtaaaaaaaaaataaaaggtattcccaggtatgtttggcaaaataaaataaaggtaattaaaaacctaa

SEQ ID NO: 126359 - DNA, 2249 bp, Homo sapiens
  Payload ID: 4779
  Gene Symbol: DNASE1L1
  Gene Name: deoxyribonuclease I-like 1
  Uniprot ID: P49184
  ENST ID: ENST00000309585
  CDS Start-End: 395-1303
tgtgcacggtcaggtggttcatgtactctggcggggaaggagaagtcaggcgctccgggctcgcccgctaggtcggggccgcggcgtcccccaccctaagtcccacctccggccgggcatgggtacccgggcgggcctgcctcggcctgggcccactcactggtccagaagcagctgtaggtgcccaccaagcccatgacgacgctgctggccagggtccagccctattcaggcaggagctgctcttctggggtatcgcgatccacttaaggatgaggcagacttggtgacaagctggtctgagcagcgcttccagagccagaactgagcccagtgagagcgcaccctggggcagcctggattcctggggtgtccccggcagccacacacagccatgcactacccaactgcactcctcttcctcatcctggccaatggggcccaggcctttcgcatctgcgccttcaatgcccagcggctgacactggccaaggtggccagggagcaggtgatggacaccttagttcggatactggctcgctgtgacatcatggtgctgcaggaggtggtggactcttccggcagcgccatcccgctcctgcttcgagaactcaatcgatttgatggctctgggccctacagcaccctgagcagcccccagctggggcgcagcacctacatggagacgtatgtgtacttctatcggtcacacaaaacacaggtcctgagttcctacgtgtacaacgatgaggatgacgtctttgcccgggagccatttgtggcccagttctctttgcccagcaatgtccttcccagcctggtgttggtcccgctgcacaccactcctaaggccgtagagaaggagctgaacgccctctacgatgtgtttctggaggtctcccagcactggcagagcaaggacgtgatcctgcttggggacttcaatgctgactgcgcttcactgaccaaaaagcgcctggacaagctggagctgcggactgagccaggcttccactgggtgattgccgatggggaggacaccacagtgcgggccagcacccactgcacctatgaccgcgtcgtgctgcacggggagcgctgccggagtctgctgcacactgcggctgcctttgacttccccacgagcttccagctcaccgaggaggaggccctcaacatcagtgaccactaccccgtggaggtggagctgaagctgagccaggcgcacagcgtccagcctctcagcctcactgttctgttgctgctatcactcctgtcccctcagctgtgccctgctgcctgagcgtccccctacccccccagggcctgctgccttttgggacttaaaccccagcctcccccgtccatccagccctggggctggggggcttcaactatagttgccctgtgactgtagtccacccctgcctgccttgtttgatttggctcttgttctttggttgggcttgtgcctagattaggagaggaagccaggggccctgcactcatgccacctgccaggtagtgtagtatcaggagtggagacaaagtgggctctgggttggggtaggggaagggagggttcagaaagaggaatgaagatgttgtatgacaagaaggaaagttactgagaacaaaaacccagattggtgagataggacacttgtgcagcagatatgccaatgggccatgtttattgtggattggtaagaatcaccaggaaaccattaagccccaatagctacaaggagggtggttaatctgctatatcaaactccttccctgaaaccagcaaacaccgggaaacattttggctcattataatccggtgaacaatgcagtcaggcctgttataaccgctgagcagccacactcgcacctcctgggtgctgtagtctgtgttggtacaggcttctgcatgcctggtaaagtccagccaaggctggtcaaggcaacatctccacacagaaaatctgcaccagttatgtaagctaaaaagctgtgtgaacccaggtgtcccggaaaggggctgcaggacacagcaaaatgccagcagcatgccggacccctcccttccatcctcctctccaaagaagagaggtcaggaaaaacactggctgggacgctagaagggtcatgtgttaactataatcacatttatggtttggaaccatcaccccaaggtaaaaaaaaaataaaaggtattcccaggtatgtttggcaaaataaaataaaggtaattaaaaacc

SEQ ID NO: 126360 - DNA, 2110 bp, Homo sapiens
  Payload ID: 4779
  Gene Symbol: DNASE1L1
  Gene Name: deoxyribonuclease I-like 1
  Uniprot ID: P49184
  ENST ID: ENST00000369807
  CDS Start-End: 253-1161
ggggcgtccggcccagccaggcccttcctggccgggtggctcaggaacacagcctcttcctcttttttttcccctcctagccctattcaggcaggagctgctcttctggggtatcgcgatccacttaaggatgaggcagacttggtgacaagctggtctgagcagcgcttccagagccagaactgagcccagtgagagcgcaccctggggcagcctggattcctggggtgtccccggcagccacacacagccatgcactacccaactgcactcctcttcctcatcctggccaatggggcccaggcctttcgcatctgcgccttcaatgcccagcggctgacactggccaaggtggccagggagcaggtgatggacaccttagttcggatactggctcgctgtgacatcatggtgctgcaggaggtggtggactcttccggcagcgccatcccgctcctgcttcgagaactcaatcgatttgatggctctgggccctacagcaccctgagcagcccccagctggggcgcagcacctacatggagacgtatgtgtacttctatcggtcacacaaaacacaggtcctgagttcctacgtgtacaacgatgaggatgacgtctttgcccgggagccatttgtggcccagttctctttgcccagcaatgtccttcccagcctggtgttggtcccgctgcacaccactcctaaggccgtagagaaggagctgaacgccctctacgatgtgtttctggaggtctcccagcactggcagagcaaggacgtgatcctgcttggggacttcaatgctgactgcgcttcactgaccaaaaagcgcctggacaagctggagctgcggactgagccaggcttccactgggtgattgccgatggggaggacaccacagtgcgggccagcacccactgcacctatgaccgcgtcgtgctgcacggggagcgctgccggagtctgctgcacactgcggctgcctttgacttccccacgagcttccagctcaccgaggaggaggccctcaacatcagtgaccactaccccgtggaggtggagctgaagctgagccaggcgcacagcgtccagcctctcagcctcactgttctgttgctgctatcactcctgtcccctcagctgtgccctgctgcctgagcgtccccctacccccccagggcctgctgccttttgggacttaaaccccagcctcccccgtccatccagccctggggctggggggcttcaactatagttgccctgtgactgtagtccacccctgcctgccttgtttgatttggctcttgttctttggttgggcttgtgcctagattaggagaggaagccaggggccctgcactcatgccacctgccaggtagtgtagtatcaggagtggagacaaagtgggctctgggttggggtaggggaagggagggttcagaaagaggaatgaagatgttgtatgacaagaaggaaagttactgagaacaaaaacccagattggtgagataggacacttgtgcagcagatatgccaatgggccatgtttattgtggattggtaagaatcaccaggaaaccattaagccccaatagctacaaggagggtggttaatctgctatatcaaactccttccctgaaaccagcaaacaccgggaaacattttggctcattataatccggtgaacaatgcagtcaggcctgttataaccgctgagcagccacactcgcacctcctgggtgctgtagtctgtgttggtacaggcttctgcatgcctggtaaagtccagccaaggctggtcaaggcaacatctccacacagaaaatctgcaccagttatgtaagctaaaaagctgtgtgaacccaggtgtcccggaaaggggctgcaggacacagcaaaatgccagcagcatgccggacccctcccttccatcctcctctccaaagaagagaggtcaggaaaaacactggctgggacgctagaagggtcatgtgttaactataatcacatttatggtttggaaccatcaccccaaggtaaaaaaaaaataaaaggtattcccaggtatgtttggcaaaataaaataaaggtaattaaaaacctaa

SEQ ID NO: 126361 - DNA, 2666 bp, Homo sapiens
  Payload ID: 4779
  Gene Symbol: DNASE1L1
  Gene Name: deoxyribonuclease I-like 1
  Uniprot ID: P49184
  ENST ID: ENST00000369808
  CDS Start-End: 809-1717
gtggggcgtccggcccagccaggcccttcctggccgggtggctcaggaacacagcctcttcctcttttttttcccctcctagccctattcaggcaggagctgctcttctggggtatcgcgatccacttaaggatgaggcagacttggtgacaagctggtctgagcaggtatgggagccccctggggagacggaagaagggaggaagttgccttctgcctggggagggtttgagagggagagggaagcctagggctcccaccaaggctgatattgacagccagggtttggggctgaagccaggaaccgtcgctctctctggttcttactggtagccctcatgggggtccctgacgccagagcctccaaggctgcatgtgccagcccagggctgcccacatacccatgtatatcccagaataggcaccagggtagggaacccaaactagcatgagtgacagagcaggtggtcagggagaaacagacatcaaacccagccaggagagagacaccgcaacagagagacagagaagggaaaccagagacgagagggaaagtgagacagagacggacagagcctcagagaggtaggaagtgagcccgaagggaaggtgacaggttgatagagaaaagcaggcagacagagcagaggaactcatgcctcaggatgcaaaagccacatggacagggcgtggagcaaggagccgagccctgcaaggtcagcgcttccagagccagaactgagcccagtgagagcgcaccctggggcagcctggattcctggggtgtccccggcagccacacacagccatgcactacccaactgcactcctcttcctcatcctggccaatggggcccaggcctttcgcatctgcgccttcaatgcccagcggctgacactggccaaggtggccagggagcaggtgatggacaccttagttcggatactggctcgctgtgacatcatggtgctgcaggaggtggtggactcttccggcagcgccatcccgctcctgcttcgagaactcaatcgatttgatggctctgggccctacagcaccctgagcagcccccagctggggcgcagcacctacatggagacgtatgtgtacttctatcggtcacacaaaacacaggtcctgagttcctacgtgtacaacgatgaggatgacgtctttgcccgggagccatttgtggcccagttctctttgcccagcaatgtccttcccagcctggtgttggtcccgctgcacaccactcctaaggccgtagagaaggagctgaacgccctctacgatgtgtttctggaggtctcccagcactggcagagcaaggacgtgatcctgcttggggacttcaatgctgactgcgcttcactgaccaaaaagcgcctggacaagctggagctgcggactgagccaggcttccactgggtgattgccgatggggaggacaccacagtgcgggccagcacccactgcacctatgaccgcgtcgtgctgcacggggagcgctgccggagtctgctgcacactgcggctgcctttgacttccccacgagcttccagctcaccgaggaggaggccctcaacatcagtgaccactaccccgtggaggtggagctgaagctgagccaggcgcacagcgtccagcctctcagcctcactgttctgttgctgctatcactcctgtcccctcagctgtgccctgctgcctgagcgtccccctacccccccagggcctgctgccttttgggacttaaaccccagcctcccccgtccatccagccctggggctggggggcttcaactatagttgccctgtgactgtagtccacccctgcctgccttgtttgatttggctcttgttctttggttgggcttgtgcctagattaggagaggaagccaggggccctgcactcatgccacctgccaggtagtgtagtatcaggagtggagacaaagtgggctctgggttggggtaggggaagggagggttcagaaagaggaatgaagatgttgtatgacaagaaggaaagttactgagaacaaaaacccagattggtgagataggacacttgtgcagcagatatgccaatgggccatgtttattgtggattggtaagaatcaccaggaaaccattaagccccaatagctacaaggagggtggttaatctgctatatcaaactccttccctgaaaccagcaaacaccgggaaacattttggctcattataatccggtgaacaatgcagtcaggcctgttataaccgctgagcagccacactcgcacctcctgggtgctgtagtctgtgttggtacaggcttctgcatgcctggtaaagtccagccaaggctggtcaaggcaacatctccacacagaaaatctgcaccagttatgtaagctaaaaagctgtgtgaacccaggtgtcccggaaaggggctgcaggacacagcaaaatgccagcagcatgccggacccctcccttccatcctcctctccaaagaagagaggtcaggaaaaacactggctgggacgctagaagggtcatgtgttaactataatcacatttatggtttggaaccatcaccccaaggtaaaaaaaaaataaaaggtattcccaggtatgtttggcaaaataaaataaaggtaattaaaaacctaa

SEQ ID NO: 126362 - DNA, 3008 bp, Homo sapiens
  Payload ID: 4779
  Gene Symbol: DNASE1L1
  Gene Name: deoxyribonuclease I-like 1
  Uniprot ID: P49184
  ENST ID: ENST00000369809
  CDS Start-End: 631-1539
gtactctggcggggaaggagaagtcaggcgctccgggctcgcccgctaggtcggggccgcggcgtcccccaccctaagtcccacctccggccgggcatgggtacccgggcgggcctgcctcggcctgggcccactcactggtccagaagcagctgtaggtgcccaccaagcccatgacgacgctgctggccagggtccagagcgcttgcatcaaacacccctaactcagaagtgtgcagccacactgggactcagaacccaacaacagggacagaagactcacgcccttggggtgcccggtctcgtggcatcaggcatgacttccagctcctgcgccttccccagcaactgctgactggggacccagaccgggagctgagcgacgggcctggcgagcgaagctcggggtctcactcaggcaccagcccctccttgccccaggcttgagtgactcacagccctattcaggcaggagctgctcttctggggtatcgcgatccacttaaggatgaggcagacttggtgacaagctggtctgagcagcgcttccagagccagaactgagcccagtgagagcgcaccctggggcagcctggattcctggggtgtccccggcagccacacacagccatgcactacccaactgcactcctcttcctcatcctggccaatggggcccaggcctttcgcatctgcgccttcaatgcccagcggctgacactggccaaggtggccagggagcaggtgatggacaccttagttcggatactggctcgctgtgacatcatggtgctgcaggaggtggtggactcttccggcagcgccatcccgctcctgcttcgagaactcaatcgatttgatggctctgggccctacagcaccctgagcagcccccagctggggcgcagcacctacatggagacgtatgtgtacttctatcggtcacacaaaacacaggtcctgagttcctacgtgtacaacgatgaggatgacgtctttgcccgggagccatttgtggcccagttctctttgcccagcaatgtccttcccagcctggtgttggtcccgctgcacaccactcctaaggccgtagagaaggagctgaacgccctctacgatgtgtttctggaggtctcccagcactggcagagcaaggacgtgatcctgcttggggacttcaatgctgactgcgcttcactgaccaaaaagcgcctggacaagctggagctgcggactgagccaggcttccactgggtgattgccgatggggaggacaccacagtgcgggccagcacccactgcacctatgaccgcgtcgtgctgcacggggagcgctgccggagtctgctgcacactgcggctgcctttgacttccccacgagcttccagctcaccgaggaggaggccctcaacatcagtgaccactaccccgtggaggtggagctgaagctgagccaggcgcacagcgtccagcctctcagcctcactgttctgttgctgctatcactcctgtcccctcagctgtgccctgctgcctgagcgtccccctacccccccagggcctgctgccttttgggacttaaaccccagcctcccccgtccatccagccctggggctggggggcttcaactatagttgccctgtgactgtagtccacccctgcctgccttgtttgatttggctcttgttctttggttgggcttgtgcctagattaggagaggaagccaggggccctgcactcatgccacctgccaggtagtgtagtatcaggagtggagacaaagtgggctctgggttggggtaggggaagggagggttcagaaagaggaatgaagatgttgtatgacaagaaggaaagttactgagaacaaaaacccagattggtgagataggacacttgtgcagcagatatgccaatgggccatgtttattgtggattggtaagaatcaccaggaaaccattaagccccaatagctacaaggagggtggttaatctgctatatcaaactccttccctgaaaccagcaaacaccgggaaacattttggctcattataatccggtgaacaatgcagtcaggcctgttataaccgctgagcagccacactcgcacctcctgggtgctgtagtctgtgttggtacaggcttctgcatgcctggtaaagtccagccaaggctggtcaaggcaacatctccacacagaaaatctgcaccagttatgtaagctaaaaagctgtgtgaacccaggtgtcccggaaaggggctgcaggacacagcaaaatgccagcagcatgccggacccctcccttccatcctcctctccaaagaagagaggtcaggaaaaacactggctgggacgctagaagggtcatgtgttaactataatcacatttatggtttggaaccatcaccccaaggtaaaaaaaaaataaaaggtattcccaggtatgtttggcaaaataaaataaaggtaattaaaaacctaagaaatggctgtaaactgagattacaaaaaaccagaggccttttgggagccacaggctgggggctggggccaacataccccagctctgggaccaaaagcctttggagtcctgtccctggatacagatgctcaggccacccacctagcactcctctcatttttgctgctcccccaaaagccagcgctgttctacaatagttcaggtcagacatctaagatccccaggccaaaccatgccacacacgtgtctgttccgaggtcttgttacaaatgaccaaaggttagcctagacctttggtcaggtggtgaaggccctgggaatgcaggttctagaaggggtgggggcatggggcccaggaggttgctagagataggaaatggggcaaatcgcaggtgacctcagcagtacctggatgattcccaccaaggaggaatggccaaaccagatgggtgagaacaagcccaatgtgatgcacacctacccttgctaaataaacgctgctggtcagcctctagcccac

SEQ ID NO: 126363 - DNA, 2665 bp, Homo sapiens
  Payload ID: 4779
  Gene Symbol: DNASE1L1
  Gene Name: deoxyribonuclease I-like 1
  Uniprot ID: P49184
  ENST ID: ENST00000393638
  CDS Start-End: 288-1196
gtactctggcggggaaggagaagtcaggcgctccgggctcgcccgctaggtcggggccgcggcgtcccccaccctaagtcccacctccggccgggcatgggtacccgggcgggcctgcctcggcctgggcccactcactggtccagaagcagctgtaggtgcccaccaagcccatgacgacgctgctggccagggtccagcgcttccagagccagaactgagcccagtgagagcgcaccctggggcagcctggattcctggggtgtccccggcagccacacacagccatgcactacccaactgcactcctcttcctcatcctggccaatggggcccaggcctttcgcatctgcgccttcaatgcccagcggctgacactggccaaggtggccagggagcaggtgatggacaccttagttcggatactggctcgctgtgacatcatggtgctgcaggaggtggtggactcttccggcagcgccatcccgctcctgcttcgagaactcaatcgatttgatggctctgggccctacagcaccctgagcagcccccagctggggcgcagcacctacatggagacgtatgtgtacttctatcggtcacacaaaacacaggtcctgagttcctacgtgtacaacgatgaggatgacgtctttgcccgggagccatttgtggcccagttctctttgcccagcaatgtccttcccagcctggtgttggtcccgctgcacaccactcctaaggccgtagagaaggagctgaacgccctctacgatgtgtttctggaggtctcccagcactggcagagcaaggacgtgatcctgcttggggacttcaatgctgactgcgcttcactgaccaaaaagcgcctggacaagctggagctgcggactgagccaggcttccactgggtgattgccgatggggaggacaccacagtgcgggccagcacccactgcacctatgaccgcgtcgtgctgcacggggagcgctgccggagtctgctgcacactgcggctgcctttgacttccccacgagcttccagctcaccgaggaggaggccctcaacatcagtgaccactaccccgtggaggtggagctgaagctgagccaggcgcacagcgtccagcctctcagcctcactgttctgttgctgctatcactcctgtcccctcagctgtgccctgctgcctgagcgtccccctacccccccagggcctgctgccttttgggacttaaaccccagcctcccccgtccatccagccctggggctggggggcttcaactatagttgccctgtgactgtagtccacccctgcctgccttgtttgatttggctcttgttctttggttgggcttgtgcctagattaggagaggaagccaggggccctgcactcatgccacctgccaggtagtgtagtatcaggagtggagacaaagtgggctctgggttggggtaggggaagggagggttcagaaagaggaatgaagatgttgtatgacaagaaggaaagttactgagaacaaaaacccagattggtgagataggacacttgtgcagcagatatgccaatgggccatgtttattgtggattggtaagaatcaccaggaaaccattaagccccaatagctacaaggagggtggttaatctgctatatcaaactccttccctgaaaccagcaaacaccgggaaacattttggctcattataatccggtgaacaatgcagtcaggcctgttataaccgctgagcagccacactcgcacctcctgggtgctgtagtctgtgttggtacaggcttctgcatgcctggtaaagtccagccaaggctggtcaaggcaacatctccacacagaaaatctgcaccagttatgtaagctaaaaagctgtgtgaacccaggtgtcccggaaaggggctgcaggacacagcaaaatgccagcagcatgccggacccctcccttccatcctcctctccaaagaagagaggtcaggaaaaacactggctgggacgctagaagggtcatgtgttaactataatcacatttatggtttggaaccatcaccccaaggtaaaaaaaaaataaaaggtattcccaggtatgtttggcaaaataaaataaaggtaattaaaaacctaagaaatggctgtaaactgagattacaaaaaaccagaggccttttgggagccacaggctgggggctggggccaacataccccagctctgggaccaaaagcctttggagtcctgtccctggatacagatgctcaggccacccacctagcactcctctcatttttgctgctcccccaaaagccagcgctgttctacaatagttcaggtcagacatctaagatccccaggccaaaccatgccacacacgtgtctgttccgaggtcttgttacaaatgaccaaaggttagcctagacctttggtcaggtggtgaaggccctgggaatgcaggttctagaaggggtgggggcatggggcccaggaggttgctagagataggaaatggggcaaatcgcaggtgacctcagcagtacctggatgattcccaccaaggaggaatggccaaaccagatgggtgagaacaagcccaatgtgatgcacacctacccttgctaaataaacgctgctggtcagcctctagcccac

SEQ ID NO: 126364 - DNA, 942 bp, Homo sapiens
  Payload ID: 4779
  Gene Symbol: DNASE1L1
  Gene Name: deoxyribonuclease I-like 1
  ENST ID: ENST00000424626
  CDS Start-End: 632-942
tgtactctggcggggaaggagaagtcaggcgctccgggctcgcccgctaggtcggggccgcggcgtcccccaccctaagtcccacctccggccgggcatgggtacccgggcgggcctgcctcggcctgggcccactcactggtccagaagcagctgtaggtgcccaccaagcccatgacgacgctgctggccagggtccagagcgcttgcatcaaacacccctaactcagaagtgtgcagccacactgggactcagaacccaacaacagggacagaagactcacgcccttggggtgcccggtctcgtggcatcaggcatgacttccagctcctgcgccttccccagcaactgctgactggggacccagaccgggagctgagcgacgggcctggcgagcgaagctcggggtctcactcaggcaccagcccctccttgccccaggcttgagtgactcacagccctattcaggcaggagctgctcttctggggtatcgcgatccacttaaggatgaggcagacttggtgacaagctggtctgagcagcgcttccagagccagaactgagcccagtgagagcgcaccctggggcagcctggattcctggggtgtccccggcagccacacacagccatgcactacccaactgcactcctcttcctcatcctggccaatggggcccaggcctttcgcatctgcgccttcaatgcccagcggctgacactggccaaggtggccagggagcaggtgatggacaccttagttcggatactggctcgctgtgacatcatggtgctgcaggaggtggtggactcttccggcagcgccatcccgctcctgcttcgagaactcaatcgatttgatggctctgggccctacagcaccctgagcagcccccagctggggcgcagcacctacatggagacgtatgtgtacttctatcg

SEQ ID NO: 126365 - DNA, 904 bp, Homo sapiens
  Payload ID: 4779
  Gene Symbol: DNASE1L1
  Gene Name: deoxyribonuclease I-like 1
  ENST ID: ENST00000451865
  CDS Start-End: 281-904
ggcggggaaggagaagtcaggcgctccgggctcgcccgctaggtcggggccgcggcgtcccccaccctaagtcccacctccggccgggcatgggtacccgggcgggcctgcctcggcctgggcccactcactggtccagaagcagctgtaggtgcccaccaagcccatgacgacgctgctggccagggtccagcgcttccagagccagaactgagcccagtgagagcgcaccctggggcagcctggattcctggggtgtccccggcagccacacacagccatgcactacccaactgcactcctcttcctcatcctggccaatggggcccaggcctttcgcatctgcgccttcaatgcccagcggctgacactggccaaggtggccagggagcaggtgatggacaccttagttcggatactggctcgctgtgacatcatggtgctgcaggaggtggtggactcttccggcagcgccatcccgctcctgcttcgagaactcaatcgatttgatggctctgggccctacagcaccctgagcagcccccagctggggcgcagcacctacatggagacgtatgtgtacttctatcggtcacacaaaacacaggtcctgagttcctacgtgtacaacgatgaggatgacgtctttgcccgggagccatttgtggcccagttctctttgcccagcaatgtccttcccagcctggtgttggtcccgctgcacaccactcctaaggccgtagagaaggagctgaacgccctctacgatgtgtttctggaggtctcccagcactggcagagcaaggacgtgatcctgcttggggacttcaatgctgactgcgcttcactgaccaaaaagcgcctggacaagctggagctgcggactgagccaggcttccactgg

SEQ ID NO: 126366 - DNA, 297 bp, Homo sapiens
  Payload ID: 4779
  Gene Symbol: DNASE1L1
  Gene Name: deoxyribonuclease I-like 1
  ENST ID: ENST00000447892
  CDS Start-End: 43-297
cagcctggattcctggggtgtccccggcagccacacacagccatgcactacccaactgcactcctcttcctcatcctggccaatggggcccaggcctttcgcatctgcgccttcaatgcccagcggctgacactggccaaggtggccagggagcaggtgatggacaccttagttcgggccctcaacatcagtgaccactaccccgtggaggtggagctgaagctgagccaggcgcacagcgtccagcctctcagcctcactgttctgttgctgctatcactcctgtcccctcagctg

SEQ ID NO: 126367 - DNA, 847 bp, Homo sapiens
  Payload ID: 4779
  Gene Symbol: DNASE1L1
  Gene Name: deoxyribonuclease I-like 1
  ENST ID: ENST00000432135
  CDS Start-End: 768-847
tactctggcggggaaggagaagtcaggcgctccgggctcgcccgctaggtcggggccgcggcgtcccccaccctaagtcccacctccggccgggcatgggtacccgggcgggcctgcctcggcctgggcccactcactggtccagaagcagctgtaggtgcccaccaagcccatgacgacgctgctggccagggtccagcattactgcaggacccccaggacgttggactgccagctccctgggtctcctcctctctggggcagatcctcagtcctcccttgacttcacgactgtggccagatcatgtgtggactgtccctctctttgggtctccagagcgcttgcatcaaacacccctaactcagaagtgtgcagccacactgggactcagaacccaacaacagggacagaagactcacgcccttggggtgcccggtctcgtggcatcaggcatgacttccagctcctgcgccttccccagcaactgctgactggggacccagaccgggagctgagcgacgggcctggcgagcgaagctcggggtctcactcaggcaccagcccctccttgccccaggcttgagtgactcacagccctattcaggcaggagctgctcttctggggtatcgcgatccacttaaggatgaggcagacttggtgacaagctggtctgagcagcgcttccagagccagaactgagcccagtgagagcgcaccctggggcagcctggattcctggggtgtccccggcagccacacacagccatgcactacccaactgcactcctcttcctcatcctggccaatggggcccaggcctttcgcatctgcgccttcaatgccca

SEQ ID NO: 126368 - DNA, 238 bp, Homo sapiens
  Payload ID: 4779
  Gene Symbol: DNASE1L1
  Gene Name: deoxyribonuclease I-like 1
  ENST ID: ENST00000412184
  CDS Start-End: 51-238
ccctggggcagcctggattcctggggtgtccccggcagccacacacagccatgcactacccaactgcactcctcttcctcatcctggccaatggggcccaggcctttcgcatctgcgccttcaatgcccagcggctgacactggccaaggtggccagggagcaggtgatggacaccttagttcgggacgtgatcctgcttggggacttcaatgctgactgcgcttcactgaccaaaaa

SEQ ID NO: 126369 - DNA, 1326 bp, Homo sapiens
  Payload ID: 4780
  Gene Symbol: DNASE1L2
  Gene Name: deoxyribonuclease I-like 2
  Uniprot ID: Q92874
  ENST ID: ENST00000320700
  CDS Start-End: 134-1033
gtgcagtcctgtgtcggacacgcccgcagcctggacccgggatccccatccccctaggatctctgagcctcgggcctctgcacccacatccaaggcggcagcgtctgtccctcccagcctctcgctccgcgccatgggcgggccccgggctctgctggccgcactctgggcgctggaagccgccgggaccgccgcgcttcgcatcggagccttcaacattcagagcttcggtgacagcaaagtgtcggaccccgcttgcggcagcatcatcgcgaagatcctggctggctatgacctcgcgctggtgcaggaggtgcgagacccagacctcagcgccgtgtccgcgctcatggagcagatcaacagcgtgtccgagcacgagtacagctttgtgagcagccagcccctgggccgggaccagtacaaggagatgtacctgttcgtgtacaggaaagacgcggtgtcggtcgtggacacctacctgtacccagaccccgaggacgtcttcagccgcgagcccttcgtggtcaagttctcggcccccggcaccggtgagcgggccccgcccctcccctcccgccgagctctgacgcccccaccccttcccgcagcagcacagaacctggtgctgatcccgctgcacgcggcgccgcatcaagccgtggcggagatcgacgcgctctacgacgtgtacctggacgtgatcgacaagtggggcaccgacgacatgctgttcctgggcgacttcaacgccgactgcagctatgtgcgggcgcaggactgggccgccatccgtctgaggagcagtgaggtcttcaagtggctcatccctgacagcgccgacaccacggtgggcaactcagactgcgcctacgaccgcattgtggcctgtggcgcccgcctgcgccggagcctgaagccccagtcggccaccgtgcacgacttccaggaggaattcggcctggaccagactcaggctcttgccatcagcgaccactttccagtggaggtgaccctcaagttccaccgatgactcgaggcctggctggggcatgccacctgcagaccctggctctgaggaatggcccaacagtggccccttcagggtggcagccacccttcagtgaggccccaaggcagagtcggctgggcgtggaccaggggccatggacacgtgatgtgctgctctgtacctccgttccccatctgtgggacgggctgcatccagcgacctcatggggtgttgtgagccccatgaggggtgcagggggcactgcccggcagatgtctgctcaataaatgagctgctcccggtcgggccccaca

SEQ ID NO: 126370 - DNA, 1222 bp, Homo sapiens
  Payload ID: 4780
  Gene Symbol: DNASE1L2
  Gene Name: deoxyribonuclease I-like 2
  Uniprot ID: Q92874
  ENST ID: ENST00000382437
  CDS Start-End: 93-929
gcggccgcggagggaaggggtgggtcggtgggtctgacagcgggtctgcgtaggcggcagcgtctgtccctcccagcctctcgctccgcgccatgggcgggccccgggctctgctggccgcactctgggcgctggaagccgccgggaccgccgcgcttcgcatcggagccttcaacattcagagcttcggtgacagcaaagtgtcggaccccgcttgcggcagcatcatcgcgaagatcctggctggctatgacctcgcgctggtgcaggaggtgcgagacccagacctcagcgccgtgtccgcgctcatggagcagatcaacagcgtgtccgagcacgagtacagctttgtgagcagccagcccctgggccgggaccagtacaaggagatgtacctgttcgtgtacaggaaagacgcggtgtcggtcgtggacacctacctgtacccagaccccgaggacgtcttcagccgcgagcccttcgtggtcaagttctcggcccccggcaccgcacagaacctggtgctgatcccgctgcacgcggcgccgcatcaagccgtggcggagatcgacgcgctctacgacgtgtacctggacgtgatcgacaagtggggcaccgacgacatgctgttcctgggcgacttcaacgccgactgcagctatgtgcgggcgcaggactgggccgccatccgtctgaggagcagtgaggtcttcaagtggctcatccctgacagcgccgacaccacggtgggcaactcagactgcgcctacgaccgcattgtggcctgtggcgcccgcctgcgccggagcctgaagccccagtcggccaccgtgcacgacttccaggaggaattcggcctggaccagactcaggctcttgccatcagcgaccactttccagtggaggtgaccctcaagttccaccgatgactcgaggcctggctggggcatgccacctgcagaccctggctctgaggaatggcccaacagtggccccttcagggtggcagccacccttcagtgaggccccaaggcagagtcggctgggcgtggaccaggggccatggacacgtgatgtgctgctctgtacctccgttccccatctgtgggacgggctgcatccagcgacctcatggggtgttgtgagccccatgaggggtgcagggggcactgcccggcagatgtctgctcaataaatgagctgctcccggtcgggccccaca

SEQ ID NO: 126371 - DNA, 2194 bp, Homo sapiens
  Payload ID: 4780
  Gene Symbol: DNASE1L2
  Gene Name: deoxyribonuclease I-like 2
  Uniprot ID: Q92874
  ENST ID: ENST00000564065
  CDS Start-End: 1002-1901
ctgcctcccaggccactcctagactcacgtgcctggccgccccacccaggggcttctgccagccctggcggcgccttggtgctgtgtgggtgtcattggcatgttgaccaacagcctcctgccctgcccagctggagctgtgcccccagctgcgctgcctgaggcctgtgggtgggtgggaggaccagggacggggacagggagatctgggagcctcggcctccaccgcagggtgagcaggtggagcagcagcaggagatgctgggtagggagtgtggctggtcctacctgcgctgccttgctttccctgaagggattctgctcagggaggcagagtctaggcgacctaatttctaggggcgaggacaagaacacagccgcaccgggatgtggctgaccgtctacctccctcctagggggctggcaggggcttctgggacggttttgggacaggtctggggcaccagaaccggctcaggcaggtctcccaccccttaccctgggggtctccatgggaatgaaagccaggagttcatcaggcacccagctgagtcgagggggcgggacccagtgcagcccggcccctccctggcccaggacctcaaataccggcccctgccttggtgccagagctactgccagagggagtcagtgcagtcctgtgtcggacacgcccgcagcctggacccgggatccccatccccctaggatctctgagcctcgggcctctgcacccacatccaaggtgagtctctcggctgccctgagctggggctggatgggccggaccctccattccggctgcagcttcccgcgcagtgagaaggcagcggtccctgagagcccagcagtgccctgggagcctgcagaacgcaggggcggattccgcgtcgcactggccgtcaaggggcggccgcggagggaaggggtgggtcggtgggtctgacagcgggtctgcgtaggcggcagcgtctgtccctcccagcctctcgctccgcgccatgggcgggccccgggctctgctggccgcactctgggcgctggaagccgccgggaccgccgcgcttcgcatcggagccttcaacattcagagcttcggtgacagcaaagtgtcggaccccgcttgcggcagcatcatcgcgaagatcctggctggctatgacctcgcgctggtgcaggaggtgcgagacccagacctcagcgccgtgtccgcgctcatggagcagatcaacagcgtgtccgagcacgagtacagctttgtgagcagccagcccctgggccgggaccagtacaaggagatgtacctgttcgtgtacaggaaagacgcggtgtcggtcgtggacacctacctgtacccagaccccgaggacgtcttcagccgcgagcccttcgtggtcaagttctcggcccccggcaccggtgagcgggccccgcccctcccctcccgccgagctctgacgcccccaccccttcccgcagcagcacagaacctggtgctgatcccgctgcacgcggcgccgcatcaagccgtggcggagatcgacgcgctctacgacgtgtacctggacgtgatcgacaagtggggcaccgacgacatgctgttcctgggcgacttcaacgccgactgcagctatgtgcgggcgcaggactgggccgccatccgtctgaggagcagtgaggtcttcaagtggctcatccctgacagcgccgacaccacggtgggcaactcagactgcgcctacgaccgcattgtggcctgtggcgcccgcctgcgccggagcctgaagccccagtcggccaccgtgcacgacttccaggaggaattcggcctggaccagactcaggctcttgccatcagcgaccactttccagtggaggtgaccctcaagttccaccgatgactcgaggcctggctggggcatgccacctgcagaccctggctctgaggaatggcccaacagtggccccttcagggtggcagccacccttcagtgaggccccaaggcagagtcggctgggcgtggaccaggggccatggacacgtgatgtgctgctctgtacctccgttccccatctgtgggacgggctgcatccagcgacctcatggggtgttgtgagccccatgaggggtgcagggggcactgcccggcagatgtctgctcaataaatgagctgctcccggtcgggccccaca

SEQ ID NO: 126372 - DNA, 1301 bp, Homo sapiens
  Payload ID: 4780
  Gene Symbol: DNASE1L2
  Gene Name: deoxyribonuclease I-like 2
  Uniprot ID: Q92874
  ENST ID: ENST00000567494
  CDS Start-End: 109-1008
gcagtcctgtgtcggacacgcccgcagcctggacccgggatccccatccccctaggatctctgagcctcgggcctctgcacccacatccaagcctctcgctccgcgccatgggcgggccccgggctctgctggccgcactctgggcgctggaagccgccgggaccgccgcgcttcgcatcggagccttcaacattcagagcttcggtgacagcaaagtgtcggaccccgcttgcggcagcatcatcgcgaagatcctggctggctatgacctcgcgctggtgcaggaggtgcgagacccagacctcagcgccgtgtccgcgctcatggagcagatcaacagcgtgtccgagcacgagtacagctttgtgagcagccagcccctgggccgggaccagtacaaggagatgtacctgttcgtgtacaggaaagacgcggtgtcggtcgtggacacctacctgtacccagaccccgaggacgtcttcagccgcgagcccttcgtggtcaagttctcggcccccggcaccggtgagcgggccccgcccctcccctcccgccgagctctgacgcccccaccccttcccgcagcagcacagaacctggtgctgatcccgctgcacgcggcgccgcatcaagccgtggcggagatcgacgcgctctacgacgtgtacctggacgtgatcgacaagtggggcaccgacgacatgctgttcctgggcgacttcaacgccgactgcagctatgtgcgggcgcaggactgggccgccatccgtctgaggagcagtgaggtcttcaagtggctcatccctgacagcgccgacaccacggtgggcaactcagactgcgcctacgaccgcattgtggcctgtggcgcccgcctgcgccggagcctgaagccccagtcggccaccgtgcacgacttccaggaggaattcggcctggaccagactcaggctcttgccatcagcgaccactttccagtggaggtgaccctcaagttccaccgatgactcgaggcctggctggggcatgccacctgcagaccctggctctgaggaatggcccaacagtggccccttcagggtggcagccacccttcagtgaggccccaaggcagagtcggctgggcgtggaccaggggccatggacacgtgatgtgctgctctgtacctccgttccccatctgtgggacgggctgcatccagcgacctcatggggtgttgtgagccccatgaggggtgcagggggcactgcccggcagatgtctgctcaataaatgagctgctcccggtcgggccccaca

SEQ ID NO: 126373 - DNA, 762 bp, Homo sapiens
  Payload ID: 4780
  Gene Symbol: DNASE1L2
  Gene Name: deoxyribonuclease I-like 2
  ENST ID: ENST00000569184
  CDS Start-End: 1-762
ccccgggctctgctggccgcactctgggcgctggaagccgccgggaccgccgcgcttcgcatcggagccttcaacattcagagcttcggtgacagcaaagtgtcggaccccgcttgcggcagcatcatcgcgaagatcctggctggctatgacctcgcgctggtgcaggaggtgcgagacccagacctcagcgccgtgtccgcgctcatggagcagatcaacagcgtgtccgagcacgagtacagctttgtgagcagccagcccctgggccgggaccagtacaaggagatgtacctgttcgtgtacaggaaagacgcggtgtcggtcgtggacacctacctgtacccagaccccgaggacgtcttcagccgcgagcccttcgtggtcaagttctcggcccccggcaccggtgagcgggccccgcccctcccctcccgccgagctctgacgcccccaccccttcccgcagcagcacagaacctggtgctgatcccgctgcacgcggcgccgcatcaagccgtggcggagatcgacgcgctctacgacgtgtacctggacgtgatcgacaagtggggcaccgacgactgggccgccatccgtctgaggagcagtgaggtcttcaagtggctcatccctgacagcgccgacaccacggtgggcaactcagactgcgcctacgaccgcattgtggcctgtggcgcccgcctgcgccggagcctgaagccccagtcggccaccgtgcacgacttccaggaggaattc

SEQ ID NO: 126374 - DNA, 1260 bp, Homo sapiens
  Payload ID: 4780
  Gene Symbol: DNASE1L2
  Gene Name: deoxyribonuclease I-like 2
  Uniprot ID: Q92874
  ENST ID: ENST00000613572
  CDS Start-End: 134-970
gtgcagtcctgtgtcggacacgcccgcagcctggacccgggatccccatccccctaggatctctgagcctcgggcctctgcacccacatccaaggcggcagcgtctgtccctcccagcctctcgctccgcgccatgggcgggccccgggctctgctggccgcactctgggcgctggaagccgccgggaccgccgcgcttcgcatcggagccttcaacattcagagcttcggtgacagcaaagtgtcggaccccgcttgcggcagcatcatcgcgaagatcctggctggctatgacctcgcgctggtgcaggaggtgcgagacccagacctcagcgccgtgtccgcgctcatggagcagatcaacagcgtgtccgagcacgagtacagctttgtgagcagccagcccctgggccgggaccagtacaaggagatgtacctgttcgtgtacaggaaagacgcggtgtcggtcgtggacacctacctgtacccagaccccgaggacgtcttcagccgcgagcccttcgtggtcaagttctcggcccccggcaccgcacagaacctggtgctgatcccgctgcacgcggcgccgcatcaagccgtggcggagatcgacgcgctctacgacgtgtacctggacgtgatcgacaagtggggcaccgacgacatgctgttcctgggcgacttcaacgccgactgcagctatgtgcgggcgcaggactgggccgccatccgtctgaggagcagtgaggtcttcaagtggctcatccctgacagcgccgacaccacggtgggcaactcagactgcgcctacgaccgcattgtggcctgtggcgcccgcctgcgccggagcctgaagccccagtcggccaccgtgcacgacttccaggaggaattcggcctggaccagactcaggctcttgccatcagcgaccactttccagtggaggtgaccctcaagttccaccgatgactcgaggcctggctggggcatgccacctgcagaccctggctctgaggaatggcccaacagtggccccttcagggtggcagccacccttcagtgaggccccaaggcagagtcggctgggcgtggaccaggggccatggacacgtgatgtgctgctctgtacctccgttccccatctgtgggacgggctgcatccagcgacctcatggggtgttgtgagccccatgaggggtgcagggggcactgcccggcagatgtctgctcaataaatgagctgctcccggtcgggcccc

SEQ ID NO: 126375 - DNA, 1294 bp, Homo sapiens
  Payload ID: 4781
  Gene Symbol: DNASE1L3
  Gene Name: deoxyribonuclease I-like 3
  Uniprot ID: Q13609
  ENST ID: ENST00000394549
  CDS Start-End: 318-1235
agatgtcagagctggctcccggttgggatatgagtgactttgtggaggatggcgcctaaatgaggcatgccaatttctgcaccagggtgacgaacataagggctccttaaaggctagcccaatgtatctgtatttccttggggattaaaacccatgatcttcagttcctcagagaactgaaagttgcaaggagaaatccagtaattcctgttatctgcaggctttataagtcagtggagcctgcggaagtggccagaatccagcactccaagcactgctgtcttctcacagagtcttgaagccagagcagcgccaggatgtcacgggagctggccccactgctgcttctcctcctctccatccacagcgccctggccatgaggatctgctccttcaacgtcaggtcctttggggaaagcaagcaggaagacaagaatgccatggatgtcattgtgaaggtcatcaaacgctgtgacatcatactcgtgatggaaatcaaggacagcaacaacaggatctgccccatactgatggagaagctgaacagaaattcaaggagaggcataacgtacaactatgtgattagctctcggcttggaagaaacacatataaagaacaatatgcctttctctacaaggaaaagctggtgtctgtgaagaggagttatcactaccatgactatcaggatggagacgcagatgtgttttccagggagccctttgtggtctggttccaatctccccacactgctgtcaaagacttcgtgattatccccctgcacaccaccccagagacatccgttaaggagatcgatgagttggttgaggtctacacggacgtgaaacaccgctggaaggcggagaatttcattttcatgggtgacttcaatgccggctgcagctacgtccccaagaaggcctggaagaacatccgcttgaggactgaccccaggtttgtttggctgatcggggaccaagaggacaccacggtgaagaagagcaccaactgtgcatatgacaggattgtgcttagaggacaagaaatcgtcagttctgttgttcccaagtcaaacagtgtttttgacttccagaaagcttacaagctgactgaagaggaggccctggatgtcagcgaccactttccagttgaatttaaactacagtcttcaagggccttcaccaacagcaaaaaatctgtcactctaaggaagaaaacaaagagcaaacgctcctagacccaagggtctcatcttattaaccatttcttgcctctaaataaaatgtctctaacaga

SEQ ID NO: 126376 - DNA, 2099 bp, Homo sapiens
  Payload ID: 4781
  Gene Symbol: DNASE1L3
  Gene Name: deoxyribonuclease I-like 3
  ENST ID: ENST00000483681
  CDS Start-End: 583-1449
tttcttcttgctgcttttgggtgactcagcctatgacacttttgctcctcctgaaatctccatatcttgcttttctcaaattccaaggtagcctttgcgcaacatatcactctccactgactcttgtcccatcagggcccatagtggatggctgtatgggggccatgtgactgaactcctgatcctcgtttcagcccactcatgtgacatgcatggagctcttcagcagggacttactgaccaggacaagagcttgagactttgaggggatctgattgtcactgcacaatcaaggacagtattcccaagagtggatgttgctcaagatagtccaaggaattctatgaagaaaaggactccacagacaataaattttggacaccctgtttcaacacagtgcatcttagagactggtgtttgcaagtatatggagcaggaaacttcatcccgaagatggagaccccggggctgtcagcaggcgttaggctttataagtcagtggagcctgcggaagtggccagaatccagcactccaagcactgctgtcttctcacagagtcttgaagccagagcagcgccaggatgtcacgggagctggccccactgctgcttctcctcctctccatccacagcgccctggccatgaggatctgctccttcaacgtcaggtcctttggggaaagcaagcaggaagacaagaatgccatggatgtcattgtgaaggtcatcaaacgctgtgacatcatactcgtgatggaaatcaaggacagcaacaacaggatctgccccatactgatggagaagctgaacagaaattcaaggagaggcataacgtacaactatgtgattagctctcggcttggaagaaacacatataaagaacaatatgcctttctctacaaggaaaagctggtgtctgtgaagaggagttatcactaccatgactatcaggatggagacgcagatgtgttttccagggagccctttgtggtctggttccaatctccccacactgctgtcaaagacttcgtgattatccccctgcacaccaccccagagacatccgttaaggagatcgatgagttggttgaggtctacacggacgtgaaacaccgctggaaggcggagaatttcattttcatgggtgacttcaatgccggctgcagctacgtccccaagaaggcctggaagaacatccgcttgaggactgaccccaggtttgtttggctgatcggggaccaagaggacaccacggtgaagaagagcaccaactgtgcatatgacaggattgtgcttagaggacaagaaatcgtcagttctgttgttcccaagtcaaacagtgtttttgacttccagaaagcttacaagctgactgaagaggaggtaaggttgccatcttgtctttctatgccattgtcctggaaagatgagttagcttgggcaacatgatgagactccatctctatgaaaaattcaaaaaaattagctgggcatggtgatgcatgcctatggtcccagctacttgggaggctgaggtgggaggatcacttgagtccaggaagcggaggttgcagtgagccaagatcgcaccactgcactccaggctgggcaacagagtgagatcctgtctcaaaaaaaaaaaaaaaaaaagatgggttgatgccaccctttgaggtcaccactgaagacacaacattgggcactagaccttgaccctcaatgcctatgattctgtgatttgaggcccctccaaaatttctgatcgagctggtcttggaatgacgcttaccagtaagtgttctgtggggtgacttcgggcatttcctctcccctccctggtcctaaatttgctcatcgctaaaatgaaagcatctcccaggcatctcctaatttccatgtctacctcccctttctccttataggccctggatgtcagcgaccactttccagttgaatttaaactacagtcttcaagggccttcaccaacagcaaaaaatctgtcactctaaggaagaaaacaaagagcaaacgctcctagacccaagggtctcatcttattaaccatttcttgcctctaaataaaatgtctctaacagat

SEQ ID NO: 126377 - DNA, 502 bp, Homo sapiens
  Payload ID: 4781
  Gene Symbol: DNASE1L3
  Gene Name: deoxyribonuclease I-like 3
  ENST ID: ENST00000477209
  CDS Start-End: 1-414
gcagatgtgttttccagggagccctttgtggtctggttccaatctccccacactgctgtcaaagacttcgtgattatccccctgcacaccaccccagagacatccgttaaggagatcgatgagttggttgaggtctacacggacgtgaaacaccgctggaaggcggagaatttcattttcatgggtgacttcaatgccggctgcagctacgtccccaagaaggcctggaagaacatccgcttgaggactgaccccaggtttgtttggctgatcggggaccaagaggacaccacggtgaagaagagcaccaactgtgcatatgacaggccctggatgtcagcgaccactttccagttgaatttaaactacagtcttcaagggccttcaccaacagcaaaaaatctgtcactctaaggaagaaaacaaagagcaaacgctcctagacccaagggtctcatcttattaaccatttcttgcctctaaataaaatgtctctaacaga

SEQ ID NO: 126378 - DNA, 635 bp, Homo sapiens
  Payload ID: 4781
  Gene Symbol: DNASE1L3
  Gene Name: deoxyribonuclease I-like 3
  ENST ID: ENST00000461914
  CDS Start-End: 163-635
tagatgtcagagctggctcccggttgggatatgagtgactttgtggaggatggcgcctaaatgaggctttataagtcagtggagcctgcggaagtggccagaatccagcactccaagcactgctgtcttctcacagagtcttgaagccagagcagcgccaggatgtcacgggagctggccccactgctgcttctcctcctctccatccacagcgccctggccatgaggatctgctccttcaacgtcaggtcctttggggaaagcaagcaggaagacaagaatgccatggatgtcattgtgaaggtcatcaaacgctgtgacatcatactcgtgatggaaatcaaggacagcaacaacaggatctgccccatactgatggagaagctgaacagaaattcaaggagaggcataacgtacaactatgtgattagctctcggcttggaagaaacacatataaagaacaatatgcctttctctacaaggaaaagctggtgtctgtgaagaggagttatcactaccatgactatcaggatggagacgcagatgtgttttccagggagccctttgtggtctggttccaatctccccacactgctgtcaaagacttcgtgattatccccctgcacaccacccc

SEQ ID NO: 126379 - DNA, 786 bp, Homo sapiens
  Payload ID: 4781
  Gene Symbol: DNASE1L3
  Gene Name: deoxyribonuclease I-like 3
  ENST ID: ENST00000460422
  CDS Start-End: 486-786
cagcctatgacacttttgctcctcctgaaatctccatatcttgcttttctcaaattccaaggtagcctttgcgcaacatatcactctccactgactcttgtcccatcagggcccatagtggatggctgtatgggggccatgtgactgaactcctgatcctcgtttcagcccactcatgtgacatgcatggagctcttcagcagggacttactgaccaggacaagagcttgagactttgaggggatctgattgtcactgcacaatcaaggacagtattcccaagagtggatgttgctcaagatagtccaaggaattctatgaagaaaaggactccacagacaataaattttggacaccctgtttcaacacagtgcatcttagagactggtgtttgcaagtatatggagcaggaaacttcatcccgaagatggagaccccggggctgtcagcaggcgttagagtcttgaagccagagcagcgccaggatgtcacgggagctggccccactgctgcttctcctcctctccatccacagcgccctggccatgaggatctgctccttcaacgtcaggtcctttggggaaagcaagcaggaagacaagaatgccatggatgtcattgtgaaggtcatcaaacgctgtgacatcatactcgtgatggaaatcaaggacagcaacaacaggatctgccccatactgatggagaagctgaacagaaattcaaggagaggcataacgtacaactatgtgattagctctcggcttggaagaaacacatataaagaac

SEQ ID NO: 126380 - DNA, 1321 bp, Homo sapiens
  Payload ID: 4781
  Gene Symbol: DNASE1L3
  Gene Name: deoxyribonuclease I-like 3
  Uniprot ID: Q13609
  ENST ID: ENST00000486455
  CDS Start-End: 64-891
agaatccagcactccaagcactgctgtcttctcacagagtcttgaagccagagcagcgccaggatgtcacgggagctggccccactgctgcttctcctcctctccatccacagcgccctggccatgaggatctgctccttcaacgtcaggtcctttggggaaagcaagcaggaagacaagaatgccatggatgtcattgtgaaggtcatcaaacgctgtgacatcatactcgtgatggaaatcaaggacagcaacaacaggatctgccccatactgatggagaagctgaacagggaaaagctggtgtctgtgaagaggagttatcactaccatgactatcaggatggagacgcagatgtgttttccagggagccctttgtggtctggttccaatctccccacactgctgtcaaagacttcgtgattatccccctgcacaccaccccagagacatccgttaaggagatcgatgagttggttgaggtctacacggacgtgaaacaccgctggaaggcggagaatttcattttcatgggtgacttcaatgccggctgcagctacgtccccaagaaggcctggaagaacatccgcttgaggactgaccccaggtttgtttggctgatcggggaccaagaggacaccacggtgaagaagagcaccaactgtgcatatgacaggattgtgcttagaggacaagaaatcgtcagttctgttgttcccaagtcaaacagtgtttttgacttccagaaagcttacaagctgactgaagaggaggccctggatgtcagcgaccactttccagttgaatttaaactacagtcttcaagggccttcaccaacagcaaaaaatctgtcactctaaggaagaaaacaaagagcaaacgctcctagacccaagggtctcatcttattaaccatttcttgcctctaaataaaatgtctctaacagatatgaactgctccctgtacttaggaaacaagagtgatccaactgctttcattttttgacctgaatttattctgacttgagccaaattggaaggagaatcttttgtatctctcttggtctcatacctcccctgaattgtctaaaagggaaccaggggcatttgtagaccaaaatgatgatcttcatgccctgagccagagccccatccactgtcactggccctgctcaaccctgtcatgcgagaggctgcagggggaggaagagcgtcagctttcagtcctcatgaggggtcctgttccacacgcaatgaccagaaacaccaaggccccagctgcccctgtgatttgggcaattaactgttttaagagtctg

SEQ ID NO: 126381 - DNA, 1705 bp, Homo sapiens
  Payload ID: 4782
  Gene Symbol: DERA
  Gene Name: deoxyribose-phosphate aldolase (putative)
  Uniprot ID: Q9Y315
  ENST ID: ENST00000428559
  CDS Start-End: 213-1169
ggtacctcgtggagaagacgggggaggggagcagcgagatttccttgcggagcaatattcctagggtacagacctcgtagcccgggcccgcgactccgccccgggagcgggcaggggcggggcgagcgctccagctggcgggaaggaggaagggccgggcgcggcgcagaggcgggcgcctaccagccggcagctccggagctgcccgcgccatgtccgcgcacaatcggggcaccgagctcgaccttagctggatctccaaaatacaagtgaatcacccggcagttctgaggcgtgcggaacaaatccaggctcgcagaaccgtgaaaaaggagtggcaggctgcttggctcctgaaagctgttacctttatagatcttactacactttcaggtgatgatacatcttccaacattcaaaggctctgttataaagccaaatacccaatccgggaagatctcttaaaagctttaaatatgcatgataaaggcattactacagccgccgtttgtgtttatcccgcccgggtgtgtgatgctgtaaaagcactcaaggctgcaggctgtaatatccctgtggcatcagtggccgctggatttccagctggacagactcatttgaagacacgattagaagagatcagattggctgtggaagatggagctacagaaatcgacgtggtaattaacagaagcttggtgctgacaggccagtgggaagccctgtatgatgagattcgtcagtttcgcaaggcctgtggggaggctcatcttaaaactatattagcgacaggagaacttggaactcttactaatgtctataaagccagtatgatagcaatgatggcaggatcagattttattaagacctctactggaaaagaaacagtaaatgccaccttcccggtagctatagtaatgctgcgggccattagagatttcttctggaaaactggaaacaagatagggtttaaaccagcaggaggcatccgcagtgcaaaggattcccttgcttggctctctcttgtaaaggaggagcttggagatgagtggctgaagccagaactctttcgaataggtgccagtactctgctctcggacattgagaggcagatttaccatcatgtgactggaagatatgcagcttatcatgatcttccaatgtcttaaatcagtcaccagttccagaaaagttctttacgacaatgtttaaaaattatttttctacgtaattgctaaaattatttaattaaaaaattgggcagtaggtaactggcattcctctctttaaaatttctaccgaacttaatggaatggaaaaagcaaactcatccacatgtggtactcatttcaggcacatctgaaatgatcttaattactagaagatctgcactattaactttgtgaagagtttctcctaaaaactttaagtaaaatgttaatggtagctttgataacatcaaattctaagggagaaaaaaacaatattaaaccgcccaagcagtgtgccctagcagaggaaaatgcaacatctcgcaagcgctgctgtaacgacttcaggagtcactgattcagcactaatttcctgctgtgaaaactcatctttcatttttgccgtggataggcgcttttattaattgttgtcctaatgaaatttctgacattgtcatatacaacgatgaatatcattaaaatttttaaaataa

SEQ ID NO: 126382 - DNA, 1619 bp, Homo sapiens
  Payload ID: 4782
  Gene Symbol: DERA
  Gene Name: deoxyribose-phosphate aldolase (putative)
  ENST ID: ENST00000526530
  CDS Start-End: 393-1085
agaggtgaggtacgtggcatgggtaacacacatttcccacgtcgttagacatgtctgtgtgatgaatcaatacaggttcttccagttccaaatgtataggctggtacagaagcaattgtggtttttgcctttgaaagtaatggagtgattttgcatgaaaccttagctggatctccaaaatacaagtgaatcacccggcagttctgaggcgtgcggaacaaatccaggctcgcagaaccgtgaaaaaggagtggcaggctgcttggctcctgaaagctgttacctttatagatcttactacactttcaggtgatgatacatcttccaacattcaaaggctctgttataaagccaaatacccaatccgggaagatctcttaaaagctttaaatatgcatgataaaggcattactacagccgccgtttgtgtttatcccgcccgggtgtgtgatgctgtaaaagcactcaaggctgcaggctgtaatatccctgtggcatcagtggccgctggatttccagctggacagactcatttgaagacacgattagaagagatcagattggctgtggaagatggagctacagaaatcgacgtggtaattaacagaagcttggtgctgacaggccagtgggaagccctgtatgatgagattcgtcagtttcgcaaggcctgtggggaggctcatcttaaaactatattagcgacaggagaacttggaactcttactaatgtctataaagccagtatgatagcaatgatggcaggatcagattttattaagacctctactggaaaagaaacagtaaatgccaccttcccggtagctatagtaatgctgcgggccattagagatttcttctggaaaactggaaacaagatagggtttaaaccagcaggaggcatccgcagtgcaaaggattcccttgcttggctctctcttgtaaaggaggagcttggagatgagtggctgaagccagaactctttcgaataggtgccagtactctgctctcggacattgagaggcagatttaccatcatgtgactggaagatatgcagcttatcatgatcttccaatgtcttaaatcagtcaccagttccagaaaagttctttacgacaatgtttaaaaattatttttctacgtaattgctaaaattatttaattaaaaaattgggcagtaggtaactggcattcctctctttaaaatttctaccgaacttaatggaatggaaaaagcaaactcatccacatgtggtactcatttcaggcacatctgaaatgatcttaattactagaagatctgcactattaactttgtgaagagtttctcctaaaaactttaagtaaaatgttaatggtagctttgataacatcaaattctaagggagaaaaaaacaatattaaaccgcccaagcagtgtgccctagcagaggaaaatgcaacatctcgcaagcgctgctgtaacgacttcaggagtcactgattcagcactaatttcctgctgtgaaaactcatctttcatttttgccgtggataggcgcttttattaattgttgtcctaatgaaatttctgacattgtcatatacaacgatgaatatcattaaaatttttaaaat

SEQ ID NO: 126383 - DNA, 814 bp, Homo sapiens
  Payload ID: 4782
  Gene Symbol: DERA
  Gene Name: deoxyribose-phosphate aldolase (putative)
  ENST ID: ENST00000524480
  CDS Start-End: 520-814
ggcgcggcgcagaggcgggcgcctaccagccggcagctccggagctgcccgcgccatgtccgcgcacaatcggggcaccgagctcgtttgtttcagagaagatgcaatttatcctgagggagaatggaaaagtccaaactttggtagattatgagagtagggttcgatgttagtgaagttttcaaggatggcatgtcaaaaccagacttcctcaggaactgcttcatgtggatatactgatgagcctcagagcatcatgtgatggtgaccagggagtgacctcaagaccttagctggatctccaaaatacaagtgaatcacccggcagttctgaggcgtgcggaacaaatccaggctcgcagaaccgtgaaaaaggagtggcaggctgcttggctcctgaaagctgttacctttatagatcttactacactttcaggtgatgatacatcttccaacattcaaaggctctgttataaagccaaatacccaatccgggaagatctcttaaaagctttaaatatgcatgataaaggcattactacagccgccgtttgtgtttatcccgcccgggtgtgtgatgctgtaaaagcactcaaggctgcaggctgtaatatccctgtggcatcagtggccgctggatttccagctggacagactcatttgaagacacgattagaagagatcagattggctgtggaagatggagctacagaaatcgacgtggtaattaacagaagcttggtgctgacaggccagtgggaagccctgtatgatgagattcgtcagtttcgcaaggcctgtggggaggctcatc

SEQ ID NO: 126384 - DNA, 735 bp, Homo sapiens
  Payload ID: 4782
  Gene Symbol: DERA
  Gene Name: deoxyribose-phosphate aldolase (putative)
  ENST ID: ENST00000531803
  CDS Start-End: 26-735
cggcagctccggagctgcccgcgccatgtccgcgcacaatcggggcaccgagctcgctcgctggttggaaaacccaacaacccaaaaaacaaaacccaaaacaaacaacccccaagcagaccttagctggatctccaaaatacaagtgaatcacccggcagttctgaggcgtgcggaacaaatccaggctcgcagaaccgtgaaaaaggagtggcaggctgcttggctcctgaaagctgttacctttatagatcttactacactttcaggtgatgatacatcttccaacattcaaaggctctgttataaagccaaatacccaatccgggaagatctcttaaaagctttaaatatgcatgataaaggcattactacagccgccgtttgtgtttatcccgcccgggtgtgtgatgctgtaaaagcactcaaggctgcaggctgtaatatccctgtggcatcagtggccgctggatttccagctggacagactcatttgaagacacgattagaagagatcagattggctgtggaagatggagctacagaaatcgacgtggtaattaacagaagcttggtgctgacaggccagtgggaagccctgtatgatgagattcgtcagtttcgcaaggcctgtggggaggctcatcttaaaactatattagcgacaggagaacttggaactcttactaatgtctataaagccagtatgatagcaatgatggcaggatcagattt

SEQ ID NO: 126385 - DNA, 1113 bp, Homo sapiens
  Payload ID: 4782
  Gene Symbol: DERA
  Gene Name: deoxyribose-phosphate aldolase (putative)
  ENST ID: ENST00000528821
  CDS Start-End: 22-222
agctccggagctgcccgcgccatgtccgcgcacaatcggggcaccgagctcgaccttagctggatctccaaaatacaagtgaatcacccggcagttctgaggcgtgcggaacaaatccaggctcgcagaaccgtgaaaaaggagtggcaggtgatgatacatcttccaacattcaaaggctctgttataaagccaaatacccaatccgggaagatctcttaaaagctttaaatatgcatgataaaggcattactacagccgccgtttgtgtttatcccgcccgggtgtgtgatgctgtaaaagcactcaaggctgcaggctgtaatatccctgtggcatcagtggccgctggatttccagctggacagactcatttgaagacacgattagaagagatcagattggctgtggaagatggagctacagaaatcgacgtggtaattaacagaagcttggtgctgacaggccagtgggaagccctgtatgatgagattcgtcagtttcgcaaggcctgtggggaggctcatcttaaaactatattagcgacaggagaacttggaactcttactaatgtctataaagccagtatgatagcaatgatggcaggatcagattttattaagacctctactggaaaagaaacagtaaatgccaccttcccggtagctatagtaatgctgcgggccattagagatttcttctggaaaactggaaacaaggtatattattgccagcaaatctttcttcagagtaaagataatgttatttataatactagttacagccacaataactgtctttatatggagaagttgtgaatgaattacctttattaagataaatgtttaatttacctttcattataaaagaacacactgatggagaaaaattgtgatgaacagaaagtgagttgtgagtgtgggagtgagtatgtgtgatcaagatgtaaactcactttatgtccttttgttaaccgaagacaattttgtcactgacaagagattcctaaatgggttctttaacgaactaattctgctgcaacacagaggctttctcacaaggtgttggccagtgaaaacaggttaatgcagaaattaaacttccttgaggaat

SEQ ID NO: 126386 - DNA, 819 bp, Homo sapiens
  Payload ID: 4782
  Gene Symbol: DERA
  Gene Name: deoxyribose-phosphate aldolase (putative)
  ENST ID: ENST00000533447
  CDS Start-End: 331-819
tgcctgacattgtgtagctgtatcaggctggctttctggaatagctcagtggccaaagattgatcacgaagggtttagagctgtgaaaatgccccagaccttagctggatctccaaaatacaagtgaatcacccggcagttctgaggcgtgcggaacaaatccaggctcgcagaaccgtgaaaaaggagtggcaggctgcttggctcctgaaagctgttacctttatagatcttactacactttcaggtgatgatacatcttccaacattcaaaggctctgttataaagccaaatacccaatccgggaagatctcttaaaagctttaaatatgcatgataaaggcattactacagccgccgtttgtgtttatcccgcccgggtgtgtgatgctgtaaaagcactcaaggctgcaggctgtaatatccctgtggcatcagtggccgctggatttccagctggacagactcatttgaagacacgattagaagagatcagattggctgtggaagatggagctacagaaatcgacgtggtaattaacagaagcttggtgctgacaggccagtgggaagccctgtatgatgagattcgtcagtttcgcaaggcctgtggggaggctcatcttaaaactatattagcgacaggagaacttggaactcttactaatgtctataaagccagtatgatagcaatgatggcaggatcagattttattaagacctctactggaaaagaaacagtaaatgccaccttcccggtagctatagtaatgctgcgggccattagagatttcttctggaaaactggaaacaaggta

SEQ ID NO: 126387 - DNA, 745 bp, Homo sapiens
  Payload ID: 4782
  Gene Symbol: DERA
  Gene Name: deoxyribose-phosphate aldolase (putative)
  ENST ID: ENST00000526521
  CDS Start-End: 83-265
ccagctggcgggaaggaggaagggccgggcgcggcgcagaggcgggcgcctaccagccggcagctccggagctgcccgcgccatgtccgcgcacaatcggggcaccgagctcgaccttagctggatctccaaaatacaagtgaatcacccggcagttctgaggcgtgcggaacaaatccaggctcgcagaaccgtgaaaaaggagtggcaggcattactacagccgccgtttgtgtttatcccgcccgggtgtgtgatgctgtaaaagcactcaaggctgcaggctgtaatatccctgtggcatcagtggccgctggatttccagctggacagactcatttgaagacacgattagaagagatcagattggctgtggaagatggagctacagaaatcgacgtggtaattaacagaagcttggtgctgacaggccagtgggaagccctgtatgatgagattcgtcagtttcgcaaggcctgtggggaggctcatcttaaaactatattagcgacaggagaacttggaactcttactaatgtctataaagccagtatgatagcaatgatggcaggatcagattttattaagacctctactggaaaagaaacagtaaatgccaccttcccggtagctatagtaatgctgcgggccattagagatttcttctggaaaactggaaacaagatagggtttaaaccagcaggaggcatccgcagtgcaaaggattcccttgcttggctctctc

SEQ ID NO: 126388 - DNA, 854 bp, Homo sapiens
  Payload ID: 4782
  Gene Symbol: DERA
  Gene Name: deoxyribose-phosphate aldolase (putative)
  ENST ID: ENST00000532964
  CDS Start-End: 22-849
agctccggagctgcccgcgccatgtccgcgcacaatcggggcaccgagctcgaccttagctggatctccaaaatacaagtgaatcacccggcagttctgaggcgtgcggaacaaatccaggctcgcagaaccgtgaaaaaggagtggcaggctgcttggctcctgaaagctgttacctttatagatcttactacactttcaggtgatgatacatcttccaacattcaaaggctctgttataaagccaaatacccaatccgggaagatctcttaaaagctttaaatatgcatgataaaggcattactacagccgccgtttgtgtttatcccgcccgggtgtgtgatgctgtaaaagcactcaaggctgcaggctgtaatatccctgtggcatcagtggccgctggatttccagctggacagactcatttgaagacacgattagaagagatcagattggctgtggaagatggagctacagaaatcgacgtggtaattaacagaagcttggtgctgacaggccagtgggaaggatcagattttattaagacctctactggaaaagaaacagtaaatgccaccttcccggtagctatagtaatgctgcgggccattagagatttcttctggaaaactggaaacaagatagggtttaaaccagcaggaggcatccgcagtgcaaaggattcccttgcttggctctctcttgtaaaggaggagcttggagatgagtggctgaagccagaactctttcgaataggtgccagtactctgctctcggacattgagaggcagatttaccatcatgtgactggaagatatgcagcttatcatgatcttccaatgtcttaaatcag

SEQ ID NO: 126389 - DNA, 1232 bp, Homo sapiens
  Payload ID: 4783
  Gene Symbol: DTYMK
  Gene Name: deoxythymidylate kinase (thymidylate kinase)
  Uniprot ID: P23919
  ENST ID: ENST00000305784
  CDS Start-End: 209-847
aggacacggctccagtggcggcgcggcccagggcgcaggcgcgggtgtcggtcccaccgcgcgtcgtcctcgccccggccccggccaatcccttcgaatttggccgaggccgggaaatactagctaatcacggcgcgcgctgttgacgccggccaatgggagctccggaaggctgcgtggagacgccagcggcgggcggtggacagtcatggcggcccggcgcggggctctcatagtgctggagggcgtggaccgcgccgggaagagcacgcagagccgcaagctggtggaagcgctgtgcgccgcgggccaccgcgccgaactgctccggttcccggaaagatcaactgaaatcggcaaacttctgagttcctacttgcaaaagaaaagtgacgtggaggatcactcggtgcacctgcttttttctgcaaatcgctgggaacaagtgccgttaattaaggaaaagttgagccagggcgtgaccctcgtcgtggacagatacgcattttctggtgtggccttcaccggtgccaaggagaatttttccctagattggtgtaaacagccagacgtgggccttcccaaacccgacctggtcctgttcctccagttacagctggcggatgctgccaagcggggagcgtttggccatgagcgctatgagaacggggctttccaggagcgggcgctccggtgtttccaccagctcatgaaagacacgactttgaactggaagatggtggatgcttccaaaagcatcgaagctgtccatgaggacatccgcgtgctctctgaggacgccatccgcactgccacagagaagccgctgggggagctatggaagtgacccaaggctgcccactggagacgcctctccctgcagtcccccgagaggtgggagactcgcggaaggccccgtccccagcagagtccagaccccacaacttcaggagctctttcccggcagcagagatctgcaggctgcctcttctgccccggagctggggtgcactggggacccccgtggtggggaccttggcagtgtggacatgagcagagcgatggagcagtctcctgccctctcccctgtcctgatggcactctgttgtattttcttactgaagttcagtgataactctgagcagtttcattgtgatcactgtaaatggtaatcagttggaattctcctaaatgtcttccagacactagtaaaaaacgacctgaaaattgtt

SEQ ID NO: 126390 - DNA, 1089 bp, Homo sapiens
  Payload ID: 4783
  Gene Symbol: DTYMK
  Gene Name: deoxythymidylate kinase (thymidylate kinase)
  ENST ID: ENST00000400770
  CDS Start-End: 162-413
tcggtcccaccgcgcgtcgtcctcgccccggccccggccaatcccttcgaatttggccgaggccgggaaatactagctaatcacggcgcgcgctgttgacgccggccaatgggagctccggaaggctgcgtggagacgccagcggcgggcggtggacagtcatggcggcccggcgcggggctctcatagtgctggagggcgtggaccgcgccgggaagagcacgcagagccgcaagctggtggaagcgctgtgcgccgcgggccaccgcgccgaactgctccggttcccggaaagatcaactgaaatcggcaaacttctgagttcctacttgcaaaagaaaagtgacgtggaggatcactcggtgcacctgcttttttctgcaaatcgctgggaacaagtaatttttccctagattggtgtaaacagccagacgtgggccttcccaaacccgacctggtcctgttcctccagttacagctggcggatgctgccaagcggggagcgtttggccatgagcgctatgagaacggggctttccaggagcgggcgctccggtgtttccaccagctcatgaaagacacgactttgaactggaagatggtggatgcttccaaaagcatcgaagctgtccatgaggacatccgcgtgctctctgaggacgccatccgcactgccacagagaagccgctgggggagctatggaagtgacccaaggctgcccactggagacgcctctccctgcagtcccccgagaggtgggagactcgcggaaggccccgtccccagcagagtccagaccccacaacttcaggagctctttcccggcagcagagatctgcaggctgcctcttctgccccggagctggggtgcactggggacccccgtggtggggaccttggcagtgtggacatgagcagagcgatggagcagtctcctgccctctcccctgtcctgatggcactctgttgtattttcttactgaagttcagtgataactctgagcagtttcattgtgatcactgtaaatggtaatcagttggaattctcctaaatgtcttccagacactagtaaaaaacgacctgaaaa

SEQ ID NO: 126391 - DNA, 575 bp, Homo sapiens
  Payload ID: 4783
  Gene Symbol: DTYMK
  Gene Name: deoxythymidylate kinase (thymidylate kinase)
  ENST ID: ENST00000420144
  CDS Start-End: 1-575
aaagatcaactgaaatcggcaaacttctgagttcctacttgcaaaagaaaagtgacgtggaggatcactcggtgcacctgcttttttctgcaaatcgctgggaacaagttttcattcttgtcgcccagactggagtgcaatggggcgatcttggctcactgcaacctacgcctcgcaggttcaagcgattctcctgcctcagcctctcaagtagctgtgatcacaggccgttaattaaggaaaagttgagccagggcgtgaccctcgtcgtggacagatacgcattttctggtgtggccttcaccggtgccaaggagaatttttccctagattggtgtaaacagccagacgtgggccttcccaaacccgacctggtcctgttcctccagttacagctggcggatgctgccaagcggggagcgtttggccatgagcgctatgagaacggggctttccaggagcgggcgctccggtgtttccaccagctcatgaaagacacgactttgaactggaagatggtggatgcttccaaaagcatcgaagctgtccatgaggacatccgcgtgctctctgag

SEQ ID NO: 126392 - DNA, 518 bp, Homo sapiens
  Payload ID: 4783
  Gene Symbol: DTYMK
  Gene Name: deoxythymidylate kinase (thymidylate kinase)
  ENST ID: ENST00000445261
  CDS Start-End: 1-511
caagctggtggaagcgctgtgcgccgcgggccaccgcgccgaactgctccggttcccggaaagatcaactgaaatcggcaaacttctgagttcctacttgcaaaagaaaagtgacgtggaggatcactcggtgcacctgcttttttctgcaaatcgctgggaacaagttaggtttcctcttcattcaacacttaatgttgataatttttccctagattggtgtaaacagccagacgtgggccttcccaaacccgacctggtcctgttcctccagttacagctggcggatgctgccaagcggggagcgtttggccatgagcgctatgagaacggggctttccaggagcgggcgctccggtgtttccaccagctcatgaaagacacgactttgaactggaagatggtggatgcttccaaaagcatcgaagctgtccatgaggacatccgcgtgctctctgaggacgccatccgcactgccacagagaagccgctgggggagctatggaagtgacccaagg

SEQ ID NO: 126393 - DNA, 926 bp, Homo sapiens
  Payload ID: 4783
  Gene Symbol: DTYMK
  Gene Name: deoxythymidylate kinase (thymidylate kinase)
  ENST ID: ENST00000432348
  CDS Start-End: 1-304
ggaccgcgccgggaagagcacgcagagccgcaagctggtggaagcgctgtgcgccgcgggccaccgcgccgaactgctccggttcccggaaagatcaactgaaatcggcaaacttctgagttcctacttgcaaaagaaaagtgacgtggaggatcactcggtgcacctgcttttttctgcaaatcgctgggaacaagtacagggtctctgtgtcatgcaggctgagtgcagtgcgcaatcacagcttactgcagcctcgacctcccgggttcaagtgatcttcccacctcagcctcccaagtagctgcaactataggcacgttaacacacctggctaatttttgtaaaattttttgtagcgatggagtctcactattgttgcccaggctggtcttgaactcctggacccaagcagtcctcctgccttggtttcccaaagtgctgtgattagaggcatgagccaccctgcctggccttatttttttttaggagaaatgtcttgctctgttgcccaggctggaatgttgtggcatgatcacagcttactgcagccttaaactcctgggttcaagtgatcctcctgcctcagcctctggagtagctaggactacagaatttttccctagattggtgtaaacagccagacgtgggccttcccaaacccgacctggtcctgttcctccagttacagctggcggatgctgccaagcggggagcgtttggccatgagcgctatgagaacggggctttccaggagcgggcgctccggtgtttccaccagctcatgaaagacacgactttgaactggaagatggtggatgcttccaaaagcatcgaagctgtccatgaggacatccgcgtgctctctgaggacgccatccgcactgccacagagaagccgctgggggagctatggaagtgaccca

SEQ ID NO: 126394 - DNA, 2147 bp, Homo sapiens
  Payload ID: 4784
  Gene Symbol: DUT
  Gene Name: deoxyuridine triphosphatase
  Uniprot ID: P33316
  ENST ID: ENST00000331200
  CDS Start-End: 94-852
ggtcatgttcccaggacgggcgcgtcttcagggtggaagcctggcgcacgtccggaggtgccgaggacccaaccagcccaaactctgggggaaatgactcccctctgccctcgccccgcgctctgctaccatttccttacgtctctgcttcgctcagcgatgcaaaacgcgcgaggcgcacggcagagggccgaagccgcggtactctccgggccaggcccgcccctcggccgcgccgcgcagcacgggattccccggccgctgtccagcgctggccgcctgagccaaggctgccgcggagccagtacagtcggggccgctggctggaagggcgagcttcctaaggcggggggaagcccggcgccggggccggagacacccgccatttcacccagtaagcgggcccggcctgcggaggtgggcggcatgcagctccgctttgcccggctctccgagcacgccacggcccccacccggggctccgcgcgcgccgcgggctacgacctgtacagtgcctatgattacacaataccacctatggagaaagctgttgtgaaaacggacattcagatagcgctcccttctgggtgttatggaagagtggctccacggtcaggcttggctgcaaaacactttattgatgtaggagctggtgtcatagatgaagattatagaggaaatgttggtgttgtactgtttaattttggcaaagaaaagtttgaagtcaaaaaaggtgatcgaattgcacagctcatttgcgaacggattttttatccagaaatagaagaagttcaagccttggatgacaccgaaaggggttcaggaggttttggttccactggaaagaattaaaatttatgccaagaacagaaaacaagaagtcatacctttttcttaaaaaaaaaaaaaaagtttttgcttcaagtgttttggtgttttgcacttctgtaaacttactagctttaccttctaaaagtactgcattttttacttttttttatgatcaaggaaaagatcattaaaaaaaaacacaaagaagtttttctttgtgtttggatcaaaaagaaactttgtttttccgcaattgaaggttgtatgtaaatctgctttgtggtgacctgatgtaaacagtgtcttcttaaaatcaaatgtaaatcaattacagattaaaaaaaaaagcctgtatttaactcatatgatctcccttcagcaacttattttgctttaattgctttaaatcttaagcaatattttttattcagtaaacaaattctttcacaaggtacaaaatcttgcataagctgaactaaaataaaaatgaaaaggagagattaaaggtattccttgttcttcccttctcttcactagtctaaaaacttctttttaatcttaagattctttgtgatgagggtgagaaaaagaatcctcagtttatttttccactattaatctttcttttgataaatcctctattgactgggtagaggtatgtttgtgaaagacatgtaacttggggatttgttactttaggtttgttcccttgaatttcatctcatcaggcaaattgtactagttgtagttacgagttttccctcagtgaagtagcaataggctgtaatcaagaaaatatgccatttatagagataagataaatgaaataatacttcagccaccaggtttttctgtctcacatacataagcagcatttcattgcagatatgggactgattctgtggcttaccttgattaacatcttttggaagttttgctagtgtgctttcctttctttactatgtttctcagattcctttgtatcagggttttgggtgtcacttaggttttgtccatcagattctgtgagacaccaggcatcgttttgaggatgtgggttatacacatggagtgcttctggaactatcagcccacttgaccacccagtttgtggaagcacaggcaagagtgttcttttctggtgattctccaggccatttaataccctgcaatgtaattgtccctctgtggctcacatttcattagtgagccatgaaatcaactcagtgggacatagccagcatttttgcataccaggttgggctataaaatatttctgttgtcaataaattttaaatgttttcctgctaaactaa

SEQ ID NO: 126395 - DNA, 1935 bp, Homo sapiens
  Payload ID: 4784
  Gene Symbol: DUT
  Gene Name: deoxyuridine triphosphatase
  Uniprot ID: P33316
  ENST ID: ENST00000455976
  CDS Start-End: 150-644
agccagaactgtggactcgtcccggggaggggcggtgggtggggcggggctggcgggaaatttcggttttggcgcgctccctgcggcgacgctcatcgtgcgctctcctcttcccccggtggtctcctcgctcgccttctggctctgccatgccctgctctgaagagacacccgccatttcacccagtaagcgggcccggcctgcggaggtgggcggcatgcagctccgctttgcccggctctccgagcacgccacggcccccacccggggctccgcgcgcgccgcgggctacgacctgtacagtgcctatgattacacaataccacctatggagaaagctgttgtgaaaacggacattcagatagcgctcccttctgggtgttatggaagagtggctccacggtcaggcttggctgcaaaacactttattgatgtaggagctggtgtcatagatgaagattatagaggaaatgttggtgttgtactgtttaattttggcaaagaaaagtttgaagtcaaaaaaggtgatcgaattgcacagctcatttgcgaacggattttttatccagaaatagaagaagttcaagccttggatgacaccgaaaggggttcaggaggttttggttccactggaaagaattaaaatttatgccaagaacagaaaacaagaagtcatacctttttcttaaaaaaaaaaaaaaagtttttgcttcaagtgttttggtgttttgcacttctgtaaacttactagctttaccttctaaaagtactgcattttttacttttttttatgatcaaggaaaagatcattaaaaaaaaacacaaagaagtttttctttgtgtttggatcaaaaagaaactttgtttttccgcaattgaaggttgtatgtaaatctgctttgtggtgacctgatgtaaacagtgtcttcttaaaatcaaatgtaaatcaattacagattaaaaaaaaaagcctgtatttaactcatatgatctcccttcagcaacttattttgctttaattgctttaaatcttaagcaatattttttattcagtaaacaaattctttcacaaggtacaaaatcttgcataagctgaactaaaataaaaatgaaaaggagagattaaaggtattccttgttcttcccttctcttcactagtctaaaaacttctttttaatcttaagattctttgtgatgagggtgagaaaaagaatcctcagtttatttttccactattaatctttcttttgataaatcctctattgactgggtagaggtatgtttgtgaaagacatgtaacttggggatttgttactttaggtttgttcccttgaatttcatctcatcaggcaaattgtactagttgtagttacgagttttccctcagtgaagtagcaataggctgtaatcaagaaaatatgccatttatagagataagataaatgaaataatacttcagccaccaggtttttctgtctcacatacataagcagcatttcattgcagatatgggactgattctgtggcttaccttgattaacatcttttggaagttttgctagtgtgctttcctttctttactatgtttctcagattcctttgtatcagggttttgggtgtcacttaggttttgtccatcagattctgtgagacaccaggcatcgttttgaggatgtgggttatacacatggagtgcttctggaactatcagcccacttgaccacccagtttgtggaagcacaggcaagagtgttcttttctggtgattctccaggccatttaataccctgcaatgtaattgtccctctgtggctcacatttcattagtgagccatgaaatcaactcagtgggacatagccagcatttttgcataccaggttgggctataaaatatttctgttgtcaataaattttaaatgttttcctgctaaa

SEQ ID NO: 126396 - DNA, 724 bp, Homo sapiens
  Payload ID: 4784
  Gene Symbol: DUT
  Gene Name: deoxyuridine triphosphatase
  ENST ID: ENST00000558472
  CDS Start-End: 61-724
tggaagcctggcgcacgtccggaggtgccgaggacccaaccagcccaaactctgggggaaatgactcccctctgccctcgccccgcgctctgctaccatttccttacgtctctgcttcgctcagcgatgcaaaacgcgcgaggcgcacggcagagggccgaagccgcggtactctccgggccaggcccgcccctcggccgcgccgcgcagcacgggattccccggccgctgtccagcgctggccgcctgagccaaggctgccgcggagccaagacacccgccatttcacccagtaagcgggcccggcctgcggaggtgggcggcatgcagctccgctttgcccggctctccgagcacgccacggcccccacccggggctccgcgcgcgccgcgggctacgacctgtacagtgcctatgattacacaataccacctatggagaaagctgttgtgaaaacggacattcagatagcgctcccttctgggtgttatggaagagtggctccacggtcaggcttggctgcaaaacactttattgatgtaggagctggtgtcatagatgaagattatagaggaaatgttggtgttgtactgtttaattttggcaaagaaaagtttgaagtcaaaaaaggtgatcgaattgcacagctcatttgcgaacggattttttatccagaaatagaagaagttcaagccttggatgacaccgaaaggggttcaggag

SEQ ID NO: 126397 - DNA, 1171 bp, Homo sapiens
  Payload ID: 4784
  Gene Symbol: DUT
  Gene Name: deoxyuridine triphosphatase
  ENST ID: ENST00000558978
  CDS Start-End: 44-724
tccggaggtgccgaggacccaaccagcccaaactctgggggaaatgactcccctctgccctcgccccgcgctctgctaccatttccttacgtctctgcttcgctcagcgatgcaaaacgcgcgaggcgcacggcagagggccgaagccgcggtactctccgggccaggcccgcccctcggccgcgccgcgcagcacgggattccccggccgctgtccagcgctggccgcctgagccaaggctgccgcggagccagtacagtcggggccgctggctggaagggcgagcttcctaaggcggggggaagcccggcgccggggccggagacacccgccatttcacccagtaagcgggcccggcctgcggaggtgggcggcatgcagctccgctttgcccggctctccgagcacgccacggcccccacccggggctccgcgcgcgccgcgggctacgacctgtacagtgcctatgattacacaataccacctatggagaaagctgttgtgaaaacggacattcagatagcgctcccttctgggtgttatggaagagtggctccacggtcaggcttggctgcaaaacactttattgatgtaggagctggtgtcatagatgaagattatagaggaaatgttggtgttgtactgtttaattttggcaaagaaaagtttgaaggatatggcgaatgtgtcagtaacgtcagtaataaactattctttctttgaagtcaaaaaaggtgatcgaattgcacagctcatttgcgaacggattttttatccagaaatagaagaagttcaagccttggatgacaccgaaaggggttcaggaggttttggttccactggaaagaattaaaatttatgccaagaacagaaaacaagaagtcatacctttttcttaaaaaaaaaaaaaaagtttttgcttcaagtgttttggtgttttgcacttctgtaaacttactagctttaccttctaaaagtactgcattttttacttttttttatgatcaaggaaaagatcattaaaaaaaaacacaaagaagtttttctttgtgtttggatcaaaaagaaactttgtttttccgcaattgaaggttgtatgtaaatctgctttgtggtgacctgatgtaaacagtgtcttcttaaaatcaaatgtaaatcaattacagatta

SEQ ID NO: 126398 - DNA, 569 bp, Homo sapiens
  Payload ID: 4784
  Gene Symbol: DUT
  Gene Name: deoxyuridine triphosphatase
  ENST ID: ENST00000559935
  CDS Start-End: 157-558
ataaacactacaacgtctgacactcggtgctgaaaggaaatcgggcgcggtgtcttgcccacagcttggggagcggccccgggcgcaataactgtcaccggcgccgagatgcggttccggcgcttagggcgccgctaaactcagagcccgggagtcatggctgcgggcggtgccgccccagagacacccgccatttcacccagtaagcgggcccggcctgcggaggtgggcggcatgcagctccgctttgcccggctctccgagcacgccacggcccccacccggggctccgcgcgcgccgcgggctacgacctgtacagtgcctatgattacacaataccacctatggagaaagctgttgtgaaaacggacattcagatagcgctcccttctgggtgttatggaagagtggctccacggtcaggcttggctgcaaaacactttattgatgtaggagctggtgtcatagatgaagattatagaggaaatgttggtgttgtactgtttaattttggcaaagaaaagtttgaagacaggatatggcgaatgtgtcagtaacgtcagtaata

SEQ ID NO: 126399 - DNA, 627 bp, Homo sapiens
  Payload ID: 4784
  Gene Symbol: DUT
  Gene Name: deoxyuridine triphosphatase
  ENST ID: ENST00000558367
  CDS Start-End: 307-627
ggtgagcggggacctgccggcgaggaggctgggaagggccggccgtccgctgccacagctagaaacagtcaccggagagatcacaggaacacactagctataaataggatttctgcctttttcgtgtttaaaattttagctttcatctttggcataaattaaatagagatttgggcaaagactgcagaataagtaaaatagctatacggtgtctagcaaggcgttactttgcaacgtttattgtgcccttcctaaatagaagatagagaggaaggcccatggtggctttcgagtggcccgagggtgatgctgtgctcaatagaaaaaccaagtgcctatgattacacaataccacctatggagaaagctgttgtgaaaacggacattcagatagcgctcccttctgggtgttatggaagagtggctccacggtcaggcttggctgcaaaacactttattgatgtaggagctggtgtcatagatgaagattatagaggaaatgttggtgttgtactgtttaattttggcaaagaaaagtttgaagtcaaaaaaggtgatcgaattgcacagctcatttgcgaacggattttttatccagaaatagaagaagttcaagccttggatgac

SEQ ID NO: 126400 - DNA, 769 bp, Homo sapiens
  Payload ID: 4784
  Gene Symbol: DUT
  Gene Name: deoxyuridine triphosphatase
  ENST ID: ENST00000558813
  CDS Start-End: 129-554
ggctgcgactgcttccgaggtcatgttcccaggacgggcgcgtcttcagggtggaagcctggcgcacgtccggagagacacccgccatttcacccagtaagcgggcccggcctgcggaggtgggcggcatgcagctccgctttgcccggctctccgagcacgccacggcccccacccggggctccgcgcgcgccgcgggctacgacctgtacagtgcctatgattacacaataccacctatggagaaagctgttgtgaaaacggacattcagatagcgctcccttctgggtgttatggaagagtggctccacggtcaggcttggctgcaaaacactttattgatgtaggagctggtgtcatagatgaagattatagaggaaatgttggtgttgtactgtttaattttggcaaagaaaagtttgaagtcaaaaaaggtgatcgaattgcacagctcatttgcgaacggattttttatccagaaatagaagaagttcaagccttggatgacaccgaaaggggttcaggaggttttggttccactggaaagaattaaaatttatgccaagaacagaaaacaagaagtcatacctttttcttaaaaaaaaaaaaaaagtttttgcttcaagtgttttggtgttttgcacttctgtaaacttactagctttaccttctaaaagtactgcattttttacttttttttatgatcaaggaaaagatcattaaaaaaaaacacaaagaagtttttctttgtgtttggatcaaaaagaa

SEQ ID NO: 126401 - DNA, 1441 bp, Homo sapiens
  Payload ID: 4784
  Gene Symbol: DUT
  Gene Name: deoxyuridine triphosphatase
  ENST ID: ENST00000559540
  CDS Start-End: 43-474
ctcttcccccggtggtctcctcgctcgccttctggctctgccatgccctgctctgaagagacacccgccatttcacccagtaagcgggcccggcctgcggaggtgggcggcatgcagctccgctttgcccggctctccgagcacgccacggcccccacccggggctccgcgcgcgccgcgggctacgacctgtacagtgcctatgattacacaataccacctatggagaaagctgttgtgaaaacggacattcagatagcgctcccttctgggtgttatggaagagtggctccacggtcaggcttggctgcaaaacactttattgatgtaggagctggtgtcatagatgaagattatagaggaaatgttggtgttgtactgtttaattttggcaaagaaaagtttgaaggtatgttaaatatatacattcacataattttagtgaattttcagagtcatgtatgtgtaaattaatattgactcctttaattctcattgaataagacaggatatggcgaatgtgtcagtaacgtcagtaataaactattctttctttgaagtcaaaaaaggtgatcgaattgcacagctcatttgcgaacggattttttatccagaaatagaagaagttcaagtaagtattacaaaggaagatacagaataagtaatataacatcttaagtgaagaaatatatataatcttgagaatttaatatgctgtttgtaactaaatagtatatatgactaaacttattttaagcaaatttaaaatactagttttagaatttctttaaatgtttttcatgtagctattatgtagtattactttggataataagttatttaaacatactgtgaacttctaatattttattagaattttttaaagttatccagtattctaatttatggagctttttagaatttaattttctttctgtaatctcccttttgaaaagatgatatagcaagagtagaattctggctgtatttttcttaggagctggagaggaaaactgaaagaggctcttaaaaaaaactgtgaagcttactacctttctatctttcaggccttggatgacaccgaaaggggttcaggaggttttggttccactggaaagaattaaaatttatgccaagaacagaaaacaagaagtcatacctttttcttaaaaaaaaaaaaaaagtttttgcttcaagtgttttggtgttttgcacttctgtaaacttactagctttaccttctaaaagtactgcattttttacttttttttatgatcaaggaaaagatcattaaaaaaaaacacaaagaagtttttctttgtgtttggatcaaaaagaaactttgtttttccgcaattgaaggttgtatgtaaatctgctttgtggtgacctgatgtaaacagtgtcttcttaaaatcaaatgtaaatcaattacagatta

SEQ ID NO: 126402 - DNA, 635 bp, Homo sapiens
  Payload ID: 4784
  Gene Symbol: DUT
  Gene Name: deoxyuridine triphosphatase
  ENST ID: ENST00000559416
  CDS Start-End: 73-576
gcaataactgtcaccggcgccgagatgcggttccggcgcttagggcgccgctaaactcagagcccgggagtcatggctgcgggcggtgccgccccagagacacccgccatttcacccagtaagcgggcccggcctgcggaggtgggcggcatgcagctccgctttgcccggctctccgagcacgccacggcccccacccggggctccgcgcgcgccgcgggctacgacctgtacagtgcctatgattacacaataccacctatggagaaagctgttgtgaaaacggacattcagatagcgctcccttctgggtgttatggaagagtggctccacggtcaggcttggctgcaaaacactttattgatgtaggagctggtgtcatagatgaagattatagaggaaatgttggtgttgtactgtttaattttggcaaagaaaagtttgaagtcaaaaaaggtgatcgaattgcacagctcatttgcgaacggattttttatccagaaatagaagaagttcaagccttggatgacaccgaaaggggttcaggaggttttggttccactggaaagaattaaaatttatgccaagaacagaaaacaagaagtcatacctttttcttaaaaaaaaaaaaaaa

SEQ ID NO: 126403 - DNA, 4586 bp, Homo sapiens
  Payload ID: 4785
  Gene Symbol: DEPDC1
  Gene Name: DEP domain containing 1
  Uniprot ID: Q5TB30
  ENST ID: ENST00000370966
  CDS Start-End: 223-1806
agctactggagccccaggacgcagccgagcggccctcgccgactccttcccgagcctggctgtggcgtcacgtgacccgcggcgcggccaatccgcgcagccctctatgctattcaaatcggcggcggggccaacggttgtgccgagactcgccactgccgcggccgctgggcctgagtgtcgccttcgccgccatggacgccaccgggcgctgacagacctatggagagtcagggtgtgcctcccgggccttatcgggccaccaagctgtggaatgaagttaccacatcttttcgagcaggaatgcctctaagaaaacacagacaacactttaaaaaatatggcaattgtttcacagcaggagaagcagtggattggctttatgacctattaagaaataatagcaattttggtcctgaagttacaaggcaacagactatccaactgttgaggaaatttcttaagaatcatgtaattgaagatatcaaagggaggtggggatcagaaaatgttgatgataacaaccagctcttcagatttcctgcaacttcgccacttaaaactctaccacgaaggtatccagaattgagaaaaaacaacatagagaacttttccaaagataaagatagcatttttaaattacgaaacttatctcgtagaactcctaaaaggcatggattacatttatctcaggaaaatggcgagaaaataaagcatgaaataatcaatgaagatcaagaaaatgcaattgataatagagaactaagccaggaagatgttgaagaagtttggagatatgttattctgatctacctgcaaaccattttaggtgtgccatccctagaagaagtcataaatccaaaacaagtaattccccaatatataatgtacaacatggccaatacaagtaaacgtggagtagttatactacaaaacaaatcagatgacctccctcactgggtattatctgccatgaagtgcctagcaaattggccaagaagcaatgatatgaataatccaacttatgttggatttgaacgagatgtattcagaacaatcgcagattattttctagatctccctgaacctctacttacttttgaatattacgaattatttgtaaacattttgggcttgctgcaacctcatttagagagggttgccatcgatgctctacagttatgttgtttgttacttcccccaccaaatcgtagaaagcttcaacttttaatgcgtatgatttcccgaatgagtcaaaatgttgatatgcccaaacttcatgatgcaatgggtacgaggtcactgatgatacataccttttctcgatgtgtgttatgctgtgctgaagaagtggatcttgatgagcttcttgctggaagattagtttctttcttaatggatcatcatcaggaaattcttcaagtaccctcttacttacagactgcagtggaaaaacatcttgactacttaaaaaagggacatattgaaaatcctggagatggactatttgctcctttgccaacttactcatactgtaagcagattagtgctcaggagtttgatgagcaaaaagtttctacctctcaagctgcaattgcagaacttttagaaaatattattaaaaacaggagtttacctctaaaggagaaaagaaaaaaactaaaacagtttcagaaggaatatcctttgatatatcagaaaagatttccaaccacggagagtgaagcagcactttttggtgacaaacctacaatcaagcaaccaatgctgattttaagaaaaccaaagttccgtagtctaagataactaactgaattaaaaattatgtaatacttgtggaactttgataaatgaagccatatctgagaatgtagctactcaaaaggaagtctgtcattaataaggtatttctaaataaacacattatgtaaggaagtgccaaaatagttatcaatgtgagactcttaggaaactaactagatctcaattgagagcacataacaatagatgataccaaatactttttgtttttaacacagctatccagtaaggctatcatgatgtgtgctaaaattttatttacttgaattttgaaaactgagctgtgttagggattaaactataattctgttcttaaaagaaaatttatctgcaaatgtgcaagttctgagatattagctaatgaattagttgtttggggttacttctttgtttctaagtataagaatgtgaagaatatttgaaaactcaatgaaataattctcagctgccaaatgttgcactcttttatatattctttttccacttttgatctatttatatatatgtatgtgtttttaaaatatgtgtatattttatcagatttggttttgccttaaatattatccccaattgcttcagtcattcatttgttcagtatatatattttgaattctagttttcataatctattagaagatggggatataaaagaagtataaggcaatcatatattcattcaaaagatatttatttagcaactgctatgtgcctttcgttgttccagatatgcagagacaatgataaataaaacatataatctcttccataaggtatttattttttaatcaagggagatacacctatcagatgtttaaaataacaacactacccactgaaatcagggcatatagaatcattcagctaaagagtgacttctatgatgatggaacaggtctctaagctagtggttttcaaactggtacacattagactcacccgaggaattttaaaacagcctatatgcccagggcctaacttacactaattaaatctgaattttggggatgttgtatagggattagtattttttttaatctaggtgattccaatattcagccaactgtgagaatcaatggcctaaatgctttttataaacatttttataagtgtcaagataatggcacattgactttattttttcattggaagaaaatgcctgccaagtataaatgactctcatcttaaaacaaggttcttcaggtttctgcttgattgacttggtacaaacttgaagcaagttgccttctaatttttactccaagattgtttcatatctattccttaagtgtaaagaaatatataatgcatggtttgtaataaaatcttaatgtttaatgactgttctcatttctcaatgtaatttcatactgtttctctataaaatgatagtattccatttaacattactgatttttattaaaaacctggacagaaaattataaattataaatatgactttatcctggctataaaattattgaaccaaaatgaattctttctaaggcatttgaatactaaaacgtttattgtttatagatatgtaaaatgtggattatgttgcaaattgagattaaaattatttggggttttgtaacaatataattttgcttttgtattatagacaaatatataaataataaaggcaggcaactttcatttgcactaatgtacatgcaattgagattacaaaatacatggtacaatgctttaataacaaactctgccagtcaggtttgaatcctactgtgctattaactagctagtaaactcagacaagttacttaacttctctaagccccagttttgttatctataaaatgaatattataatagtacctctttttaggattgcgaggattaagcaggataatgcatgtaaagtgttagcacagtgtctcacatagaataagcactctataaatattttactagaatcacctaggattatagcactagaagagatcttagcaaaaatgtggtcctttctgttgctttggacagacatgaaccaaaacaaaattacggacaattgatgagccttattaactatcttttcattatgagacaaaggttctgattatgcctactggttgaaattttttaatctagtcaagaaggaaaatttgatgaggaaggaaggaatggatatcttcagaagggcttcgcctaagctggaacatggatagattccattctaacataaagatctttaagttcaaatatagatgagttgactggtagatttggtggtagttgctttctcgggatataagaagcaaaatcaactgctacaagtaaagaggggatggggaaggtgttgcacatttaaagagagaaagtgtgaaaaagcctaattgtgggaatgcacaggtttcaccagatcagatgatgtctggttattctgtaaattatagttcttatcccagaaattactgcctccaccatccctaatatcttctaattggtatcatataatgacccactcttcttatgttatccaaacagttatgtggcatttagtaatggaatgtacatggaatttcccactgacttacctttctgtccttgggaagcttaaactctgaatcttctcatctgtaaaatgtgaattaaagtatctacctaactgagttgtgattgtagtgaaagaaaggcaatatatttaaatcttgaatttagcaagcccacgcttgatttttatgtcctttcctcttgccttgtattgagtttaagatctctactgattaaaactcttttgctatcaa

SEQ ID NO: 126404 - DNA, 5331 bp, Homo sapiens
  Payload ID: 4785
  Gene Symbol: DEPDC1
  Gene Name: DEP domain containing 1
  Uniprot ID: Q5TB30
  ENST ID: ENST00000456315
  CDS Start-End: 116-2551
tgctattcaaatcggcggcggggccaacggttgtgccgagactcgccactgccgcggccgctgggcctgagtgtcgccttcgccgccatggacgccaccgggcgctgacagacctatggagagtcagggtgtgcctcccgggccttatcgggccaccaagctgtggaatgaagttaccacatcttttcgagcaggaatgcctctaagaaaacacagacaacactttaaaaaatatggcaattgtttcacagcaggagaagcagtggattggctttatgacctattaagaaataatagcaattttggtcctgaagttacaaggcaacagactatccaactgttgaggaaatttcttaagaatcatgtaattgaagatatcaaagggaggtggggatcagaaaatgttgatgataacaaccagctcttcagatttcctgcaacttcgccacttaaaactctaccacgaaggtatccagaattgagaaaaaacaacatagagaacttttccaaagataaagatagcatttttaaattacgaaacttatctcgtagaactcctaaaaggcatggattacatttatctcaggaaaatggcgagaaaataaagcatgaaataatcaatgaagatcaagaaaatgcaattgataatagagaactaagccaggaagatgttgaagaagtttggagatatgttattctgatctacctgcaaaccattttaggtgtgccatccctagaagaagtcataaatccaaaacaagtaattccccaatatataatgtacaacatggccaatacaagtaaacgtggagtagttatactacaaaacaaatcagatgacctccctcactgggtattatctgccatgaagtgcctagcaaattggccaagaagcaatgatatgaataatccaacttatgttggatttgaacgagatgtattcagaacaatcgcagattattttctagatctccctgaacctctacttacttttgaatattacgaattatttgtaaacattttggttgtttgtggctacatcacagtttcagatagatccagtgggatacataaaattcaagatgatccacagtcttcaaaattccttcacttaaacaatttgaattccttcaaatcaactgagtgccttcttctcagtctgcttcatagagaaaaaaacaaagaagaatcagattctactgagagactacagataagcaatccaggatttcaagaaagatgtgctaagaaaatgcagctagttaatttaagaaacagaagagtgagtgctaatgacataatgggaggaagttgtcataatttaatagggttaagtaatatgcatgatctatcctctaacagcaaaccaaggtgctgttctttggaaggaattgtagatgtgccagggaattcaagtaaagaggcatccagtgtctttcatcaatcttttccgaacatagaaggacaaaataataaactgtttttagagtctaagcccaaacaggaattcctgttgaatcttcattcagaggaaaatattcaaaagccattcagtgctggttttaagagaacctctactttgactgttcaagaccaagaggagttgtgtaatgggaaatgcaagtcaaaacagctttgtaggtctcagagtttgcttttaagaagtagtacaagaaggaatagttatatcaatacaccagtggctgaaattatcatgaaaccaaatgttggacaaggcagcacaagtgtgcaaacagctatggaaagtgaactcggagagtctagtgccacaatcaataaaagactctgcaaaagtacaatagaactttcagaaaattctttacttccagcttcttctatgttgactggcacacaaagcttgctgcaacctcatttagagagggttgccatcgatgctctacagttatgttgtttgttacttcccccaccaaatcgtagaaagcttcaacttttaatgcgtatgatttcccgaatgagtcaaaatgttgatatgcccaaacttcatgatgcaatgggtacgaggtcactgatgatacataccttttctcgatgtgtgttatgctgtgctgaagaagtggatcttgatgagcttcttgctggaagattagtttctttcttaatggatcatcatcaggaaattcttcaagtaccctcttacttacagactgcagtggaaaaacatcttgactacttaaaaaagggacatattgaaaatcctggagatggactatttgctcctttgccaacttactcatactgtaagcagattagtgctcaggagtttgatgagcaaaaagtttctacctctcaagctgcaattgcagaacttttagaaaatattattaaaaacaggagtttacctctaaaggagaaaagaaaaaaactaaaacagtttcagaaggaatatcctttgatatatcagaaaagatttccaaccacggagagtgaagcagcactttttggtgacaaacctacaatcaagcaaccaatgctgattttaagaaaaccaaagttccgtagtctaagataactaactgaattaaaaattatgtaatacttgtggaactttgataaatgaagccatatctgagaatgtagctactcaaaaggaagtctgtcattaataaggtatttctaaataaacacattatgtaaggaagtgccaaaatagttatcaatgtgagactcttaggaaactaactagatctcaattgagagcacataacaatagatgataccaaatactttttgtttttaacacagctatccagtaaggctatcatgatgtgtgctaaaattttatttacttgaattttgaaaactgagctgtgttagggattaaactataattctgttcttaaaagaaaatttatctgcaaatgtgcaagttctgagatattagctaatgaattagttgtttggggttacttctttgtttctaagtataagaatgtgaagaatatttgaaaactcaatgaaataattctcagctgccaaatgttgcactcttttatatattctttttccacttttgatctatttatatatatgtatgtgtttttaaaatatgtgtatattttatcagatttggttttgccttaaatattatccccaattgcttcagtcattcatttgttcagtatatatattttgaattctagttttcataatctattagaagatggggatataaaagaagtataaggcaatcatatattcattcaaaagatatttatttagcaactgctatgtgcctttcgttgttccagatatgcagagacaatgataaataaaacatataatctcttccataaggtatttattttttaatcaagggagatacacctatcagatgtttaaaataacaacactacccactgaaatcagggcatatagaatcattcagctaaagagtgacttctatgatgatggaacaggtctctaagctagtggttttcaaactggtacacattagactcacccgaggaattttaaaacagcctatatgcccagggcctaacttacactaattaaatctgaattttggggatgttgtatagggattagtattttttttaatctaggtgattccaatattcagccaactgtgagaatcaatggcctaaatgctttttataaacatttttataagtgtcaagataatggcacattgactttattttttcattggaagaaaatgcctgccaagtataaatgactctcatcttaaaacaaggttcttcaggtttctgcttgattgacttggtacaaacttgaagcaagttgccttctaatttttactccaagattgtttcatatctattccttaagtgtaaagaaatatataatgcatggtttgtaataaaatcttaatgtttaatgactgttctcatttctcaatgtaatttcatactgtttctctataaaatgatagtattccatttaacattactgatttttattaaaaacctggacagaaaattataaattataaatatgactttatcctggctataaaattattgaaccaaaatgaattctttctaaggcatttgaatactaaaacgtttattgtttatagatatgtaaaatgtggattatgttgcaaattgagattaaaattatttggggttttgtaacaatataattttgcttttgtattatagacaaatatataaataataaaggcaggcaactttcatttgcactaatgtacatgcaattgagattacaaaatacatggtacaatgctttaataacaaactctgccagtcaggtttgaatcctactgtgctattaactagctagtaaactcagacaagttacttaacttctctaagccccagttttgttatctataaaatgaatattataatagtacctctttttaggattgcgaggattaagcaggataatgcatgtaaagtgttagcacagtgtctcacatagaataagcactctataaatattttactagaatcacctaggattatagcactagaagagatcttagcaaaaatgtggtcctttctgttgctttggacagacatgaaccaaaacaaaattacggacaattgatgagccttattaactatcttttcattatgagacaaaggttctgattatgcctactggttgaaattttttaatctagtcaagaaggaaaatttgatgaggaaggaaggaatggatatcttcagaagggcttcgcctaagctggaacatggatagattccattctaacataaagatctttaagttcaaatatagatgagttgactggtagatttggtggtagttgctttctcgggatataagaagcaaaatcaactgctacaagtaaagaggggatggggaaggtgttgcacatttaaagagagaaagtgtgaaaaagcctaattgtgggaatgcacaggtttcaccagatcagatgatgtctggttattctgtaaattatagttcttatcccagaaattactgcctccaccatccctaatatcttctaattggtatcatataatgacccactcttcttatgttatccaaacagttatgtggcatttagtaatggaatgtacatggaatttcccactgacttacctttctgtccttgggaagcttaaactctgaatcttctcatctgtaaaatgtgaattaaagtatctacctaactgagttgtgattgtagtgaaagaaaggcaatatatttaaatcttgaatttagcaagcccacgcttgatttttatgtcctttcctcttgccttgtattgagtttaagatctctactgattaaaactcttttgctatcaa

SEQ ID NO: 126405 - DNA, 582 bp, Homo sapiens
  Payload ID: 4785
  Gene Symbol: DEPDC1
  Gene Name: DEP domain containing 1
  ENST ID: ENST00000525124
  CDS Start-End: 481-582
gtgccgagactcgccactgccgcggccgctgggcctgagtgtcgccttcgccgccatggacgccaccgggcgctgacagacctatggagagtcagggtgtgcctcccgggccttatcgggccaccaagctgatttcctgcaacttcgccacttaaaactctaccacgaaggtatccagaattgagaaaaaacaacatagagaacttttccaaagataaagatagcatttttaaattacgaaacttatctcgtagaactcctaaaaggcatggattacatttatctcaggaaaatggcgagaaaataaagcatgaaataatcaatgaagatcaagaaaatgcaattgataatagagaactaagccaggaagatgttgaagaagtttggagatatgttattctgatctacctgcaaaccattttaggtgtgccatccctagaagaagtcataaatccaaaacaagtaattccccaatatataatgtacaacatggccaatacaagtaaacgtggagtagttatactacaaaacaaatcagatgacctccctcactgggtattatctgccatgaagtgcctagca

SEQ ID NO: 126406 - DNA, 1613 bp, Homo sapiens
  Payload ID: 4785
  Gene Symbol: DEPDC1
  Gene Name: DEP domain containing 1
  ENST ID: ENST00000489862
  CDS Start-End: 1-925
gactatccaactgttgaggaaatttcttaagaatcatgtaattgaagatatcaaagggaggtggggatcagaaaatgttgatgataacaaccagctcttcagatttcctgcaacttcgccacttaaaactctaccacgaagaactcctaaaaggcatggattacatttatctcaggaaaatggcgagaaaataaagcatgaaataatcaatgaagatcaagaaaatgcaattgataatagagaactaagccaggaagatgttgaagaagtttggagatatgttattctgatctacctgcaaaccattttaggtgtgccatccctagaagaagtcataaatccaaaacaagtaattccccaatatataatgtacaacatggccaatacaagtaaacgtggagtagttatactacaaaacaaatcagatgacctccctcactgggtattatctgccatgaagtgcctagcaaattggccaagaagcaatgatatgaataatccaacttatgttggatttgaacgagatgtattcagaacaatcgcagattattttctagatctccctgaacctctacttacttttgaatattacgaattatttgtaaacattttgggaaatttcaaggattttaggagctccataccagttgtttgtggctacatcacagtttcagatagatccagtgggatacataaaattcaagatgatccacagtcttcaaaattccttcacttaaacaatttgaattccttcaaatcaactgagtgccttcttctcagtctgcttcatagagaaaaaaacaaagaagaatcagattctactgagagactacagataagcaatccaggatttcaagaaagatgtgctaagaaaatgcagctagttaatttaagaaacagaagagcttgctgcaacctcatttagagagggttgccatcgatgctctacagttatgttgtttgttacttcccccaccaaatcgtagaaagcttcaacttttaatgcgtatgatttcccgaatgagtcaaaatgttgatatgcccaaacttcatgatgcaatgggtacgaggtcactgatgatacataccttttctcgatgtgtgttatgctgtgctgaagaagtggatcttgatgagcttcttgctggaagattagtttctttcttaatggatcatcatcaggaaattcttcaagtaccctcttacttacagactgcagtggaaaaacatcttgactacttaaaaaagggacatattgaaaatcctggagatggactatttgctcctttgccaacttactcatactgtaagcagattagtgctcaggagtttgatgagcaaaaagtttctacctctcaagctgcaattgcagaacttttagaaaatattattaaaaacaggagtttacctctaaaggagaaaagaaaaaaactaaaacagtttcagaaggaatatcctttgatatatcagaaaagatttccaaccacggagagtgaagcagcactttttggtgacaaacctacaatcaagcaaccaatgctgattttaagaaaaccaaagttccgtagtctaagataactaactgaattaaaaattatgtaatacttgtggaa

SEQ ID NO: 126407 - DNA, 2499 bp, Homo sapiens
  Payload ID: 4786
  Gene Symbol: DEPDC1B
  Gene Name: DEP domain containing 1B
  Uniprot ID: Q8WUY9
  ENST ID: ENST00000265036
  CDS Start-End: 69-1658
aaactgctgctcctccggctggcggggatcagcgctggcgcggctgcggccgctgctgcctacgcgccatggagcatcgcatcgtggggcccgggccgtaccgagctaccaggctgtggaatgagaccgtggagctttttcgtgctaagatgccgttacggaaacatcgctgtcgtttcaagagctatgagcattgtttcacagcggccgaagctgtggattggctgcatgagctgctgaggtgcagtcaaaacttcggccctgaagtgacccgcaaacaaacggtccagctgctaaaaaaattcctgaagaatcacgttattgaagacatcaagggaaaatggggtgaggaagattttgaagacaatcgtcacttatacagatttcctccttcttcacccctgaaaccatatccaaagaagcccccaaaccaaaaggatgttattaaatttccagaatggaatgatctcccaccaggcacttcacaagagaacatcccagtgaggccagttgtgatgaattctgagatgtggtacaagcgtcacagtattgcaattggagaggtgccagcttgccgtcttgtccaccgcagacagctgacagaggccaatgtagaagagatatggaagtctatgacattatcatacttacagaaaattcttggcctggattccttagaagaagttttagacgtcaaacttgtcaattcgaagttcatcatccataatgtatatagtgttagcaagcagggagttgttattcttgatgacaagtcaaaagaacttcctcattgggtgctgtcagctatgaagtgtttggcaaattggcccaactgttctgatttgaagcagcctatgtacttgggatttgaaaaagatgtctttaaaaccatagctgattactatggtcacttgaaagagcctctacttacatttcatctttttgatgcttttgtcagtgtactgggtttgttacagaaggagaaagtggcagttgaagcatttcagatttgctgccttctcctacctcctgaaaataggagaaagttacagctattgatgaggatgatggcaaggatttgcttaaacaaagagatgccacccctgtgtgatggctttggtacccgaacactgatggttcagacattttcccgttgcatcttgtgttccaaggatgaagtggacttggatgagttattagctgctagattggtaacgtttctgatggacaattaccaggaaattctgaaagtccctttggccttgcagacctctatagaggagcgtgtggctcatctacgaagagtccagataaaatacccaggagctgatatggatatcactttatctgctccatcattttgccgtcaaattagtccagaggaatttgaatatcaaagatcatatggctctcaggaacctctggcagccttgttggaggaagtcataacagatgccaaactctccaacaaagagaaaaagaagaaactgaagcagtttcagaaatcctatcctgaagtctatcaagaacgatttcctacaccagaaagtgcagcacttctgtttcctgaaaaacccaaaccgaaaccacagctgctaatgtgggcactaaagaagcctttccaaccatttcaaagaactagaagttttcgaatgtaataatacttccacagcaacaggtgctagagaccactgttgttgttttgagtgaatggtggttaggagaaagactttggtggtggaagaaagaaaagcataaaacaaagactactgaaatatagataaagattgccttagtttttaaaaatgtttggccattagtatttttataaaactcaatgctagttttaaagtgtataaattggttaaaatttatgagtcaaatatatagtgataatgttaacatgtttgtaattgctacagaatttaagggtatttttatctctgtgctttctttttcatggtgtttattaaataattgtgtatatacatcctagctactgatatctttattatagccttaagacttaattttaagtcttaaaaatagcgtgtatacttgaataagaaagacactgggtactgttactgtgatgctattgacttagtagccaattatcatttctcctgtataaattccagtttttattgctgcacataaattttttaatgtcttatattgtgatagctatgtcttttattgcagatttattggatgttatgacagattttactaaagctagtgtttttataacatatatattagttgatgtttacctataagtggagtagattttcatctgcctgcaatggtataatttcagtcttagctaaaaatggaaagttgaactggataaattctttgggtacccttagacctctgattctaagtcaaatgcaaatgggttaaataaaatgagactacttcctttataaatatattttcatccttttgaaagtaagtgaaatgtaaataaacttattttttttaaaaatgcca

SEQ ID NO: 126408 - DNA, 1569 bp, Homo sapiens
  Payload ID: 4786
  Gene Symbol: DEPDC1B
  Gene Name: DEP domain containing 1B
  Uniprot ID: Q8WUY9
  ENST ID: ENST00000453022
  CDS Start-End: 42-1445
atcagcgctggcgcggctgcggccgctgctgcctacgcgccatggagcatcgcatcgtggggcccgggccgtaccgagctaccaggctgtggaatgagaccgtggagctttttcgtgctaagatgccgttacggaaacatcgctgtcgtttcaagagctatgagcattgtttcacagcggccgaagctgtggattggctgcatgagctgctgaggtgcagtcaaaacttcggccctgaagtgacccgcaaacaaacggtccagctgctaaaaaaattcctgaagaatcacgttattgaagacatcaagggaaaatggggtgaggaagattttgaagacaatcgtcacttatacagatttcctccttcttcacccctgaaaccatatccaaagaagcccccaaaccaaaaggatgttattaaatttccagaatggaatgatctcccaccaggcacttcacaagagaacatcccagtgaggccagttgtgatgaattctgagatgtggtacaagcgtcacagtattgcaattggagaggtgccagcttgccgtcttgtccaccgcagacagctgacagaggccaatgtagaagagatatggaagtctatgacattatcatacttacagaaaattcttggcctggattccttagaagaagttttagacgtcaaacttgtcaattcgaagttcatcatccataatgtatatagtgttagcaagcagggagttgttattcttgatgacaagtcaaaagaacttcctcattgggtgctgtcagctatgaagtgtttggcaaattggcccaactgttctgatttgaagcagcctatgtacttgggatttgaaaaagatgtctttaaaaccatagctgattactatggtcacttgaaagagcctctacttacatttcatctttttgatgcttttgtcagtgtactgggtttgttacagaaggagaaagtggcagttgaagcatttcagatttgctgccttctcctacctcctgaaaataggagaaagttacagctattgatgaggatgatggcaaggatttgcttaaacaaagagatgccacccctgtgtgatggctttggtacccgaacactgatggttcagacattttcccgttgcatcttgtgttccaaggatgaagtggacttggatgagttattagctgctagattggtaacgtttctgatggacaattaccaggaaattctgaaagtccctttggccttgcagacctctatagaggagcgtgtggctcatctacgaagagtccagtttcagaaatcctatcctgaagtctatcaagaacgatttcctacaccagaaagtgcagcacttctgtttcctgaaaaacccaaaccgaaaccacagctgctaatgtgggcactaaagaagcctttccaaccatttcaaagaactagaagttttcgaatgtaataatacttccacagcaacaggtgctagagaccactgttgttgttttgagtgaatggtggttaggagaaagactttggtggtggaagaaagaaaagcataaaacaaagactactgaaatatagat

SEQ ID NO: 126409 - DNA, 661 bp, Homo sapiens
  Payload ID: 4786
  Gene Symbol: DEPDC1B
  Gene Name: DEP domain containing 1B
  ENST ID: ENST00000512452
  CDS Start-End: 98-208
agcgcccgcagcccgcgggcttgggattcaaactgctgctcctccggctggcggggatcagcgctggcgcggctgcggccgctgctgcctacgcgccatggagcatcgcatcgtggggcccgggccgtaccgagctaccaggctgtttctatttttgaggccgggtgcagtggctcactcctgtaattccagcactttgggaggctgaggcggctggatcacttgagatcaagagttcgagaccaccctgaccaacatgtggaatgagaccgtggagctttttcgtgctaagatgccgttacggaaacatcgctgtcgtttcaagagctatgagcattgtttcacagcggccgaagctgtggattggctgcatgagctgctgaggtgcagtcaaaacttcggccctgaagtgacccgcaaacaaacggtccagctgctaaaaaaattcctgaagaatcacgttattgaagacatcaagggaaaatggggtgaggaagattttgaagacaatcgtcacttatacagatttcctccttcttcacccctgaaaccatatccaaagaagcccccaaaccaaaaggatgttattaaatttccagaatggaatgatctcccaccaggcacttcacaagagaacatcccagtgaggccagttgtgatg

SEQ ID NO: 126410 - DNA, 1596 bp, Homo sapiens
  Payload ID: 4786
  Gene Symbol: DEPDC1B
  Gene Name: DEP domain containing 1B
  ENST ID: ENST00000512078
  CDS Start-End: 42-110
atcagcgctggcgcggctgcggccgctgctgcctacgcgccatggagcatcgcatcgtggggcccgggccgtaccgagctaccaggctgggattgattctgttatcctgaagtggtccagtgtttcttatacttgaagattaggatcattgtgtgtggaatgagaccgtggagctttttcgtgctaagatgccgttacggaaacatcgctgtcgtttcaagagctatgagcattgtttcacagcggccgaagctgtggattggctgcatgagctgctgaggtgcagtcaaaacttcggccctgaagtgacccgcaaacaaacggtccagctgctaaaaaaattcctgaagaatcacgttattgaagacatcaagggaaaatggggtgaggaagattttgaagacaatcgtcacttatacagatttcctccttcttcacccctgaaaccatatccaaagaagcccccaaaccaaaaggatgttattaaatttccagaatggaatgatctcccaccaggcacttcacaagagaacatcccagtgaggccagttgtgatgaattctgagatgtggtacaagcgtcacagtattgcaattggagaggtgccagcttgccgtcttgtccaccgcagacagctgacagaggccaatgtagaagagatatggaagtctatgacattatcatacttacagaaaattcttggcctggattccttagaagaagttttagacgtcaaacttgtcaattcgaagttcatcatccataatgtatatagtgttagcaagcagggagttgttattcttgatgacaagtcaaaagaacttcctcattgggtgctgtcagctatgaagtgtttggcaaattggcccaactgttctgatttgaagcagcctatgtacttgggatttgaaaaagatgtctttaaaaccatagctgattactatggtcacttgaaagagcctctacttacatttcatctttttgatgcttttgtcagtgtactgggtttgttacagaaggagaaagtggcagttgaagcatttcagatttgctgccttctcctacctcctgaaaataggagaaagttacagctattgatgaggatgatggcaaggatttgcttaaacaaagagatgccacccctgtgtgatggctttggtacccgaacactgatggttcagacattttcccgttgcatcttgtgttccaaggatgaagtggacttggatgagttattagctgctagattggtaacgtttctgatggacaattaccaggaaattctgaaagtccctttggccttgcagacctctatagaggagcgtgtggctcatctacgaagagtccagtttcagaaatcctatcctgaagtctatcaagaacgatttcctacaccagaaagtgcagcacttctgtttcctgaaaaacccaaaccgaaaccacagctgctaatgtgggcactaaagaagcctttccaaccatttcaaagaactagaagttttcgaatgtaataatacttccacagcaacaggtgctagagaccactgttgttgttttgagtgaatggtggttaggagaaagactttggtggtggaa

SEQ ID NO: 126411 - DNA, 768 bp, Homo sapiens
  Payload ID: 4787
  Gene Symbol: DEPDC4
  Gene Name: DEP domain containing 4
  Uniprot ID: Q8N2C3
  ENST ID: ENST00000299185
  CDS Start-End: 4-177
gctatggtgccaggggaggagccagcgcgcgagcttatggcggttcttttgactccgaggttccgtagacttgtcagtcagaacgagcttccgggcccagggctgaacgggccaagttccaggaaccgtagagatggcttctgccggaaaaggaggacagaccaggatatgaaatgatttcaaatcctctagcacaggagattggtgaggaaagaattgaggaacttattcatacaataaatgggaatccagctttatgtccaaatatcacagttcagaaaccttttctccggctttcaaaagaagatgtttggaaagaacaaacattattatgtcttcttcaattgattcaccttccattcttggacaatattttggagcctccagttaaaacacaaaatcttcaactaaacaaagaggaagatcttgttatcactaacacttgcctagacagagaacttattccaagcttatgtctacctgaaatcgataactggcttaatgcagcaattgaatgcttggagtatttccctgaccagttaatagttacagttagtcagcagttaatgcaaaacagaaatgaagagacaagattgaacagtcagaagaagatactctttgatgtcatagcaaaatactatgctcaagagagagattgcctattaactgatgagtattttgatattcattcaggaattattgaacttttagaaaatgagaaaagagcagaagcacttgaagcaacacaactatatctaagattgctgt

SEQ ID NO: 126412 - DNA, 2337 bp, Homo sapiens
  Payload ID: 4787
  Gene Symbol: DEPDC4
  Gene Name: DEP domain containing 4
  Uniprot ID: Q8N2C3
  ENST ID: ENST00000378244
  CDS Start-End: 4-888
gctatggtgccaggggaggagccagcgcgcgagcttatggcggttcttttgactccgaggttccgtagacttgtcagtcagaacgagcttccgggcccagggctgaacgggccaagttccaggaaccgtagagatggcttctgccggaaaaggaggacaggatgctctggtccttttcaagctactcagctatgggatggtattattcactctcttcaggcccaagtggaaataaaaagaaggaggcatcatttacagacatacaaagactgtttcactggttctgatgctgtcgatgtggtcttaagtcatcttatgcaaaacacgtgcctaagtagcaatgacatctcttgtcttaaaggggttcatctttgccaagttctaatgaatcacaaagtatttgaaccagtaggaatgaagaagcttttcaaaaaagaaaaggaattagaatttgaagattccaacattagtctctacaggtttctaggcaataaatcatcttacgattgttgcaaaagacaaaaggatgctgagaatgagttcaatgaaaccttgagaccaggatatgaaatgatttcaaatcctctagcacaggagattggtgaggaaagaattgaggaacttattcatacaataaatgggaatccagctttatgtccaaatatcacagttcagaaaccttttctccggctttcaaaagaagatgtttggaaagaacaaacattattatgtcttcttcaattgattcaccttccattcttggacaatattttggagcctccagttaaaacacaaaatcttcaactaaacaaagaggaagatcttgttatcactaacacttgcctagacagagaacttattccaagcttatgtctacctgaaaaatgagaaaagagcagaagcacttgaagcaacacaactatatctaagattgctgttgctgaacattagagaagaattacgacggctacttacttttatggcaatggcatcagagcccaatgcctacaagttgcaaaaacagtatgataataaaacagtggtcctgaaaactcttgccaaatcagttttgcaagccaaatcattattaaaagtgcgggcagaacaactggtctggtttccactggagtaccactctgagctcttcaaggtatggctgaaaataacagctacacatctacagcttaggatactggagatttaatgagaaaaagtaccaaaaggttgacacatggctttacgttttgccaacccttgacatacaaggagtttgaaaagcagaagggaaggacaattcagtatctacaccagttggctcttgagattaatagtaaccccagcatctctctgaaacgaaaaaagaaattaattaaggaatttcaaaaacaccatccagaagctttgaattaacatttctgatacaagaaactacaatttttggggaggaagttagtatacttccagtggaagacctgagagggtacctgaagagataccgggaaaatattggaaacatgccaccaagccctcttcgatagaagtctccttatttggaaagttgccattttaatgttcagtgtgaatcagagacggggtcaaacactgttgcccaggctggagtgcagtgacgcaatcctaactgactgtaacctcaaactcctggactcaagccatctccctaccttggccacccaaagtggtagaattacagaggaaggctgaggcaggaggattgcttaaacgcaggagtctgcagctgcaatgaactgtgatcccactactgcattccagcctgggtggacagaacaaggccctgtctctattttaaaataataataacacaaaaatgcccctcccccatttttttttaaagttcagtatgtaacaagttctatactggatcctttctttctctaataatcctcaagaaatccttacaggtaagtattgcttccgccactgcagaggcgaaagccagtgctttggtaaaggtcctagtctttctggctttaacacagaaagtcttaataccatttggattaaagattcacaagttaggccgggcgcggtggctcatgcctgtaatcccagcactttgggaggccgagacaggcagatcacgaggtcaggagatcgagaccatcctggctaacacggtgaaaccctgtctctactaaaaatacaaaaaactagccagcctggtggcgggcgcctgtagtcccagctacttggaaggctgaggcaggagaatggcgtgaacccgggaggcagagcttgcagtgagccaagatcacgccactgcattccagcctggacgacagagcgagactccgtctc

SEQ ID NO: 126413 - DNA, 1155 bp, Homo sapiens
  Payload ID: 4787
  Gene Symbol: DEPDC4
  Gene Name: DEP domain containing 4
  Uniprot ID: Q8N2C3
  ENST ID: ENST00000416321
  CDS Start-End: 4-888
gctatggtgccaggggaggagccagcgcgcgagcttatggcggttcttttgactccgaggttccgtagacttgtcagtcagaacgagcttccgggcccagggctgaacgggccaagttccaggaaccgtagagatggcttctgccggaaaaggaggacaggatgctctggtccttttcaagctactcagctatgggatggtattattcactctcttcaggcccaagtggaaataaaaagaaggaggcatcatttacagacatacaaagactgtttcactggttctgatgctgtcgatgtggtcttaagtcatcttatgcaaaacacgtgcctaagtagcaatgacatctcttgtcttaaaggggttcatctttgccaagttctaatgaatcacaaagtatttgaaccagtaggaatgaagaagcttttcaaaaaagaaaaggaattagaatttgaagattccaacattagtctctacaggtttctaggcaataaatcatcttacgattgttgcaaaagacaaaaggatgctgagaatgagttcaatgaaaccttgagaccaggatatgaaatgatttcaaatcctctagcacaggagattggtgaggaaagaattgaggaacttattcatacaataaatgggaatccagctttatgtccaaatatcacagttcagaaaccttttctccggctttcaaaagaagatgtttggaaagaacaaacattattatgtcttcttcaattgattcaccttccattcttggacaatattttggagcctccagttaaaacacaaaatcttcaactaaacaaagaggaagatcttgttatcactaacacttgcctagacagagaacttattccaagcttatgtctacctgaaaaatgagaaaagagcagaagcacttgaagcaacacaactatatctaagattgctgttgctgaacattagagaagaattacgacggctacttacttttatggcaatggcatcagagcccaatgcctacaagttgcaaaaacaggtgaaaaattttgcaataagttttgccatttttttttgctatttttttcctctaaaaaccatttatgctaatgttaatctttctgtttacagtatgataataaaacagtggtcctgaaaactcttgccaaa

SEQ ID NO: 126414 - DNA, 541 bp, Homo sapiens
  Payload ID: 4787
  Gene Symbol: DEPDC4
  Gene Name: DEP domain containing 4
  Uniprot ID: Q8N2C3
  ENST ID: ENST00000549341
  CDS Start-End: 4-177
gctatggtgccaggggaggagccagcgcgcgagcttatggcggttcttttgactccgaggttccgtagacttgtcagtcagaacgagcttccgggcccagggctgaacgggccaagttccaggaaccgtagagatggcttctgccggaaaaggaggacagaccaggatatgaaatgatttcaaatcctctagcacaggagattggtgaggaaagaattgaggaacttattcatacaataaatgggaatccagctttatgtccaaatatcacagttcagaaaccttttctccggctttcaaaagaagatgtttggaaagaacaaacattattatgtcttcttcaattgattcaccttccattcttggacaatattttggagcctccagttaaaacacaaaatcttcaactaaacaaagaggaagatcttgttatcactaacacttgcctagacagagaacttattccaagcttatgtctacctgaaaaatgagaaaagagcagaagcacttgaagcaacacaactatatctaagattgctgt

SEQ ID NO: 126415 - DNA, 1003 bp, Homo sapiens
  Payload ID: 4787
  Gene Symbol: DEPDC4
  Gene Name: DEP domain containing 4
  ENST ID: ENST00000549249
  CDS Start-End: 4-1003
gctatggtgccaggggaggagccagcgcgcgagcttatggcggttcttttgactccgaggttccgtagacttgtcagtcagaacgagcttccgggcccagggctgaacgggccaagttccaggaaccgtagagatggcttctgccggaaaaggaggacaggggttcatctttgccaagttctaatgaatcacaaagtatttgaaccagtaggaatgaagaagcttttcaaaaaagaaaaggaattagaatttgaagattccaacattagtctctacaggtttctaggcaataaatcatcttacgattgttgcaaaagacaaaaggatgctgagaatgagttcaatgaaaccttgagaccaggatatgaaatgatttcaaatcctctagcacaggagattggtgaggaaagaattgaggaacttattcatacaataaatgggaatccagctttatgtccaaatatcacagttcagaaaccttttctccggctttcaaaagaaggagtttccttctacacagcaattacatcagataagacagatgtttggaaagaacaaacattattatgtcttcttcaattgattcaccttccattcttggacaatattttggagcctccagttaaaacacaaaatcttcaactaaacaaagaggaagatcttgttatcactaacacttgcctagacagagaacttattccaagcttatgtctacctgaaatcgataactggcttaatgcagcaattgaatgcttggagtatttccctgaccagttaatagttacagttagtcagcagttaatgcaaaacagaaatgaagagacaagattgaacagtcagaagaagatactctttgatgtcatagcaaaatactatgctcaagagagagattgcctattaactgatgagtattttgatattcattcaggaattattgaacttttagaaaatgagaaaagagcagaagcacttgaagcaacacaactatatctaagattgctgt

SEQ ID NO: 126416 - DNA, 1165 bp, Homo sapiens
  Payload ID: 4787
  Gene Symbol: DEPDC4
  Gene Name: DEP domain containing 4
  ENST ID: ENST00000550587
  CDS Start-End: 4-1165
gctatggtgccaggggaggagccagcgcgcgagcttatggcggttcttttgactccgaggttccgtagacttgtcagtcagaacgagcttccgggcccagggctgaacgggccaagttccaggaaccgtagagatggcttctgccggaaaaggaggacaggatgctctggtccttttcaagctactcagctatgggatggtattattcactctcttcaggcccaagtggaaataaaaagaaggaggcatcatttacagacatacaaagactgtttcactggttctgatgctgtcgatgtggtcttaagtcatcttatgcaaaacacgtgcctaagtagcaatgacatctcttgtcttaaaggggttcatctttgccaagttctaatgaatcacaaagtatttgaaccagtaggaatgaagaagcttttcaaaaaagaaaaggaattagaatttgaagattccaacattagtctctacaggtttctaggcaataaatcatcttacgattgttgcaaaagacaaaaggatgctgagaatgagttcaatgaaaccttgagaccaggatatgaaatgatttcaaatcctctagcacaggagattggtgaggaaagaattgaggaacttattcatacaataaatgggaatccagctttatgtccaaatatcacagttcagaaaccttttctccggctttcaaaagaagatgtttggaaagaacaaacattattatgtcttcttcaattgattcaccttccattcttggacaatattttggagcctccagttaaaacacaaaatcttcaactaaacaaagaggaagatcttgttatcactaacacttgcctagacagagaacttattccaagcttatgtctacctgaaatcgataactggcttaatgcagcaattgaatgcttggagtatttccctgaccagttaatagttacagttagtcagcagttaatgcaaaacagaaatgaagagacaagattgaacagtcagaagaagatactctttgatgtcatagcaaaatactatgctcaagagagagattgcctattaactgatgagtattttgatattcattcaggaattattgaacttttagaaaatgagaaaagagcagaagcacttgaagcaacacaactatatctaagattgctgt

SEQ ID NO: 126417 - DNA, 389 bp, Homo sapiens
  Payload ID: 4787
  Gene Symbol: DEPDC4
  Gene Name: DEP domain containing 4
  ENST ID: ENST00000548313
  CDS Start-End: 1-317
gaattgaggaacttattcatacaataaatgggaatccagctttatgtccaaatatcacagttcagaaaccttttctccggctttcaaaagaaggagtttccttctacacagcaattacatcagataagacagatgtttggaaagaacaaacattattatgtcttcttcaattgattcaccttccattcttggacaatattttggagcctccagttaaaacacaaaatcttcaactaaacaaagaggaagatcttgttatcactaacacttgcctagacagagaacttattccaagcttatgtctacctgaaaaatgagaaaagagcagaagcacttgaagcaacacaactatatctaagattgctgttgctgaacattagagaagaatt

SEQ ID NO: 126418 - DNA, 1033 bp, Homo sapiens
  Payload ID: 4787
  Gene Symbol: DEPDC4
  Gene Name: DEP domain containing 4
  ENST ID: ENST00000551642
  CDS Start-End: 1-861
gcgcgcgagcttatggcggttcttttgactccgaggttccgtagacttgtcagtcagaacgagcttccgggcccagggctgaacgggccaagttccaggaaccgtagagatggcttctgccggaaaaggaggacaggatgctctggtccttttcaagctactcagctatgggatggtattattcactctcttcaggcccaagtggaaataaaaagaaggaggcatcatttacagacatacaaagactgtttcactggttctgatgctgtcgatgtggtcttaagtcatcttatgcaaaacacgtgcctaagtagcaatgacatctcttgtcttaaaggggttcatctttgccaagttctaatgaatcacaaagtatttgaaccagtaggaatgaagaagcttttcaaaaaagaaaaggaattagaatttgaagattccaacattagtctctacaggtttctaggcaataaatcatcttacgattgttgcaaaagacaaaaggatgctgagaatgagttcaatgaaaccttgagaccaggatatgaaatgatttcaaatcctctagcacaggagattggtgaggaaagaattgaggaacttattcatacaataaatgggaatccagctttatgtccaaatatcacagttcagaaaccttttctccggctttcaaaagaagatgtttggaaagaacaaacattattatgtcttcttcaattgattcaccttccattcttggacaatattttggagcctccagttaaaacacaaaatcttcaactaaacaaagaggaagatcttgttatcactaacacttgcctagacagagaacttattccaagcttatgtctacctgagtaagtgaccatttttattgtcaaataatttgtaaacagtttttttcacatatttgcccttagtattttaggatgtgagaaaatattcatgttataagcttatactatctctcttttataaattatcattatgaatcctcatttgatctaataaagccattggtcatgacctataa

SEQ ID NO: 126419 - DNA, 5212 bp, Homo sapiens
  Payload ID: 4788
  Gene Symbol: DEPDC5
  Gene Name: DEP domain containing 5
  Uniprot ID: O75140
  ENST ID: ENST00000382111
  CDS Start-End: 61-4719
ggaggcaagatgacttctctgccccaagcttggaacagctaaagggaaaaacagtgcaagatgagaacaacaaaggtctacaaactcgtcatccacaagaagggctttgggggcagtgatgatgagctagttgtgaaccccaaagtgttccctcacatcaagcttggagacattgtagagattgcacaccccaacgatgaatacagccctctgcttttgcaggtcaagtctcttaaggaagatttacagaaggaaactatcagtgtggaccagactgtgactcaagtgttccggctgagaccttatcaggatgtctatgttaatgtcgtagaccctaaggatgtgacccttgacctagtggaattaacttttaaggatcagtatattggccgtggggatatgtggcgactaaagaaaagtttggtcagcacatgtgcctatatcacccagaaggtggagtttgctggcatcagagcacaggctggtgaactgtgggttaagaatgagaaggtcatgtgtggctacatcagtgaagataccagggtggtgtttcgttctacgtcggctatggtttacatatttattcagatgagctgtgaaatgtgggattttgatatttatggggatttgtattttgagaaagctgtgaatggtttccttgctgatctatttaccaagtggaaggagaagaactgtagtcatgaagtgacagtggtcctgttttctagaactttctatgatgcaaaatctgttgatgaatttcctgaaataaaccgagcctcaattcgacaggatcacaaggggagattctatgaagacttttacaaagtggtggtgcagaatgagagaagagaagaatggacttcacttctcgtaaccattaaaaaactcttcatccagtatccagtgttggtgcgactggaacaggcagagggctttcctcaaggagataattctacctcagcacaaggaaactacctggaggccatcaatctgtcattcaatgtgtttgataagcactacatcaaccgcaactttgaccgaactgggcagatgtcagtggtgatcacgcccggggtgggtgtctttgaagtggaccgcctactcatgatcctgaccaagcagcggatgatagataatggaattggtgtggatttggtgtgcatgggagagcaaccgttacatgctgtcccattgttcaagctccataatcggagtgctccccgtgattctcgtctgggcgatgactataatatccctcactggataaaccacagtttctacacatccaaaagccagctcttttgtaatagtttcaccccacgaataaaactggcaggaaagaagcccgcctctgagaaagcaaaaaatggccgtgatacatctctcgggagtccaaaagaatctgagaacgcccttcccatccaagtagattatgacgcctatgacgctcaagtgttcaggctgcccggcccatcccgggcccagtgcctcaccacctgcagatctgtgcgagagcgagagagtcacagtcgaaagagtgccagctcctgtgatgtttcatccagcccttccctaccaagccgcacactgcccactgaggaagtgaggagccaggcttctgacgacagctccctaggcaagagtgccaacatcctgatgatcccacacccccacctgcaccagtatgaagtcagcagctccttgggatacaccagcactcgagatgtcctggagaacatgatggagccaccacagcgagactccagtgcaccagggaggtttcacgttggcagtgcagaatccatgctgcatgttcgacctggtggatacacgccccagagagcactgattaaccccttcgctccctctcggatgcccatgaagcttacgtccaacagaaggcgctggatgcacacttttcctgtggggccatccggagaagccatccagatccaccaccagacccgacagaatatggcggagctacaaggcagcgggcagagggatccaactcactcctctgcagagctgctggagttagcatatcatgaagctgctggaaggcacagcaattcccgccagcctggtgacggcatgtccttcttgaacttcagtggaacagaggagctttctgtcggcctgcttagcaacagtggtgcaggtatgaatcctaggacccagaataaggattctctagaggacagtgtttctacctctccagacccaattctgacactgtctgctccccctgtagtgccaggcttctgttgcacagttggagtggactggaagtctctcactactccggcgtgcctcccccttaccaccgactacttccctgaccgccagggcctgcagaatgactacacagagggctgttatgatctccttccagaagcagacatcgacaggagggacgaagatggtgtgcagatgacagcccagcaggtatttgaagagtttatttgccaacgtctcatgcagggctaccaaatcatagtgcagcccaagacacagaaacccaatcctgctgtcccgcccccgctgagcagtagcccactctatagccgaggccttgtgtcccgaaaccgccctgaggaggaggaccagtattggctgagtatgggcagaacgttccacaaagtgacgctgaaggataagatgatcacagtgacgcgataccttcccaagtatccttatgaatctgcccagatccactacacctacagcctctgtccttcccactcagactcagagttcgtctcctgctgggtggaattctcccacgaacggctggaggagtacaagtggaattacttagatcagtatatctgttctgccggctctgaagacttcagcttaattgagtccctgaagttctggaggacccgcttcctgctgctgccagcctgtgtcaccgccaccaagcgcatcacggagggggaggcccactgcgacatctatggggacaggccccgtgcagacgaggacgagtggcaactcctggatggttttgtccgctttgtggagggcttgaatcgcattcgcaggcggcatcgctcggatcgcatgatgcggaaagggaccgccatgaaaggcttgcagatgactgggcccatttccacgcattctctggagtcaactgcacccccagtggggaagaagggaacctcagctctctctgccctgttggagatggaggccagtcagaagtgcctgggagaacagcaggcagctgtgcatggtgggaagagctccgcccagtcagccgagagcagcagcgttgccatgactcccacctacatggacagcccacgaaaggacggggccttctttatggagtttgtccgcagcccacgcacagcatcgtccgccttctaccctcaggtatctgtggaccaaacagccactcctatgttggacggcaccagtttgggcatatgcacaggccaatccatggacagaggcaacagccagacctttgggaactcccagaacataggagaacagggctactcctccacaaactccagtgacagcagctctcagcagctggtggcaagctccttgacctcatcctctaccctgacagagatcctggaagccatgaagcacccctcgacaggagtccagctgctctctgaacagaagggcctctcaccgtactgcttcatcagcgcggaggtggtacactggttggtgaaccacgtggaggggatccagacacaggcgatggccattgacatcatgcagaaaatgctggaagagcagctcatcacacatgcatctggcgaagcctggcggaccttcatctacggcttctatttctacaagatagtaacggacaaagagcccgaccgagtggccatgcagcagcccgccaccacctggcacacagcaggagtggacgacttcgccagcttccagcgcaagtggtttgaggtggcctttgtggcagaagagctcgtgcactctgagattcctgcctttctcctgccctggctgcctagccggccagcctcctatgcaagtaggcacagctcctttagccgaagttttggaggacggagccaggcggcagcacttttagctgccactgtcccagagcagaggactgtgaccctggatgttgacgtgaacaaccgcacagaccggctggagtggtgcagctgttattaccatggcaacttttctctgaatgcagcctttgagatcaagctgcactggatggcggtgaccgcagcagtactcttcgagatggtccaaggttggcatcggaaagccacctcctgtggcttcttgttagtcccagttttggaggggccttttgcactgcccagttacctgtatggcgacccccttcgtgcccagctcttcatcccactcaacatcagctgcttgctcaaggagggcagcgagcacctgtttgatagtttgggtttgtacaagataaatattctgcctctgcttttaacttccctgctgagaacaagcctcagtatatccacgttacaggaacagtgtttctgcagctgccctactccaagcgcaagttctcagggcagcagcggcggcggcggaactccaccagctccaccaaccagaacatgttctgcgaggagcgggtcggctacaactgggcctacaacaccatgctcaccaaaacatggcgctccagcgccacaggggatgaaaagtttgctgatcggctgctgaaggacttcacggacttctgcatcaaccgtgacaaccggctggtcacgttctggacaagttgcctggagaagatgcatgccagtgccccgtgaggccaggctgcacctgtgctgggggaaggtgggtgagccactgccctcaaacccggggcggaggattccaggcaggctctaggagtcaggtgtccgtttgctgctatcagtgagtgggggccattgttttttgtttgtttgtttgtttgtttgtttgtttttggcccccacgacaagtcttctactctagaagaaagactttggaagcagctgctgctgctgccaccactcctgtcagcaagtgctcagagcaggtgggaggcacagattgtccgtgggagggctccagtgtctgggaagagggcaggcggcccccatgaatgtcctcggaagggggtggctcctggtagcatccttttccttcaccatctatgggatattaggggcagaatctgccactt

SEQ ID NO: 126420 - DNA, 5363 bp, Homo sapiens
  Payload ID: 4788
  Gene Symbol: DEPDC5
  Gene Name: DEP domain containing 5
  Uniprot ID: O75140
  ENST ID: ENST00000382112
  CDS Start-End: 71-4855
tctgtggcagggaggcaagatgacttctctgccccaagcttggaacagctaaagggaaaaacagtgcaagatgagaacaacaaaggtctacaaactcgtcatccacaagaagggctttgggggcagtgatgatgagctagttgtgaaccccaaagtgttccctcacatcaagcttggagacattgtagagattgcacaccccaacgatgaatacagccctctgcttttgcaggtcaagtctcttaaggaagatttacagaaggaaactatcagtgtggaccagactgtgactcaagtgttccggctgagaccttatcaggatgtctatgttaatgtcgtagaccctaaggatgtgacccttgacctagtggaattaacttttaaggatcagtatattggccgtggggatatgtggcgactaaagaaaagtttggtcagcacatgtgcctatatcacccagaaggtggagtttgctggcatcagagcacaggctggtgaactgtgggttaagaatgagaaggtcatgtgtggctacatcagtgaagataccagggtggtgtttcgttctacgtcggctatggtttacatatttattcagatgagctgtgaaatgtgggattttgatatttatggggatttgtattttgagaaagctgtgaatggtttccttgctgatctatttaccaagtggaaggagaagaactgtagtcatgaagtgacagtggtcctgttttctagaactttctatgatgcaaaatctgttgatgaatttcctgaaataaaccgagcctcaattcgacaggatcacaaggggagattctatgaagacttttacaaagtggtggtgcagaatgagagaagagaagaatggacttcacttctcgtaaccattaaaaaactcttcatccagtatccagtgttggtgcgactggaacaggcagagggctttcctcaaggagataattctacctcagcacaaggaaactacctggaggccatcaatctgtcattcaatgtgtttgataagcactacatcaaccgcaactttgaccgaactgggcagatgtcagtggtgatcacgcccggggtgggtgtctttgaagtggaccgcctactcatgatcctgaccaagcagcggatgatagataatggaattggtgtggatttggtgtgcatgggagagcaaccgttacatgctgtcccattgttcaagctccataatcggagtgctccccgtgattctcgtctgggcgatgactataatatccctcactggataaaccacagtttctacacatccaaaagccagctcttttgtaatagtttcaccccacgaataaaactggcaggaaagaagcccgcctctgagaaagcaaaaaatggccgtgatacatctctcgggagtccaaaagaatctgagaacgcccttcccatccaagtagattatgacgcctatgacgctcaagtgttcaggctgcccggcccatcccgggcccagtgcctcaccacctgcagatctgtgcgagagcgagagagtcacagtcgaaagagtgccagctcctgtgatgtttcatccagcccttccctaccaagccgcacactgcccactgaggaagtgaggagccaggcttctgacgacagctccctaggcaagagtgccaacatcctgatgatcccacacccccacctgcaccagtatgaagtcagcagctccttgggatacaccagcactcgagatgtcctggagaacatgatggagccaccacagcgagactccagtgcaccagggaggtttcacgttggcagtgcagaatccatgctgcatgttcgacctggtggatacacgccccagagagcactgattaaccccttcgctccctctcggatgcccatgaagcttacgtccaacagaaggcgctggatgcacacttttcctgtggggccatccggagaagccatccagatccaccaccagacccgacagaatatggcggagctacaaggcagcgggcagagggatccaactcactcctctgcagagctgctggagttagcatatcatgaagctgctggaaggcacagcaattcccgccagcctggtgacggcatgtccttcttgaacttcagtggaacagaggagctttctgtcggcctgcttagcaacagtggtgcaggtatgaatcctaggacccagaataaggattctctagaggacagtgtttctacctctccagacccaatgccaggcttctgttgcacagttggagtggactggaagtctctcactactccggcgtgcctcccccttaccaccgactacttccctgaccgccagggcctgcagaatgactacacagagggctgttatgatctccttccagaagcagacatcgacaggagggacgaagatggtgtgcagatgacagcccagcaggtatttgaagagtttatttgccaacgtctcatgcagggctaccaaatcatagtgcagcccaagacacagaaacccaatcctgctgtcccgcccccgctgagcagtagcccactctatagccgaggccttgtgtcccgaaaccgccctgaggaggaggaccagtattggctgagtatgggcagaacgttccacaaagtgacgctgaaggataagatgatcacagtgacgcgataccttcccaagtatccttatgaatctgcccagatccactacacctacagcctctgtccttcccactcagactcagagttcgtctcctgctgggtggaattctcccacgaacggctggaggagtacaagtggaattacttagatcagtatatctgttctgccggctctgaagacttcagcttaattgagtccctgaagttctggaggacccgcttcctgctgctgccagcctgtgtcaccgccaccaagcgcatcacggagggggaggcccactgcgacatctatggggacaggccccgtgcagacgaggacgagtggcaactcctggatggttttgtccgctttgtggagggcttgaatcgcattcgcaggcggcatcgctcggatcgcatgatgcggaaagggaccgccatgaaaggcttgcagatgactgggcccatttccacgcattctctggagtcaactgcacccccagtggggaagaagggaacctcagctctctctgccctgttggagatggaggccagtcagaagtgcctgggagaacagcaggcagctgtgcatggtgggaagagctccgcccagtcagccgagagcagcagcgttgccatgactcccacctacatggacagcccacgaaaggacggggccttctttatggagtttgtccgcagcccacgcacagcatcgtccgccttctaccctcaggtatctgtggaccaaacagccactcctatgttggacggcaccagtttgggcatatgcacaggccaatccatggacagaggcaacagccagacctttgggaactcccagaacataggagaacagggctactcctccacaaactccagtgacagcagctctcagcagctggtggcaagctccttgacctcatcctctaccctgacagagatcctggaagccatgaagcacccctcgacaggagtccagctgctctctgaacagaagggcctctcaccgtactgcttcatcagcgcggaggtggtacactggttggtgaaccacgtggaggggatccagacacaggcgatggccattgacatcatgcagaaaatgctggaagagcagctcatcacacatgcatctggcgaagcctggcggaccttcatctacggcttctatttctacaagatagtaacggacaaagagcccgaccgagtggccatgcagcagcccgccaccacctggcacacagcaggagtggacgacttcgccagcttccagcgcaagtggtttgaggtggcctttgtggcagaagagctcgtgcactctgagattcctgcctttctcctgccctggctgcctagccggccagcctcctatgcaagtaggcacagctcctttagccgaagttttggaggacggagccaggcggcagcacttttagctgccactgtcccagagcagaggactgtgaccctggatgttgacgtgaacaaccgcacagaccggctggagtggtgcagctgttattaccatggcaacttttctctgaatgcagcctttgagatcaagctgcactggatggcggtgaccgcagcagtactcttcgagatggtccaaggttggcatcggaaagccacctcctgtggcttcttgttagtcccagttttggaggggccttttgcactgcccagttacctgtatggcgacccccttcgtgcccagctcttcatcccactcaacatcagctgcttgctcaaggagggcagcgagcacctgtttgatagctttgaacccgaaacgtactgggatcgaatgcacctcttccaggaagccattgcacacaggtttgggtttgtacaagataaatattctgcctctgcttttaacttccctgctgagaacaagcctcagtatatccacgttacaggaacagtgtttctgcagctgccctactccaagcgcaagttctcagggcagcagcggcggcggcggaactccaccagctccaccaaccagaacatgttctgcgaggagcgggtcggctacaactgggcctacaacaccatgctcaccaaaacatggcgctccagcgccacaggggatgaaaagtttgctgatcggctgctgaaggacttcacggacttctgcatcaaccgtgacaaccggctggtcacgttctggacaagttgcctggagaagatgcatgccagtgccccgtgaggccaggctgcacctgtgctgggggaaggtgggtgagccactgccctcaaacccggggcggaggattccaggcaggctctaggagtcaggtgtccgtttgctgctatcagtgagtgggggccattgttttttgtttgtttgtttgtttgtttgtttgtttttggcccccacgacaagtcttctactctagaagaaagactttggaagcagctgctgctgctgccaccactcctgtcagcaagtgctcagagcaggtgggaggcacagattgtccgtgggagggctccagtgtctgggaagagggcaggcggcccccatgaatgtcctcggaagggggtggctcctggtagcatccttttccttcaccatctatgggatattaggggcagaatctgccacttcttgcccaggagtgtgcacagatgtaagataattttgtgaaataatgtaccatagactctcaccaactgtatatacctgtacatatcagaagcaaataaagagctcc

SEQ ID NO: 126421 - DNA, 2395 bp, Homo sapiens
  Payload ID: 4788
  Gene Symbol: DEPDC5
  Gene Name: DEP domain containing 5
  Uniprot ID: O75140
  ENST ID: ENST00000400242
  CDS Start-End: 157-1836
ggcgtaggcggggtatctggaggaggcgcagggaacctggagagggtccagccctcagtgccccggccagaggcgggaaggggctctagagcttcgggaggcaagatgacttctctgccccaagcttggaacagctaaagggaaaaacagtgcaagatgagaacaacaaaggtctacaaactcgtcatccacaagaagggctttgggggcagtgatgatgagctagttgtgaaccccaaagtgttccctcacatcaagcttggagacattgtagagattgcacaccccaacgatgaatacagccctctgcttttgcaggtcaagtctcttaaggaagatttacagaaggaaactatcagtgtggaccagactgtgactcaagtgttccggctgagaccttatcaggatgtctatgttaatgtcgtagaccctaaggatgtgacccttgacctagtggaattaacttttaaggatcagtatattggccgtggggatatgtggcgactaaagaaaagtttggtcagcacatgtgcctatatcacccagaaggtggagtttgctggcatcagagcacaggctggtgaactgtgggttaagaatgagaaggtcatgtgtggctacatcagtgaagataccagggtggtgtttcgttctacgtcggctatggtttacatatttattcagatgagctgtgaaatgtgggattttgatatttatggggatttgtattttgagaaagctgtgaatggtttccttgctgatctatttaccaagtggaaggagaagaactgtagtcatgaagtgacagtggtcctgttttctagaactttctatgatgcaaaatctgttgatgaatttcctgaaataaaccgagcctcaattcgacaggatcacaaggggagattctatgaagacttttacaaagtggtggtgcagaatgagagaagagaagaatggacttcacttctcgtaaccattaaaaaactcttcatccagtatccagtgttggtgcgactggaacaggcagagggctttcctcaaggagataattctacctcagcacaaggaaactacctggaggccatcaatctgtcattcaatgtgtttgataagcactacatcaaccgcaactttgaccgaactgggcagatgtcagtggtgatcacgcccggggtgggtgtctttgaagtggaccgcctactcatgatcctgaccaagcagcggatgatagataatggaattggtgtggatttggtgtgcatgggagagcaaccgttacatgctgtcccattgttcaagctccataatcggagtgctccccgtgattctcgtctgggcgatgactataatatccctcactggataaaccacagtttctacacatccaaaagccagctcttttgtaatagtttcaccccacgaataaaactggcaggaaagaagcccgcctctgagaaagcaaaaaatggccgtgatacatctctcgggagtccaaaagaatctgagaacgcccttcccatccaagtagattatgacgcctatgacgctcaagtgttcaggctgcccggcccatcccgggcccagtgcctcaccacctgcagatctgtgcgagagcgagagagtcacagtcgaaagagtgccagctcctgtgatgtttcatccagcccttccctaccaagccgcacactgcccactgaggaagtgaggagccaggcttctgacgacagctccctaggcaagagtgccaacatcctgatgatcccacacccccacctgcaccagtatgaagtcagcagctccttgggatacaccagcactcgagagcacctaggataaagtgcagtgatgcaatcacagctcacctcagtgcggccttgaactcctggactcaatcgatcctcccacctctgcctcccaagtaactgggactatagcatgccaccacacccagctgattatcatatttttttttgtagaggtggggaagtgcagtgatgcaatcacagctcacctcagtgcggccttgaactcctggactcaattgatcctcccacttctgcctcccaagtaactgggactatagcatgccaccacacccagctgattatcatatttttttttgtagaggtggggttttaccattcccaggctggtcttgaactcctggactcgagggatccacccattggcctccaaaagtgctgagattacaggcatgaaccaatgttaccgcaccctgcctctattatactattttttgtttagcctttcttcatccatcatttaactgtatgcctttccatatgttaatggaaagcttttcttaggcctagggtcaaaagggtttatttccttatgatttccatttgtgccatatataaaacaacctctgtct

SEQ ID NO: 126422 - DNA, 5551 bp, Homo sapiens
  Payload ID: 4788
  Gene Symbol: DEPDC5
  Gene Name: DEP domain containing 5
  Uniprot ID: O75140
  ENST ID: ENST00000400246
  CDS Start-End: 203-5014
ctagtaggcgcttcaggcttaggggcggaacagcgcgggccgcgcgggcgtaggcggggtatctggaggaggcgcagggaacctggagagggtccagccctcagtgccccggccagaggcgggaaggggctctagagcttcgggaggcaagatgacttctctgccccaagcttggaacagctaaagggaaaaacagtgcaagatgagaacaacaaaggtctacaaactcgtcatccacaagaagggctttgggggcagtgatgatgagctagttgtgaaccccaaagtgttccctcacatcaagcttggagacattgtagagattgcacaccccaacgatgaatacagccctctgcttttgcaggtcaagtctcttaaggaagatttacagaaggaaactatcagtgtggaccagactgtgactcaagtgttccggctgagaccttatcaggatgtctatgttaatgtcgtagaccctaaggatgtgacccttgacctagtggaattaacttttaaggatcagtatattggccgtggggatatgtggcgactaaagaaaagtttggtcagcacatgtgcctatatcacccagaaggtggagtttgctggcatcagagcacaggctggtgaactgtgggttaagaatgagaaggtcatgtgtggctacatcagtgaagataccagggtggtgtttcgttctacgtcggctatggtttacatatttattcagatgagctgtgaaatgtgggattttgatatttatggggatttgtattttgagaaagctgtgaatggtttccttgctgatctatttaccaagtggaaggagaagaactgtagtcatgaagtgacagtggtcctgttttctagaactttctatgatgcaaaatctgttgatgaatttcctgaaataaaccgagcctcaattcgacaggatcacaaggggagattctatgaagacttttacaaagtggtggtgcagaatgagagaagagaagaatggacttcacttctcgtaaccattaaaaaactcttcatccagtatccagtgttggtgcgactggaacaggcagagggctttcctcaaggagataattctacctcagcacaaggaaactacctggaggccatcaatctgtcattcaatgtgtttgataagcactacatcaaccgcaactttgaccgaactgggcagatgtcagtggtgatcacgcccggggtgggtgtctttgaagtggaccgcctactcatgatcctgaccaagcagcggatgatagataatggaattggtgtggatttggtgtgcatgggagagcaaccgttacatgctgtcccattgttcaagctccataatcggagtgctccccgtgattctcgtctgggcgatgactataatatccctcactggataaaccacagtttctacacatccaaaagccagctcttttgtaatagtttcaccccacgaataaaactggcaggaaagaagcccgcctctgagaaagcaaaaaatggccgtgatacatctctcgggagtccaaaagaatctgagaacgcccttcccatccaagtagattatgacgcctatgacgctcaagtgttcaggctgcccggcccatcccgggcccagtgcctcaccacctgcagatctgtgcgagagcgagagagtcacagtcgaaagagtgccagctcctgtgatgtttcatccagcccttccctaccaagccgcacactgcccactgaggaagtgaggagccaggcttctgacgacagctccctaggcaagagtgccaacatcctgatgatcccacacccccacctgcaccagtatgaagtcagcagctccttgggatacaccagcactcgagatgtcctggagaacatgatggagccaccacagcgagactccagtgcaccagggaggtttcacgttggcagtgcagaatccatgctgcatgttcgacctggtggatacacgccccagagagcactgattaaccccttcgctccctctcggatgcccatgaagcttacgtccaacagaaggcgctggatgcacacttttcctgtggggccatccggagaagccatccagatccaccaccagacccgacagaatatggcggagctacaaggcagcgggcagagggatccaactcactcctctgcagagctgctggagttagcatatcatgaagctgctggaaggcacagcaattcccgccagcctggtgacggcatgtccttcttgaacttcagtggaacagaggagctttctgtcggcctgcttagcaacagtggtgcaggtatgaatcctaggacccagaataaggattctctagaggacagtgtttctacctctccagacccaattctgacactgtctgctccccctgtagtgccaggcttctgttgcacagttggagtggactggaagtctctcactactccggcgtgcctcccccttaccaccgactacttccctgaccgccagggcctgcagaatgactacacagagggctgttatgatctccttccagaagcagacatcgacaggagggacgaagatggtgtgcagatgacagcccagcaggtatttgaagagtttatttgccaacgtctcatgcagggctaccaaatcatagtgcagcccaagacacagaaacccaatcctgctgtcccgcccccgctgagcagtagcccactctatagccgaggccttgtgtcccgaaaccgccctgaggaggaggaccagtattggctgagtatgggcagaacgttccacaaagtgacgctgaaggataagatgatcacagtgacgcgataccttcccaagtatccttatgaatctgcccagatccactacacctacagcctctgtccttcccactcagactcagagttcgtctcctgctgggtggaattctcccacgaacggctggaggagtacaagtggaattacttagatcagtatatctgttctgccggctctgaagacttcagcttaattgagtccctgaagttctggaggacccgcttcctgctgctgccagcctgtgtcaccgccaccaagcgcatcacggagggggaggcccactgcgacatctatggggacaggccccgtgcagacgaggacgagtggcaactcctggatggttttgtccgctttgtggagggcttgaatcgcattcgcaggcggcatcgctcggatcgcatgatgcggaaagggaccgccatgaaaggcttgcagatgactgggcccatttccacgcattctctggagtcaactgcacccccagtggggaagaagggaacctcagctctctctgccctgttggagatggaggccagtcagaagtgcctgggagaacagcaggcagctgtgcatggtgggaagagctccgcccagtcagccgagagcagcagcgttgccatgactcccacctacatggacagcccacgaaaggacggggccttctttatggagtttgtccgcagcccacgcacagcatcgtccgccttctaccctcaggtatctgtggaccaaacagccactcctatgttggacggcaccagtttgggcatatgcacaggccaatccatggacagaggcaacagccagacctttgggaactcccagaacataggagaacagggctactcctccacaaactccagtgacagcagctctcagcagctggtggcaagctccttgacctcatcctctaccctgacagagatcctggaagccatgaagcacccctcgacaggagtccagctgctctctgaacagaagggcctctcaccgtactgcttcatcagcgcggaggtggtacactggttggtgaaccacgtggaggggatccagacacaggcgatggccattgacatcatgcagaaaatgctggaagagcagctcatcacacatgcatctggcgaagcctggcggaccttcatctacggcttctatttctacaagatagtaacggacaaagagcccgaccgagtggccatgcagcagcccgccaccacctggcacacagcaggagtggacgacttcgccagcttccagcgcaagtggtttgaggtggcctttgtggcagaagagctcgtgcactctgagattcctgcctttctcctgccctggctgcctagccggccagcctcctatgcaagtaggcacagctcctttagccgaagttttggaggacggagccaggcggcagcacttttagctgccactgtcccagagcagaggactgtgaccctggatgttgacgtgaacaaccgcacagaccggctggagtggtgcagctgttattaccatggcaacttttctctgaatgcagcctttgagatcaagctgcactggatggcggtgaccgcagcagtactcttcgagatggtccaaggttggcatcggaaagccacctcctgtggcttcttgttagtcccagttttggaggggccttttgcactgcccagttacctgtatggcgacccccttcgtgcccagctcttcatcccactcaacatcagctgcttgctcaaggagggcagcgagcacctgtttgatagctttgaacccgaaacgtactgggatcgaatgcacctcttccaggaagccattgcacacaggtttgggtttgtacaagataaatattctgcctctgcttttaacttccctgctgagaacaagcctcagtatatccacgttacaggaacagtgtttctgcagctgccctactccaagcgcaagttctcagggcagcagcggcggcggcggaactccaccagctccaccaaccagaacatgttctgcgaggagcgggtcggctacaactgggcctacaacaccatgctcaccaaaacatggcgctccagcgccacaggggatgaaaagtttgctgatcggctgctgaaggacttcacggacttctgcatcaaccgtgacaaccggctggtcacgttctggacaagttgcctggagaagatgcatgccagtgccccgtgaggccaggctgcacctgtgctgggggaaggtgggtgagccactgccctcaaacccggggcggaggattccaggcaggctctaggagtcaggtgtccgtttgctgctatcagtgagtgggggccattgttttttgtttgtttgtttgtttgtttgtttgtttttggcccccacgacaagtcttctactctagaagaaagactttggaagcagctgctgctgctgccaccactcctgtcagcaagtgctcagagcaggtgggaggcacagattgtccgtgggagggctccagtgtctgggaagagggcaggcggcccccatgaatgtcctcggaagggggtggctcctggtagcatccttttccttcaccatctatgggatattaggggcagaatctgccacttcttgcccaggagtgtgcacagatgtaagataattttgtgaaataatgtaccatagactctcaccaactgtatatacctgtacatatcagaagcaaataaagagctccacgtgcatcatttctttccccacccagtt

SEQ ID NO: 126423 - DNA, 5307 bp, Homo sapiens
  Payload ID: 4788
  Gene Symbol: DEPDC5
  Gene Name: DEP domain containing 5
  Uniprot ID: O75140
  ENST ID: ENST00000400248
  CDS Start-End: 60-4778
gaggcaagatgacttctctgccccaagcttggaacagctaaagggaaaaacagtgcaagatgagaacaacaaaggtctacaaactcgtcatccacaagaagggctttgggggcagtgatgatgagctagttgtgaaccccaaagtgttccctcacatcaagcttggagacattgtagagattgcacaccccaacgatgaatacagccctctgcttttgcaggtcaagtctcttaaggaagatttacagaaggaaactatcagtgtggaccagactgtgactcaagtgttccggctgagaccttatcaggatgtctatgttaatgtcgtagaccctaaggatgtgacccttgacctagtggaattaacttttaaggatcagtatattggccgtggggatatgtggcgactaaagaaaagtttggtcagcacatgtgcctatatcacccagaaggtggagtttgctggcatcagagcacaggctggtgaactgtgggttaagaatgagaaggtcatgtgtggctacatcagtgaagataccagggtggtgtttcgttctacgtcggctatggtttacatatttattcagatgagctgtgaaatgtgggattttgatatttatggggatttgtattttgagaaagctgtgaatggtttccttgctgatctatttaccaagtggaaggagaagaactgtagtcatgaagtgacagtggtcctgttttctagaactttctatgatgcaaaatctgttgatgaatttcctgaaataaaccgagcctcaattcgacaggatcacaaggggagattctatgaagacttttacaaagtggtggtgcagaatgagagaagagaagaatggacttcacttctcgtaaccattaaaaaactcttcatccagtatccagtgttggtgcgactggaacaggcagagggctttcctcaaggagataattctacctcagcacaaggaaactacctggaggccatcaatctgtcattcaatgtgtttgataagcactacatcaaccgcaactttgaccgaactgggcagatgtcagtggtgatcacgcccggggtgggtgtctttgaagtggaccgcctactcatgatcctgaccaagcagcggatgatagataatggaattggtgtggatttggtgtgcatgggagagcaaccgttacatgctgtcccattgttcaagctccataatcggagtgctccccgtgattctcgtctgggcgatgactataatatccctcactggataaaccacagtttctacacatccaaaagccagctcttttgtaatagtttcaccccacgaataaaactggcaggaaagaagcccgcctctgagaaagcaaaaaatggccgtgatacatctctcgggagtccaaaagaatctgagaacgcccttcccatccaagtagattatgacgcctatgacgctcaagtgttcaggctgcccggcccatcccgggcccagtgcctcaccacctgcagatctgtgcgagagcgagagagtcacagtcgaaagagtgccagctcctgtgatgtttcatccagcccttccctaccaagccgcacactgcccactgaggaagtgaggagccaggcttctgacgacagctccctaggcaagagtgccaacatcctgatgatcccacacccccacctgcaccagtatgaagtcagcagctccttgggatacaccagcactcgagatgtcctggagaacatgatggagccaccacagcgagactccagtgcaccagggaggtttcacgttggcagtgcagaatccatgctgcatgttcgacctggtggatacacgccccagagagcactgattaaccccttcgctccctctcggatgcccatgaagcttacgtccaacagaaggcgctggatgcacacttttcctgtggggccatccggagaagccatccagatccaccaccagacccgacagaatatggcggagctacaaggcagcgggcagagggatccaactcactcctctgcagagctgctggagttagcatatcatgaagctgctggaaggcacagcaattcccgccagcctggtgacggcatgtccttcttgaacttcagtggaacagaggagctttctgtcggcctgcttagcaacagtggtgcaggtatgaatcctaggacccagaataaggattctctagaggacagtgtttctacctctccagacccaatgccaggcttctgttgcacagttggagtggactggaagtctctcactactccggcgtgcctcccccttaccaccgactacttccctgaccgccagggcctgcagaatgactacacagagggctgttatgatctccttccagaagcagacatcgacaggagggacgaagatggtgtgcagatgacagcccagcaggtatttgaagagtttatttgccaacgtctcatgcagggctaccaaatcatagtgcagcccaagacacagaaacccaatcctgctgtcccgcccccgctgagcagtagcccactctatagccgaggccttgtgtcccgaaaccgccctgaggaggaggaccagtattggctgagtatgggcagaacgttccacaaagtgacgctgaaggataagatgatcacagtgacgcgataccttcccaagtatccttatgaatctgcccagatccactacacctacagcctctgtccttcccactcagactcagagttcgtctcctgctgggtggaattctcccacgaacggctggaggagtacaagtggaattacttagatcagtatatctgttctgccggctctgaagacttcagcttaattgagtccctgaagttctggaggacccgcttcctgctgctgccagcctgtgtcaccgccaccaagcgcatcacggagggggaggcccactgcgacatctatggggacaggccccgtgcagacgaggacgagtggcaactcctggatggttttgtccgctttgtggagggcttgaatcgcattcgcaggcggcatcgctcggatcgcatgatgcggaaagggaccgccatgaaaggcttgcagatgactgggcccatttccacgcattctctggagtcaactgcacccccagtggggaagaagggaacctcagctctctctgccctgttggagatggaggccagtcagaagtgcctgggagaacagcaggcagctgtgcatggtgggaagagctccgcccagtcagccgagagcagcagcgttgccatgactcccacctacatggacagcccacgaaaggtatctgtggaccaaacagccactcctatgttggacggcaccagtttgggcatatgcacaggccaatccatggacagaggcaacagccagacctttgggaactcccagaacataggagaacagggctactcctccacaaactccagtgacagcagctctcagcagctggtggcaagctccttgacctcatcctctaccctgacagagatcctggaagccatgaagcacccctcgacaggagtccagctgctctctgaacagaagggcctctcaccgtactgcttcatcagcgcggaggtggtacactggttggtgaaccacgtggaggggatccagacacaggcgatggccattgacatcatgcagaaaatgctggaagagcagctcatcacacatgcatctggcgaagcctggcggaccttcatctacggcttctatttctacaagatagtaacggacaaagagcccgaccgagtggccatgcagcagcccgccaccacctggcacacagcaggagtggacgacttcgccagcttccagcgcaagtggtttgaggtggcctttgtggcagaagagctcgtgcactctgagattcctgcctttctcctgccctggctgcctagccggccagcctcctatgcaagtaggcacagctcctttagccgaagttttggaggacggagccaggcggcagcacttttagctgccactgtcccagagcagaggactgtgaccctggatgttgacgtgaacaaccgcacagaccggctggagtggtgcagctgttattaccatggcaacttttctctgaatgcagcctttgagatcaagctgcactggatggcggtgaccgcagcagtactcttcgagatggtccaaggttggcatcggaaagccacctcctgtggcttcttgttagtcccagttttggaggggccttttgcactgcccagttacctgtatggcgacccccttcgtgcccagctcttcatcccactcaacatcagctgcttgctcaaggagggcagcgagcacctgtttgatagctttgaacccgaaacgtactgggatcgaatgcacctcttccaggaagccattgcacacaggtttgggtttgtacaagataaatattctgcctctgcttttaacttccctgctgagaacaagcctcagtatatccacgttacaggaacagtgtttctgcagctgccctactccaagcgcaagttctcagggcagcagcggcggcggcggaactccaccagctccaccaaccagaacatgttctgcgaggagcgggtcggctacaactgggcctacaacaccatgctcaccaaaacatggcgctccagcgccacaggggatgaaaagtttgctgatcggctgctgaaggacttcacggacttctgcatcaaccgtgacaaccggctggtcacgttctggacaagttgcctggagaagatgcatgccagtgccccgtgaggccaggctgcacctgtgctgggggaaggtgggtgagccactgccctcaaacccggggcggaggattccaggcaggctctaggagtcaggtgtccgtttgctgctatcagtgagtgggggccattgttttttgtttgtttgtttgtttgtttgtttgtttttggcccccacgacaagtcttctactctagaagaaagactttggaagcagctgctgctgctgccaccactcctgtcagcaagtgctcagagcaggtgggaggcacagattgtccgtgggagggctccagtgtctgggaagagggcaggcggcccccatgaatgtcctcggaagggggtggctcctggtagcatccttttccttcaccatctatgggatattaggggcagaatctgccacttcttgcccaggagtgtgcacagatgtaagataattttgtgaaataatgtaccatagactctcaccaactgtatatacctgtacatatcagaagcaaataaagagctccacgtgcatcatttctttcccc

SEQ ID NO: 126424 - DNA, 5458 bp, Homo sapiens
  Payload ID: 4788
  Gene Symbol: DEPDC5
  Gene Name: DEP domain containing 5
  Uniprot ID: O75140
  ENST ID: ENST00000400249
  CDS Start-End: 203-4921
ctagtaggcgcttcaggcttaggggcggaacagcgcgggccgcgcgggcgtaggcggggtatctggaggaggcgcagggaacctggagagggtccagccctcagtgccccggccagaggcgggaaggggctctagagcttcgggaggcaagatgacttctctgccccaagcttggaacagctaaagggaaaaacagtgcaagatgagaacaacaaaggtctacaaactcgtcatccacaagaagggctttgggggcagtgatgatgagctagttgtgaaccccaaagtgttccctcacatcaagcttggagacattgtagagattgcacaccccaacgatgaatacagccctctgcttttgcaggtcaagtctcttaaggaagatttacagaaggaaactatcagtgtggaccagactgtgactcaagtgttccggctgagaccttatcaggatgtctatgttaatgtcgtagaccctaaggatgtgacccttgacctagtggaattaacttttaaggatcagtatattggccgtggggatatgtggcgactaaagaaaagtttggtcagcacatgtgcctatatcacccagaaggtggagtttgctggcatcagagcacaggctggtgaactgtgggttaagaatgagaaggtcatgtgtggctacatcagtgaagataccagggtggtgtttcgttctacgtcggctatggtttacatatttattcagatgagctgtgaaatgtgggattttgatatttatggggatttgtattttgagaaagctgtgaatggtttccttgctgatctatttaccaagtggaaggagaagaactgtagtcatgaagtgacagtggtcctgttttctagaactttctatgatgcaaaatctgttgatgaatttcctgaaataaaccgagcctcaattcgacaggatcacaaggggagattctatgaagacttttacaaagtggtggtgcagaatgagagaagagaagaatggacttcacttctcgtaaccattaaaaaactcttcatccagtatccagtgttggtgcgactggaacaggcagagggctttcctcaaggagataattctacctcagcacaaggaaactacctggaggccatcaatctgtcattcaatgtgtttgataagcactacatcaaccgcaactttgaccgaactgggcagatgtcagtggtgatcacgcccggggtgggtgtctttgaagtggaccgcctactcatgatcctgaccaagcagcggatgatagataatggaattggtgtggatttggtgtgcatgggagagcaaccgttacatgctgtcccattgttcaagctccataatcggagtgctccccgtgattctcgtctgggcgatgactataatatccctcactggataaaccacagtttctacacatccaaaagccagctcttttgtaatagtttcaccccacgaataaaactggcaggaaagaagcccgcctctgagaaagcaaaaaatggccgtgatacatctctcgggagtccaaaagaatctgagaacgcccttcccatccaagtagattatgacgcctatgacgctcaagtgttcaggctgcccggcccatcccgggcccagtgcctcaccacctgcagatctgtgcgagagcgagagagtcacagtcgaaagagtgccagctcctgtgatgtttcatccagcccttccctaccaagccgcacactgcccactgaggaagtgaggagccaggcttctgacgacagctccctaggcaagagtgccaacatcctgatgatcccacacccccacctgcaccagtatgaagtcagcagctccttgggatacaccagcactcgagatgtcctggagaacatgatggagccaccacagcgagactccagtgcaccagggaggtttcacgttggcagtgcagaatccatgctgcatgttcgacctggtggatacacgccccagagagcactgattaaccccttcgctccctctcggatgcccatgaagcttacgtccaacagaaggcgctggatgcacacttttcctgtggggccatccggagaagccatccagatccaccaccagacccgacagaatatggcggagctacaaggcagcgggcagagggatccaactcactcctctgcagagctgctggagttagcatatcatgaagctgctggaaggcacagcaattcccgccagcctggtgacggcatgtccttcttgaacttcagtggaacagaggagctttctgtcggcctgcttagcaacagtggtgcaggtatgaatcctaggacccagaataaggattctctagaggacagtgtttctacctctccagacccaatgccaggcttctgttgcacagttggagtggactggaagtctctcactactccggcgtgcctcccccttaccaccgactacttccctgaccgccagggcctgcagaatgactacacagagggctgttatgatctccttccagaagcagacatcgacaggagggacgaagatggtgtgcagatgacagcccagcaggtatttgaagagtttatttgccaacgtctcatgcagggctaccaaatcatagtgcagcccaagacacagaaacccaatcctgctgtcccgcccccgctgagcagtagcccactctatagccgaggccttgtgtcccgaaaccgccctgaggaggaggaccagtattggctgagtatgggcagaacgttccacaaagtgacgctgaaggataagatgatcacagtgacgcgataccttcccaagtatccttatgaatctgcccagatccactacacctacagcctctgtccttcccactcagactcagagttcgtctcctgctgggtggaattctcccacgaacggctggaggagtacaagtggaattacttagatcagtatatctgttctgccggctctgaagacttcagcttaattgagtccctgaagttctggaggacccgcttcctgctgctgccagcctgtgtcaccgccaccaagcgcatcacggagggggaggcccactgcgacatctatggggacaggccccgtgcagacgaggacgagtggcaactcctggatggttttgtccgctttgtggagggcttgaatcgcattcgcaggcggcatcgctcggatcgcatgatgcggaaagggaccgccatgaaaggcttgcagatgactgggcccatttccacgcattctctggagtcaactgcacccccagtggggaagaagggaacctcagctctctctgccctgttggagatggaggccagtcagaagtgcctgggagaacagcaggcagctgtgcatggtgggaagagctccgcccagtcagccgagagcagcagcgttgccatgactcccacctacatggacagcccacgaaaggtatctgtggaccaaacagccactcctatgttggacggcaccagtttgggcatatgcacaggccaatccatggacagaggcaacagccagacctttgggaactcccagaacataggagaacagggctactcctccacaaactccagtgacagcagctctcagcagctggtggcaagctccttgacctcatcctctaccctgacagagatcctggaagccatgaagcacccctcgacaggagtccagctgctctctgaacagaagggcctctcaccgtactgcttcatcagcgcggaggtggtacactggttggtgaaccacgtggaggggatccagacacaggcgatggccattgacatcatgcagaaaatgctggaagagcagctcatcacacatgcatctggcgaagcctggcggaccttcatctacggcttctatttctacaagatagtaacggacaaagagcccgaccgagtggccatgcagcagcccgccaccacctggcacacagcaggagtggacgacttcgccagcttccagcgcaagtggtttgaggtggcctttgtggcagaagagctcgtgcactctgagattcctgcctttctcctgccctggctgcctagccggccagcctcctatgcaagtaggcacagctcctttagccgaagttttggaggacggagccaggcggcagcacttttagctgccactgtcccagagcagaggactgtgaccctggatgttgacgtgaacaaccgcacagaccggctggagtggtgcagctgttattaccatggcaacttttctctgaatgcagcctttgagatcaagctgcactggatggcggtgaccgcagcagtactcttcgagatggtccaaggttggcatcggaaagccacctcctgtggcttcttgttagtcccagttttggaggggccttttgcactgcccagttacctgtatggcgacccccttcgtgcccagctcttcatcccactcaacatcagctgcttgctcaaggagggcagcgagcacctgtttgatagctttgaacccgaaacgtactgggatcgaatgcacctcttccaggaagccattgcacacaggtttgggtttgtacaagataaatattctgcctctgcttttaacttccctgctgagaacaagcctcagtatatccacgttacaggaacagtgtttctgcagctgccctactccaagcgcaagttctcagggcagcagcggcggcggcggaactccaccagctccaccaaccagaacatgttctgcgaggagcgggtcggctacaactgggcctacaacaccatgctcaccaaaacatggcgctccagcgccacaggggatgaaaagtttgctgatcggctgctgaaggacttcacggacttctgcatcaaccgtgacaaccggctggtcacgttctggacaagttgcctggagaagatgcatgccagtgccccgtgaggccaggctgcacctgtgctgggggaaggtgggtgagccactgccctcaaacccggggcggaggattccaggcaggctctaggagtcaggtgtccgtttgctgctatcagtgagtgggggccattgttttttgtttgtttgtttgtttgtttgtttgtttttggcccccacgacaagtcttctactctagaagaaagactttggaagcagctgctgctgctgccaccactcctgtcagcaagtgctcagagcaggtgggaggcacagattgtccgtgggagggctccagtgtctgggaagagggcaggcggcccccatgaatgtcctcggaagggggtggctcctggtagcatccttttccttcaccatctatgggatattaggggcagaatctgccacttcttgcccaggagtgtgcacagatgtaagataattttgtgaaataatgtaccatagactctcaccaactgtatatacctgtacatatcagaagcaaataaagagctccacgtgcatcatttctttccccacccagtt

SEQ ID NO: 126425 - DNA, 3260 bp, Homo sapiens
  Payload ID: 4788
  Gene Symbol: DEPDC5
  Gene Name: DEP domain containing 5
  ENST ID: ENST00000448753
  CDS Start-End: 1-1980
gcaccagggaggtttcacgttggcagtgcagaatccatgctgcatgttcgacctggtggatacacgccccagagagcactgattaaccccttcgctccctctcggatgcccatgaagcttacgtccaacagaaggcgctggatgcacacttttcctgtgggtatgaatcctaggacccagaataaggattctctagaggacagtgtttctacctctccagacccaattctgacactgtctgctccccctgtagtgccaggcttctgttgcacagttggagtggactggaagtctctcactactccggcgtgcctcccccttaccaccgactacttccctgaccgccagggcctgcagaatgactacacagagggctgttatgatctccttccagaagcagacatcgacaggagggacgaagatggtgtgcagatgacagcccagcaggtatttgaagagtttatttgccaacgtctcatgcagggctaccaaatcatagtgcagcccaagacacagaaacccaatcctgctgtcccgcccccgctgagcagtagcccactctatagccgaggccttgtgtcccgaaaccgccctgaggaggaggaccagtattggctgagtatgggcagaacgttccacaaagtgacgctgaaggataagatgatcacagtgacgcgataccttcccaagtatccttatgaatctgcccagatccactacacctacagcctctgtccttcccactcagactcagagttcgtctcctgctgggtggaattctcccacgaacggctggaggagtacaagtggaattacttagatcagtatatctgttctgccggctctgaagacttcagcttaattgagtccctgaagttctggaggacccgcttcctgctgctgccagcctgtgtcaccgccaccaagcgcatcacggagggggaggcccactgcgacatctatggggacaggccccgtgcagacgaggacgagtggcaactcctggatggttttgtccgctttgtggagggcttgaatcgcattcgcaggcggcatcgctcggatcgcatgatgcggaaagggaccgccatgaaaggcttgcagatgactgggcccatttccacgcattctctggagtcaactgcacccccagtggggaagaagggaacctcagctctctctgccctgttggagatggaggccagtcagaagtgcctgggagaacagcaggcagctgtgcatggtgggaagagctccgcccagtcagccgagagcagcagcgttgccatgactcccacctacatggacagcccacgaaaggacggggccttctttatggagtttgtccgcagcccacgcacagcatcgtccgccttctaccctcaggtatctgtggaccaaacagccactcctatgttggacggcaccagtttgggcatatgcacaggccaatccatggacagaggcaacagccagacctttgggaactcccagaacataggagaacagggctactcctccacaaactccagtgacagcagctctcagcagctggtggcaagctccttgacctcatcctctaccctgacagagatcctggaagccatgaagcacccctcgacaggagtccagctgctctctgaacagaagggcctctcaccgtactgcttcatcagcgcggaggtggtacactggttggtgaaccacgtggaggggatccagacacaggcgatggccattgacatcatgcagtggccatgcagcagcccgccaccacctggcacacagcaggagtggacgacttcgccagcttccagcgcaagtggtttgaggtggcctttgtggcagaagagctcgtgcactctgagattcctgcctttctcctgccctggctgcctagccggccagcctcctatgcaagtaggcacagctcctttagccgaagttttggaggacggagccaggcggcagcacttttagctgccactgtcccagagcagaggactgtgaccctggatgttgacgtgaacaaccgcacagaccggctggagtggtgcagctgttattaccatggcaacttttctctgaatgcagcctttgagatcaagctgcactggatggcggtgaccgcagcagtactcttcgagatggtccaaggttggcatcggaaagccacctcctgtggcttcttgttagtcccagttttggaggggccttttgcactgcccagttacctgtatggcgacccccttcgtgcccagctcttcatcccactcaacatcagctgcttgctcaaggagggcagcgagcacctgtttgatagctttgaacccgaaacgtactgggatcgaatgcacctcttccaggaagccattgcacacaggtttgggtttgtacaagataaatattctgcctctgcttttaacttccctgctgagaacaagcctcagtatatccacgttacaggaacagtgtttctgcagctgccctactccaagcgcaagttctcagggcagcagcggcggcggcggaactccaccagctccaccaaccagaacatgttctgcgaggagcgggtcggctacaactgggcctacaacaccatgctcaccaaaacatggcgctccagcgccacaggggatgaaaagtttgctgatcggctgctgaaggacttcacggacttctgcatcaaccgtgacaaccggctggtcacgttctggacaagttgcctggagaagatgcatgccagtgccccgtgaggccaggctgcacctgtgctgggggaaggtgggtgagccactgccctcaaacccggggcggaggattccaggcaggctctaggagtcaggtgtccgtttgctgctatcagtgagtgggggccattgttttttgtttgtttgtttgtttgtttgtttgtttttggcccccacgacaagtcttctactctagaagaaagactttggaagcagctgctgctgctgccaccactcctgtcagcaagtgctcagagcaggtgggaggcacagattgtccgtgggagggctccagtgtctgggaagagggcaggcggcccccatgaatgtcctcggaagggggtggctcctggtagcatccttttccttcaccatctatgggatattaggggcagaatctgccacttcttgcccaggagtgtgcacagatgtaagataattttgtgaaataatgtaccatagactctcaccaactgtatatacctgtacatatcagaagcaaataaa

SEQ ID NO: 126426 - DNA, 549 bp, Homo sapiens
  Payload ID: 4788
  Gene Symbol: DEPDC5
  Gene Name: DEP domain containing 5
  ENST ID: ENST00000456178
  CDS Start-End: 79-159
agcggcgcgggttctcagggaggcaagatgacttctctgccccaagcttggaacagctaaagggaaaaacagtgcaagatgagaacaacaaaggtctacaaactcgtcatccacaagaagggctttgggggcagtgtggctgaattgtctttcagatgatgagctagttgtgaaccccaaagtgttccctcacatcaagcttggagacattgtagagattgcacaccccaacgatgaatacagccctctgcttttgcaggtcaagtctcttaaggaagatttacagaaggaaactatcagtgtggaccagactgtgactcaagtgttccggctgagaccttatcaggatgtctatgttaatgtcgtagaccctaaggatgtgacccttgacctagtggaattaacttttaaggatcagtatattggccgtggggatatgtggcgactaaagaaaagtttggtcagcacatgtgcctatatcacccagaaggtggagtttgctggcatcagagcacaggctggtgaactgtgggttaagaatgagaaggt

SEQ ID NO: 126427 - DNA, 3450 bp, Homo sapiens
  Payload ID: 4788
  Gene Symbol: DEPDC5
  Gene Name: DEP domain containing 5
  ENST ID: ENST00000433147
  CDS Start-End: 1-2938
ctctcggatgcccatgaagcttacgtccaacagaaggcgctggatgcacacttttcctgtggggccatccggagaagccatccagatccaccaccagacccgacagaatatggcggagctacaaggcagcgggcagagggatccaactcactcctctgcagagctgctggagttagcatatcatgaagctgctggaaggcacagcaattcccgccagcctggtgacggcatgtccttcttgaacttcagtggaacagaggagctttctgtcggcctgcttagcaacagtggtgcaggtatgaatcctaggacccagaataaggattctctagaggacagtgtttctacctctccagacccaattctgacactgtctgctccccctgtagtgccaggcttctgttgcacagttggagtggactggaagtctctcactactccggcgtgcctcccccttaccaccgactacttccctgaccgccagggcctgcagaatgactacacagagggctgttatgatctccttccagaagcagacatcgacaggagggacgaagatggtgtgcagatgacagcccagcaggtatttgaagagtttatttgccaacgtctcatgcagggctaccaaatcatagtgcagcccaagacacagaaacccaatcctgctgtcccgcccccgctgagcagtagcccactctatagccgaggccttgtgtcccgaaaccgccctgaggaggaggaccagtattggctgagtatgggcagaacgttccacaaagtgacgctgaaggataagatgatcacagtgacgcgataccttcccaagtatccttatgaatctgcccagatccactacacctacagcctctgtccttcccactcagactcagagttcgtctcctgctgggtggaattctcccacgaacggctggaggagtacaagtggaattacttagatcagtatatctgttctgccggctctgaagacttcagcttaattgagtccctgaagttctggaggacccgcttcctgctgctgccagcctgtgtcaccgccaccaagcgcatcacggagggggaggcccactgcgacatctatggggacaggccccgtgcagacgaggacgagtggcaactcctggatggttttgtccgctttgtggagggcttgaatcgcattcgcaggcggcatcgctcggatcgcatgatgcggaaagggaccgccatgaaaggcttgcagatgactgggcccatttccacgcattctctggagtcaactgcacccccagtggggaagaagggaacctcagctctctctgccctgttggagatggaggccagtcagaagtgcctgggagaacagcaggcagctgtgcatggtgggaagagctccgcccagtcagccgagagcagcagcgttgccatgactcccacctacatggacagcccacgaaaggtatctgtggaccaaacagccactcctatgttggacggcaccagtttgggcatatgcacaggccaatccatggacagaggcaacagccagacctttgggaactcccagaacataggagaacagggctactcctccacaaactccagtgacagcagctctcagcagctggtggcaagctccttgacctcatcctctaccctgacagagatcctggaagccatgaagcacccctcgacaggagtccagctgctctctgaacagaagggcctctcaccgtactgcttcatcagcgcggaggtggtacactggttggtgaaccacgtggaggggatccagacacaggcgatggccattgacatcatgcagaaaatgctggaagagcagctcatcacacatgcatctggcgaagcctggcggaccttcatctacggcttctatttctacaagatagtaacggacaaagagcccgaccgagtggccatgcagcagcccgccaccacctggcacacagcaggagtggacgacttcgccagcttccagcgcaagtggtttgaggtggcctttgtggcagaagagctcgtgcactctgagattcctgcctttctcctgccctggctgcctagccggccagcctcctatgcaagtaggcacagctcctttagccgaagttttggaggacggagccaggcggcagcacttttagctgccactgtcccagagcagaggactgtgaccctggatgttgacgtgaacaaccgcacagaccggctggagtggtgcagctgttattaccatggcaacttttctctgaatgcagcctttgagatcaagctgcactggatggcggtgaccgcagcagtactcttcgagatggtccaaggttggcatcggaaagccacctcctgtggcttcttgttagtcccagttttggaggggccttttgcactgcccagttacctgtatggcgacccccttcgtgcccagctcttcatcccactcaacatcagctgcttgctcaaggagggcagcgagcacctgtttgatagctttgaacccgaaacgtactgggatcgaatgcacctcttccaggaagccattgcacacaggtttgggtttgtacaagataaatattctgcctctgcttttaacttccctgctgagaacaagcctcagtatatccacgttacaggaacagtgtttctgcagctgccctactccaagcgcaagttctcagggcagcagcggcggcggcggaactccaccagctccaccaaccagaacatgttctgcgaggagcgggtcggctacaactgggcctacaacaccatgctcaccaaaacatggcgctccagcgccacaggggatgaaaagtttgctgatcggctgctgaaggacttcacggacttctgcatcaaccgtgacaaccggctggtcacgttctggacaagttgcctggagaagatgcatgccagtgccccgtgaggccaggctgcacctgtgctgggggaaggtgggtgagccactgccctcaaacccggggcggaggattccaggcaggctctaggagtcaggtgtccgtttgctgctatcagtgagtgggggccattgttttttgtttgtttgtttgtttgtttgtttgtttttggcccccacgacaagtcttctactctagaagaaagactttggaagcagctgctgctgctgccaccactcctgtcagcaagtgctcagagcaggtgggaggcacagattgtccgtgggagggctccagtgtctgggaagagggcaggcggcccccatgaatgtcctcggaagggggtggctcctggtagcatccttttccttcaccatctatgggatattaggggcagaatctgccacttcttgcccaggagtgtgcacagatgtaagataattttgtgaaataatgtaccatagactctcaccaactgtatatacctgtacatatcagaagcaaataaagagctccacgt

SEQ ID NO: 126428 - DNA, 434 bp, Homo sapiens
  Payload ID: 4788
  Gene Symbol: DEPDC5
  Gene Name: DEP domain containing 5
  ENST ID: ENST00000458532
  CDS Start-End: 1-181
tgctggcatcagagcacaggctggtgaactgtgggttaagaatgagaaggtcatgtgtggctacatcagtgaagataccagggtggtgtttcgttctacgtcggctatggtttacatatttattcagatgagctgtgaaatgtgggattttgatatttatggtactgtgtctatgtgctgattgtaactgctaaggggagaattttctggaactgcaaatgctaattcatgaatgcccagggtcccccacatcatcttctaacaaactttaaatatcattgtgagaataatcatatttggaggttagagtgttttctcgttctaaagatacactacttttttcaataatcaaatttttttcaaactgcattgtatgttgaagtcatagcctcttagtagtgaggcagatattaaatttggcttcaaaaaataaa

SEQ ID NO: 126429 - DNA, 236 bp, Homo sapiens
  Payload ID: 4788
  Gene Symbol: DEPDC5
  Gene Name: DEP domain containing 5
  ENST ID: ENST00000437411
  CDS Start-End: 100-236
gccccggggcggagccaccggagcggcgcgggttctcagggaggcaagatgacttctctgccccaagcttggaacagctaaagggaaaaacagtgcaagatgagaacaacaaaggtctacaaactcgtcatccacaagaagggctttgggggcagtgatgatgagctagttgtgaaccccaaagtgttccctcacatcaagcttggagacattgtagagattgcacaccccaacga

SEQ ID NO: 126430 - DNA, 5155 bp, Homo sapiens
  Payload ID: 4788
  Gene Symbol: DEPDC5
  Gene Name: DEP domain containing 5
  Uniprot ID: O75140
  ENST ID: ENST00000535622
  CDS Start-End: 107-4618
aggcggggccccggggcggagccaccggagcggcgcgggttctcagggaggcaagatgacttctctgccccaagcttggaacagctaaagggaaaaacagtgcaagatgagaacaacaaaggtctacaaactcgtcatccacaagaagggctttgggggcagtgatgatgagctagttgtgaaccccaaagtgttccctcacatcaagcttggagacattgtagagattgcacaccccaacgatgaatacagccctctgcttttgcaggtcaagtctcttaaggaagatttacagaaggaaactatcagtgtggaccagactgtgactcaagtgttccggctgagaccttatcaggatgtctatgttaatgtcgtagaccctaaggatgtgacccttgacctagtggaattaacttttaaggatcagtatattggccgtggggatatgtggcgactaaagaaaagtttggtcagcacatgtgcctatatcacccagaaggtggagtttgctggcatcagagcacaggctggtgaactgtgggttaagaatgagaaggtcatgtgtggctacatcagtgaagataccagggtggtgtttcgttctacgtcggctatggtttacatatttattcagatgagctgtgaaatgtgggattttgatatttatggggatttgtattttgagaaagctgtgaatggtttccttgctgatctatttaccaagtggaaggagaagaactgtagtcatgaagtgacagtggtcctgttttctagaactttctatgatgcaaaatctgttgatgaatttcctgaaataaaccgagcctcaattcgacaggatcacaaggggagattctatgaagacttttacaaagtggtggtgcagaatgagagaagagaagaatggacttcacttctcgtaaccattaaaaaactcttcatccagtatccagtgttggtgcgactggaacaggcagagggctttcctcaaggagataattctacctcagcacaaggaaactacctggaggccatcaatctgtcattcaatgtgtttgataagcactacatcaaccgcaactttgaccgaactgggcagatgtcagtggtgatcacgcccggggtgggtgtctttgaagtggaccgcctactcatgatcctgaccaagcagcggatgatagataatggaattggtgtggatttggtgtgcatgggagagcaaccgttacatgctgtcccattgttcaagctccataatcggagtgctccccgtgattctcgtctgggcgatgactataatatccctcactggataaaccacagtttctacacatccaaaagccagctcttttgtaatagtttcaccccacgaataaaactggcaggaaagaagcccgcctctgagaaagcaaaaaatggccgtgatacatctctcgggagtccaaaagaatctgagaacgcccttcccatccaagtagattatgacgcctatgacgctcaagtgttcaggctgcccggcccatcccgggcccagtgcctcaccacctgcagatctgtgcgagagcgagagagtcacagtcgaaagagtgccagctcctgtgatgtttcatccagcccttccctaccaagccgcacactgcccactgaggaagtgaggagccaggcttctgacgacagctccctaggcaagagtgccaacatcctgatgatcccacacccccacctgcaccagtatgaagtcagcagctccttgggatacaccagcactcgagatgtcctggagaacatgatggagccaccacagcgagactccagtgcaccagggaggtttcacgttggcagtgcagaatccatgctgcatgttcgacctggtggatacacgccccagagagcactgattaaccccttcgctccctctcggatgcccatgaagcttacgtccaacagaaggcgctggatgcacacttttcctgtgggtatgaatcctaggacccagaataaggattctctagaggacagtgtttctacctctccagacccaattctgacactgtctgctccccctgtagtgccaggcttctgttgcacagttggagtggactggaagtctctcactactccggcgtgcctcccccttaccaccgactacttccctgaccgccagggcctgcagaatgactacacagagggctgttatgatctccttccagaagcagacatcgacaggagggacgaagatggtgtgcagatgacagcccagcaggtatttgaagagtttatttgccaacgtctcatgcagggctaccaaatcatagtgcagcccaagacacagaaacccaatcctgctgtcccgcccccgctgagcagtagcccactctatagccgaggccttgtgtcccgaaaccgccctgaggaggaggaccagtattggctgagtatgggcagaacgttccacaaagtgacgctgaaggataagatgatcacagtgacgcgataccttcccaagtatccttatgaatctgcccagatccactacacctacagcctctgtccttcccactcagactcagagttcgtctcctgctgggtggaattctcccacgaacggctggaggagtacaagtggaattacttagatcagtatatctgttctgccggctctgaagacttcagcttaattgagtccctgaagttctggaggacccgcttcctgctgctgccagcctgtgtcaccgccaccaagcgcatcacggagggggaggcccactgcgacatctatggggacaggccccgtgcagacgaggacgagtggcaactcctggatggttttgtccgctttgtggagggcttgaatcgcattcgcaggcggcatcgctcggatcgcatgatgcggaaagggaccgccatgaaaggcttgcagatgactgggcccatttccacgcattctctggagtcaactgcacccccagtggggaagaagggaacctcagctctctctgccctgttggagatggaggccagtcagaagtgcctgggagaacagcaggcagctgtgcatggtgggaagagctccgcccagtcagccgagagcagcagcgttgccatgactcccacctacatggacagcccacgaaaggtatctgtggaccaaacagccactcctatgttggacggcaccagtttgggcatatgcacaggccaatccatggacagaggcaacagccagacctttgggaactcccagaacataggagaacagggctactcctccacaaactccagtgacagcagctctcagcagctggtggcaagctccttgacctcatcctctaccctgacagagatcctggaagccatgaagcacccctcgacaggagtccagctgctctctgaacagaagggcctctcaccgtactgcttcatcagcgcggaggtggtacactggttggtgaaccacgtggaggggatccagacacaggcgatggccattgacatcatgcagaaaatgctggaagagcagctcatcacacatgcatctggcgaagcctggcggaccttcatctacggcttctatttctacaagatagtaacggacaaagagcccgaccgagtggccatgcagcagcccgccaccacctggcacacagcaggagtggacgacttcgccagcttccagcgcaagtggtttgaggtggcctttgtggcagaagagctcgtgcactctgagattcctgcctttctcctgccctggctgcctagccggccagcctcctatgcaagtaggcacagctcctttagccgaagttttggaggacggagccaggcggcagcacttttagctgccactgtcccagagcagaggactgtgaccctggatgttgacgtgaacaaccgcacagaccggctggagtggtgcagctgttattaccatggcaacttttctctgaatgcagcctttgagatcaagctgcactggatggcggtgaccgcagcagtactcttcgagatggtccaaggttggcatcggaaagccacctcctgtggcttcttgttagtcccagttttggaggggccttttgcactgcccagttacctgtatggcgacccccttcgtgcccagctcttcatcccactcaacatcagctgcttgctcaaggagggcagcgagcacctgtttgatagctttgaacccgaaacgtactgggatcgaatgcacctcttccaggaagccattgcacacaggtttgggtttgtacaagataaatattctgcctctgcttttaacttccctgctgagaacaagcctcagtatatccacgttacaggaacagtgtttctgcagctgccctactccaagcgcaagttctcagggcagcagcggcggcggcggaactccaccagctccaccaaccagaacatgttctgcgaggagcgggtcggctacaactgggcctacaacaccatgctcaccaaaacatggcgctccagcgccacaggggatgaaaagtttgctgatcggctgctgaaggacttcacggacttctgcatcaaccgtgacaaccggctggtcacgttctggacaagttgcctggagaagatgcatgccagtgccccgtgaggccaggctgcacctgtgctgggggaaggtgggtgagccactgccctcaaacccggggcggaggattccaggcaggctctaggagtcaggtgtccgtttgctgctatcagtgagtgggggccattgttttttgtttgtttgtttgtttgtttgtttgtttttggcccccacgacaagtcttctactctagaagaaagactttggaagcagctgctgctgctgccaccactcctgtcagcaagtgctcagagcaggtgggaggcacagattgtccgtgggagggctccagtgtctgggaagagggcaggcggcccccatgaatgtcctcggaagggggtggctcctggtagcatccttttccttcaccatctatgggatattaggggcagaatctgccacttcttgcccaggagtgtgcacagatgtaagataattttgtgaaataatgtaccatagactctcaccaactgtatatacctgtacatatcagaagcaaataaagagctccacgtgcatcatttctttccccacccagtt

SEQ ID NO: 126431 - DNA, 1755 bp, Homo sapiens
  Payload ID: 4789
  Gene Symbol: DEPDC7
  Gene Name: DEP domain containing 7
  Uniprot ID: Q96QD5
  ENST ID: ENST00000241051
  CDS Start-End: 93-1628
gagccacgccccgcacagttaacagacgggcgctcagggagctagggagctgtgaagctgctggaggagttggcgtccggggagcaagggccatggccaccgtgcaggagaaggctgctgcgctgaacctctcggctctccacagccccgcgcacaggcctccgggtttcagtgtagctcagaagccatttggagccacgtatgtatggagcagcatcataaacactcttcaaacacaagtggaagtgaaaaaacgaaggcaccgtttaaaacgacataatgactgctttgttggttcagaagctgtggatgtcattttttctcacctaattcagaataagtattttggtgatgtagatattcctcgagccaaagtggtgagagtgtgtcaagcgcttatggactacaaagtatttgaagcagttccaaccaaagtctttggaaaagacaaaaaacctacatttgaagatagtagttgcagcctttatagattcaccacaatacctaaccaagacagtcagttaggcaaagagaacaaactatattcacctgccaggtatgcagatgcattatttaagtcatccgatatcagatcagccagtttagaggacctgtgggaaaatctgagtttaaagcctgccaactcccctcatgtaaatatctctgcaaccttgtctccacaagttattaatgaagtgtggcaagaagaaacaattgggcgtctactacaacttgtagaccttccacttcttgactccttactgaaacagcaagaggctgtacctaaaattcctcaacctaagaggcagtccaccatggtcaacagcagtaactatctggatcgagggattctcaaggcttatagtgactctcaggaagatgagtggctctcggcagcaattgactgtttagaataccttccagaccaaatggtggtggaaataagcagaagctttcctgagcaaccagaccgaacagacttagtgaaagaacttctgtttgatgccattggcagatattacagtagtagggaacctctgttaaatcacttatctgacgttcataatggaattgcagaactcttagtgaatgggaagacggaaatagctttagaagctacccagctccttctaaagcttttagatttccaaaatagagaagaatttagaagactactgtatttcatggctgttgcagcaaatccttctgagtttaaattacagaaagaaagtgacaaccgaatggttgtgaaaaggatattctcaaaagctattgttgacaataaaaatttatccaaaggcaaaacagatcttctggtactctttttaatggatcatcagaaagatgtttttaagattcctggaactctacataaaattgtaagtgttaagcttatggccatacagaacggaagagatccaaatagagatgcaggatatatttattgccagagaattgatcaacgtgactattccaacaatacagagaagacaaccaaagatgagctgttgaatttactaaaaactcttgatgaggattcaaaactttctgccaaagagaagaaaaaattgctaggtcaattctataagtgtcacccagacatctttattgagcattttggagactgagtttttaatatctgtatataagttgtgtattttaagaataaattatgtatcctaaatatccaatcacatttgtaagcgtggaagctctaaatttgaaactgtacttaataaaaatttttttgtataa

SEQ ID NO: 126432 - DNA, 2012 bp, Homo sapiens
  Payload ID: 4789
  Gene Symbol: DEPDC7
  Gene Name: DEP domain containing 7
  Uniprot ID: Q96QD5
  ENST ID: ENST00000311388
  CDS Start-End: 377-1885
agctgcgaccacttggccaacgcccccgccgagcgggcggatcgagttcctctctggctggtgggctgcaagcggcagagcccgcccgcacagcccagcttttttctttctacccagactctcaacttgaccgcgcgttggtctgtgcgcccgctaacgtgccaggcacgcgccggggagctccgggatatgctccgcggtgctaccggtgacaagtgtggtatctggaatttgtgtagttctttgccccctgtctcaaccacaaaccttgacgacacagtatggccaggggccgagctcctcccttgcccactttgttctccagactgctaggagtcaagagtcagcttgtctccccagactcttcctgggagggatgagaggtttatgtgagttctactggcaggaatttggcataaaaggtttcagtgtagctcagaagccatttggagccacgtatgtatggagcagcatcataaacactcttcaaacacaagtggaagtgaaaaaacgaaggcaccgtttaaaacgacataatgactgctttgttggttcagaagctgtggatgtcattttttctcacctaattcagaataagtattttggtgatgtagatattcctcgagccaaagtggtgagagtgtgtcaagcgcttatggactacaaagtatttgaagcagttccaaccaaagtctttggaaaagacaaaaaacctacatttgaagatagtagttgcagcctttatagattcaccacaatacctaaccaagacagtcagttaggcaaagagaacaaactatattcacctgccaggtatgcagatgcattatttaagtcatccgatatcagatcagccagtttagaggacctgtgggaaaatctgagtttaaagcctgccaactcccctcatgtaaatatctctgcaaccttgtctccacaagttattaatgaagtgtggcaagaagaaacaattgggcgtctactacaacttgtagaccttccacttcttgactccttactgaaacagcaagaggctgtacctaaaattcctcaacctaagaggcagtccaccatggtcaacagcagtaactatctggatcgagggattctcaaggcttatagtgactctcaggaagatgagtggctctcggcagcaattgactgtttagaataccttccagaccaaatggtggtggaaataagcagaagctttcctgagcaaccagaccgaacagacttagtgaaagaacttctgtttgatgccattggcagatattacagtagtagggaacctctgttaaatcacttatctgacgttcataatggaattgcagaactcttagtgaatgggaagacggaaatagctttagaagctacccagctccttctaaagcttttagatttccaaaatagagaagaatttagaagactactgtatttcatggctgttgcagcaaatccttctgagtttaaattacagaaagaaagtgacaaccgaatggttgtgaaaaggatattctcaaaagctattgttgacaataaaaatttatccaaaggcaaaacagatcttctggtactctttttaatggatcatcagaaagatgtttttaagattcctggaactctacataaaattgtaagtgttaagcttatggccatacagaacggaagagatccaaatagagatgcaggatatatttattgccagagaattgatcaacgtgactattccaacaatacagagaagacaaccaaagatgagctgttgaatttactaaaaactcttgatgaggattcaaaactttctgccaaagagaagaaaaaattgctaggtcaattctataagtgtcacccagacatctttattgagcattttggagactgagtttttaatatctgtatataagttgtgtattttaagaataaattatgtatcctaaatatccaatcacatttgtaagcgtggaagctctaaatttgaaactgtacttaataaaaatttttttgtataa

SEQ ID NO: 126433 - DNA, 1988 bp, Homo sapiens
  Payload ID: 4789
  Gene Symbol: DEPDC7
  Gene Name: DEP domain containing 7
  ENST ID: ENST00000616885
  CDS Start-End: 264-1865
aacgcccccgccgagcgggcggatcgagttcctctctggctggtgggctgcaagcggcagagcccgcccgcacagcccagcttttttctttctacccagactctcaacttgaccgcgcgttggtctgtgcgcccgctaacgtgccaggcacgcgccggggagctccgggatatgctccgcggtgctaccggtgacaagtgtggtatctggaatttgtgtagttctttgccccctgtctcaaccacaaaccttgacgacacagtatggccaggggccgatcctcccttgcccactttgttctccagactgctaggagtcaagagtcagcttgtctccccagactcttcctgggagggatgagaggtttatgtgagttctactggcaggaatttggcataaaaggtttcagtgtagctcagaagccatttggagccacgtatgtatggagcagcatcataaacactcttcaaacacaagtggaagtgaaaaaacgaaggcaccgtttaaaacgacataatgactgctttgttggttcagaagctgtggatgtcattttttctcacctaattcagaataagtattttggtgatgtagatattcctcgagccaaagtggtgagagtgtgtcaagcgcttatggactacaaagtatttgaagcagttccaaccaaagtctttggaaaagacaaaaaacctacatttgaagatagtagttgcagcctttatagattcaccacaatacctaaccaagacagtcagttaggcaaagagaacaaactatattcacctgccaggtatgcagatgcattatttaagtcatccgatatcagatcagccagtttagaggacctgtgggaaaatctgagtttaaagcctgccaactcccctcatgtaaatatctctgcaaccttgtctccacaagttattaatgaagtgtggcaagaagaaacaattgggcgtctactacaacttgtagaccttccacttcttgactccttactgaaacagcaagaggctgtacctaaaattcctcaacctaagaggcagtccaccatggtcaacagcagtaactatctggatcgagggattctcaaggcttatagtgactctcaggaagatgagtggctctcggcagcaattgactgtttagaataccttccagaccaaatggtggtggaaataagcagaagctttcctgagcaaccagaccgaacagacttagtgaaagaacttctgtttgatgccattggcagatattacagtagtagggaacctctgttaaatcacttatctgacgttcataatggaattgcagaactcttagtgaatgggaagacggaaatagctttagaagctacccagctccttctaaagcttttagatttccaaaatagagaagaatttagaagactactgtatttcatggctgttgcagcaaatccttctgagtttaaattacagaaagaaagtgacaaccgaatggttgtgaaaaggatattctcaaaagctattgttgacaataaaaatttatccaaaggcaaaacagatcttctggtactctttttaatggatcatcagaaagatgtttttaagattcctggaactctacataaaattgtaagtgttaagcttatggccatacagaacggaagagatccaaatagagatgcaggatatatttattgccagagaattgatcaacgtgactattccaacaatacagagaagacaaccaaagatgagctgttgaatttactaaaaactcttgatgaggattcaaaactttctgccaaagagaagaaaaaattgctaggtcaattctataagtgtcacccagacatctttattgagcattttggagactgagtttttaatatctgtatataagttgtgtattttaagaataaattatgtatcctaaatatccaatcacatttgtaagcgtggaagctctaaatttgaaactgtacttaataaaaatttttttgt

SEQ ID NO: 126434 - DNA, 2569 bp, Homo sapiens
  Payload ID: 4790
  Gene Symbol: DEPTOR
  Gene Name: DEP domain containing MTOR-interacting protein
  Uniprot ID: Q8TB45
  ENST ID: ENST00000286234
  CDS Start-End: 131-1360
aatccagtcagagcagcggagctgccccgaacaaagatggcgcgggaagcgtctgtgagggcagactgatccgagcacccaaaccctcggcggacagcggagccagtggtagccgcacggccctaaaaccatggaggagggcggcagcactggcagtgctggcagtgacagcagcaccagcgggagtggcggggcgcagcaaagggagctggagcgcatggctgaggtcttggtcaccggggaacagctacggctcaggctgcacgaagaaaaggttattaaagatagacgtcatcatctcaagacctacccaaactgttttgtcgcaaaagaactgattgactggctgattgaacacaaagaggcttctgacagagagacggcaattaaactcatgcagaaattagcagaccggggcattattcaccatgtgtgtgatgagcataaggaattcaaggatgtcaaactcttctaccgctttagaaaggatgacggcaccttcccattggataatgaagtgaaggcctttatgagaggacagaggctatatgaaaagctgatgagccctgaaaacacactcctgcagcccagggaggaggaaggggtcaagtatgagcgcaccttcatggcatctgaattcctggactggctggttcaggaaggtgaggccaccacgaggaaagaggcagagcagctttgccaccggcttatggagcatggcatcatccagcatgtgtccaacaagcacccatttgtggacagcaatcttctctaccagttcagaatgaacttccggcggaggcgaagactgatggagctgctcaatgaaaagtccccctcctcccaggaaactcatgacagtcccttctgcctgaggaagcagagccatgacaatcggaaatctaccagctttatgtcagtgagccccagcaaggagatcaagatcgtgtctgcagtgaggagaagcagcatgagcagctgtggcagcagcggctacttcagcagcagccccaccctcagcagcagcccccctgtgctctgcaaccccaagtccgtgctgaagagacctgtcacctctgaggaactccttactcccggggctccgtatgcaaggaagacattcacgattgttggtgacgcggttggctggggttttgtggtgcgaggaagtaagccatgccacatccaggctgtagaccccagtggccctgcagccgcagcaggaatgaaggtctgtcagtttgtcgtctctgtcaacgggctcaatgtcctgcatgtagactaccggaccgtgagcaatctgattctgacgggcccacggacgattgtcatggaagtcatggaggagttagagtgctgagctcctgggcctcccagccctccagtggcctgtgggtgagggaagccagaatgacacaaagcaatgcaaagacaagattgccatgcaaatggatggttttggacatacgagtcttctccgcacatacatgtctaaagttgagttttatacactgaatgtggaagaaccgggtatcatatcttttttaaaaaatgtcagtgtagaaaacatttgggaaaccattttcctacatgatagaactgccttactagatttctatttgtagctctcattcattgttttttatcttagtttgcagaaaggtgttgaaatgcttctctagcccaaacagcgacatgctaaagtccccttcttcagagtcaatagagtagttgttaaaggttttaaattgtactttctccaaaattagcatgcagctatttaatagggaatctagatttcaccaagattcaaatcaaagcaacatttaaaggaataagacctgttcactagcattttcaagggggttctaaagcattcaagtgcttaaaagccataaaaaatgacttcttaattcctgcctttagtgtcaacttttaagttaatacaggtttcaattgtggcattaggaaaaaaaaaaaccttgtgatgctatggttgggggtagttagggagagactacatgaaattgtgtgcccctattttctttctgatcctaaatcattttgttttataaatcagctatagcatctttctagaattaatcctgaatatgttgaatgttaaaatagagaagtttgtatatacacataattaaaaatcaacccttctggcaagatttcactttgaaggtgtctgtttttaagggaaggctaaaactttgctgatatgtgataaaacttgaactctaaattgcctccttagcctgaatttttactagctttctagtgtaacatattctaaggacatgacatgctgcttatttggggggattatttttcaccaaaatgatcatcttgtgttgtaacttttcagctcacttgtatatacgcacgttttcatttttggtctagaaaatagtgcattttggggctcagcgtgcagaggaaattcctcaaagtgccaaattaggcagtcaggaaatactaaattcttcattccaaataatggatctgaatgatgacgttaattttttatcatgcattaacaaaataaaatatgagaattgta

SEQ ID NO: 126435 - DNA, 1397 bp, Homo sapiens
  Payload ID: 4790
  Gene Symbol: DEPTOR
  Gene Name: DEP domain containing MTOR-interacting protein
  Uniprot ID: Q8TB45
  ENST ID: ENST00000523492
  CDS Start-End: 131-1057
aatccagtcagagcagcggagctgccccgaacaaagatggcgcgggaagcgtctgtgagggcagactgatccgagcacccaaaccctcggcggacagcggagccagtggtagccgcacggccctaaaaccatggaggagggcggcagcactggcagtgctggcagtgacagcagcaccagcgggagtggcggggcgcagcaaagggagctggagcgcatggctgaggtcttggtcaccggggaacagctacggctgatgagccctgaaaacacactcctgcagcccagggaggaggaaggggtcaagtatgagcgcaccttcatggcatctgaattcctggactggctggttcaggaaggtgaggccaccacgaggaaagaggcagagcagctttgccaccggcttatggagcatggcatcatccagcatgtgtccaacaagcacccatttgtggacagcaatcttctctaccagttcagaatgaacttccggcggaggcgaagactgatggagctgctcaatgaaaagtccccctcctcccaggaaactcatgacagtcccttctgcctgaggaagcagagccatgacaatcggaaatctaccagctttatgtcagtgagccccagcaaggagatcaagatcgtgtctgcagtgaggagaagcagcatgagcagctgtggcagcagcggctacttcagcagcagccccaccctcagcagcagcccccctgtgctctgcaaccccaagtccgtgctgaagagacctgtcacctctgaggaactccttactcccggggctccgtatgcaaggaagacattcacgattgttggtgacgcggttggctggggttttgtggtgcgaggaagtaagccatgccacatccaggctgtagaccccagtggccctgcagccgcagcaggaatgaaggtctgtcagtttgtcgtctctgtcaacgggctcaatgtcctgcatgtagactaccggaccgtgagcaatctgattctgacgggcccacggacgattgtcatggaagtcatggaggagttagagtgctgagctcctgggcctcccagccctccagtggcctgtgggtgagggaagccagaatgacacaaagcaatgcaaagacaagattgccatgcaaatggatggttttggacatacgagtcttctccgcacatacatgtctaaagttgagttttatacactgaatgtggaagaaccgggtatcatatcttttttaaaaaatgtcagtgtagaaaacatttgggaaaccattttcctacatgatagaactgccttactagatttctatttgtagctctcattcattgttttttatcttagtttgcagaaaggtgttgaaatgcttctctagcccaaacagcgacatgct

SEQ ID NO: 126436 - DNA, 2122 bp, Homo sapiens
  Payload ID: 4791
  Gene Symbol: DCAKD
  Gene Name: dephospho-CoA kinase domain containing
  Uniprot ID: Q8WVC6
  ENST ID: ENST00000310604
  CDS Start-End: 340-1035
attcggccacgctttgaggaaagaaggggcgcaaggttggtgggaccgacccttgggaaccgggcggccgcctggcatgatgggagttgtagttcgatgctggtttagggtttcaggcgtggaggttccaaaatccgaggtttgatttcagcctgcccttgccagtgcctgggccgctgggagccgttattggctgccgttaaggaccgttacgtttcccggcaggtccttctggcactcctctggtggaccgcccccatcggccacacttgccctgctctccagtgattctgtagctcctggctccgtagtctcgcggacagctctctttcctggaagatgtttctggtgggcctgacagggggcattgcctcaggcaagagctcagtgatccaggtgttccagcagctgggctgtgcggtgattgacgtggacgtgatggcccggcacgtcgtgcagccaggataccctgcccaccggcgcatcgtagaggtcttcggcactgaggtcttgctggagaacggcgacataaatcgcaaggtcctgggggacctgatctttaaccagcctgaccggcggcagctgctcaacgccatcacccaccccgagattcgcaaggagatgatgaaggagacgttcaagtacttcctccggggataccgctacgtgattctggatatccccctgctgtttgagaccaagaagttgctcaagtacatgaagcacaccgtggtagtatactgcgaccgggacacacagctggcacggctgatgcggcggaacagcctgaaccgcaaggacgcagaggcccgcatcaatgcccagctgcccctgacagacaaggcccgcatggcccgccatgtcctagacaactcgggcgagtggagtgtcaccaaacgccaggtcatcctcttgcacactgagctggagcgctccctggagtacctgccgctgaggtttggggtcctcacagggctcgctgccattgccagcctcctctacctgctcacccactaccttctgccttacgcctagtggggcactcaaggcagggagccccaggcctccatctatctccttggaggctgaagccaggtaacacatcctgtttcctctcagccccctccccacacacacacacacacacacacacacacacacacacacacacacacacacacggactctccgaatcagggctgggcctctgtgccaggccatcccgtctttggagtgtatcctatttgagatcaagaaatagcctgctgtccttcccaccttccctgagcagcacctacagaacagcaaccgtgatggtgtgtgaaagcaacagtcagagactgctatacatttctgtgggtgggggtagggaatactggctctgtggccctcctcagagctgggaggccaagggttcactgggcttgaatcctctctaagcacctaccccattgtggcctaaacctcctcagtggaccacgggaaatcatgttggaccaagggtttccatgttcaaacagtcaacaaggccctcccctaggttgagatattttttatactgaaggcccaggccccccagtatggcttgctgccagcaagcagcaaggattctctcgtgggtaacgctgtagccaggcaggaccagcctcttctgggagacccctctccccacgtagggtttgtgtagtgctcccacatcctgcttattgcctgccacccctgcttctcgcctggacctcttggtattccgtgtacaccatccttgctgtttcttgcctctgtgccttcaacctgctgctcctggcctgggataccttttattttcttttatttcttcttcctttttttttttttttttttttttaacctacaactagctctcagttcaggcactgtctaaagccccaggctgggttaggtggtctaggataccaactccccctcaacattttaccttaatccaacagtacagtaattagccgaaacttgcctggtttttcctactagactgtaagccctctagggacagggacagtgtcttattcatctctgtgttcttagtgcagagcctggcccgctgttggtgtttaataaagtgtgttgatctgaaatgccccagacc

SEQ ID NO: 126437 - DNA, 2030 bp, Homo sapiens
  Payload ID: 4791
  Gene Symbol: DCAKD
  Gene Name: dephospho-CoA kinase domain containing
  Uniprot ID: Q8WVC6
  ENST ID: ENST00000342350
  CDS Start-End: 246-941
gttcgatgctggtttagggtttcaggcgtggaggttccaaaatccgaggtttgatttcagcctgcccttgccagtgcctgggccgctgggagccgttattggctgccgttaaggaccgttacgtttcccgggtccttctggcactcctctggtggaccgcccccatcggccacacttgccctgctctccagtgattctgtagctcctggctccgtagtctcgcggacagctctctttcctggaagatgtttctggtgggcctgacagggggcattgcctcaggcaagagctcagtgatccaggtgttccagcagctgggctgtgcggtgattgacgtggacgtgatggcccggcacgtcgtgcagccaggataccctgcccaccggcgcatcgtagaggtcttcggcactgaggtcttgctggagaacggcgacataaatcgcaaggtcctgggggacctgatctttaaccagcctgaccggcggcagctgctcaacgccatcacccaccccgagattcgcaaggagatgatgaaggagacgttcaagtacttcctccggggataccgctacgtgattctggatatccccctgctgtttgagaccaagaagttgctcaagtacatgaagcacaccgtggtagtatactgcgaccgggacacacagctggcacggctgatgcggcggaacagcctgaaccgcaaggacgcagaggcccgcatcaatgcccagctgcccctgacagacaaggcccgcatggcccgccatgtcctagacaactcgggcgagtggagtgtcaccaaacgccaggtcatcctcttgcacactgagctggagcgctccctggagtacctgccgctgaggtttggggtcctcacagggctcgctgccattgccagcctcctctacctgctcacccactaccttctgccttacgcctagtggggcactcaaggcagggagccccaggcctccatctatctccttggaggctgaagccaggtaacacatcctgtttcctctcagccccctccccacacacacacacacacacacacacacacacacacacacacacacacacacacggactctccgaatcagggctgggcctctgtgccaggccatcccgtctttggagtgtatcctatttgagatcaagaaatagcctgctgtccttcccaccttccctgagcagcacctacagaacagcaaccgtgatggtgtgtgaaagcaacagtcagagactgctatacatttctgtgggtgggggtagggaatactggctctgtggccctcctcagagctgggaggccaagggttcactgggcttgaatcctctctaagcacctaccccattgtggcctaaacctcctcagtggaccacgggaaatcatgttggaccaagggtttccatgttcaaacagtcaacaaggccctcccctaggttgagatattttttatactgaaggcccaggccccccagtatggcttgctgccagcaagcagcaaggattctctcgtgggtaacgctgtagccaggcaggaccagcctcttctgggagacccctctccccacgtagggtttgtgtagtgctcccacatcctgcttattgcctgccacccctgcttctcgcctggacctcttggtattccgtgtacaccatccttgctgtttcttgcctctgtgccttcaacctgctgctcctggcctgggataccttttattttcttttatttcttcttcctttttttttttttttttttttttaacctacaactagctctcagttcaggcactgtctaaagccccaggctgggttaggtggtctaggataccaactccccctcaacattttaccttaatccaacagtacagtaattagccgaaacttgcctggtttttcctactagactgtaagccctctagggacagggacagtgtcttattcatctctgtgttcttagtgcagagcctggcccgctgttggtgtttaataaagtgtgttgatctgaaatgccccagaccaa

SEQ ID NO: 126438 - DNA, 2045 bp, Homo sapiens
  Payload ID: 4791
  Gene Symbol: DCAKD
  Gene Name: dephospho-CoA kinase domain containing
  Uniprot ID: Q8WVC6
  ENST ID: ENST00000452796
  CDS Start-End: 257-952
ctcctctccagatggccccagagcaccccaagctcaggacatgtccctccccagccaagctgtctccctttacttcctttgcctcctctctcccaattattttggcccaaactgatcagtcccgctggcctctcccaagcaggtccttctggcactcctctggtggaccgcccccatcggccacacttgccctgctctccagtgattctgtagctcctggctccgtagtctcgcggacagctctctttcctggaagatgtttctggtgggcctgacagggggcattgcctcaggcaagagctcagtgatccaggtgttccagcagctgggctgtgcggtgattgacgtggacgtgatggcccggcacgtcgtgcagccaggataccctgcccaccggcgcatcgtagaggtcttcggcactgaggtcttgctggagaacggcgacataaatcgcaaggtcctgggggacctgatctttaaccagcctgaccggcggcagctgctcaacgccatcacccaccccgagattcgcaaggagatgatgaaggagacgttcaagtacttcctccggggataccgctacgtgattctggatatccccctgctgtttgagaccaagaagttgctcaagtacatgaagcacaccgtggtagtatactgcgaccgggacacacagctggcacggctgatgcggcggaacagcctgaaccgcaaggacgcagaggcccgcatcaatgcccagctgcccctgacagacaaggcccgcatggcccgccatgtcctagacaactcgggcgagtggagtgtcaccaaacgccaggtcatcctcttgcacactgagctggagcgctccctggagtacctgccgctgaggtttggggtcctcacagggctcgctgccattgccagcctcctctacctgctcacccactaccttctgccttacgcctagtggggcactcaaggcagggagccccaggcctccatctatctccttggaggctgaagccaggtaacacatcctgtttcctctcagccccctccccacacacacacacacacacacacacacacacacacacacacacacacacacacggactctccgaatcagggctgggcctctgtgccaggccatcccgtctttggagtgtatcctatttgagatcaagaaatagcctgctgtccttcccaccttccctgagcagcacctacagaacagcaaccgtgatggtgtgtgaaagcaacagtcagagactgctatacatttctgtgggtgggggtagggaatactggctctgtggccctcctcagagctgggaggccaagggttcactgggcttgaatcctctctaagcacctaccccattgtggcctaaacctcctcagtggaccacgggaaatcatgttggaccaagggtttccatgttcaaacagtcaacaaggccctcccctaggttgagatattttttatactgaaggcccaggccccccagtatggcttgctgccagcaagcagcaaggattctctcgtgggtaacgctgtagccaggcaggaccagcctcttctgggagacccctctccccacgtagggtttgtgtagtgctcccacatcctgcttattgcctgccacccctgcttctcgcctggacctcttggtattccgtgtacaccatccttgctgtttcttgcctctgtgccttcaacctgctgctcctggcctgggataccttttattttcttttatttcttcttcctttttttttttttttttttttttaacctacaactagctctcagttcaggcactgtctaaagccccaggctgggttaggtggtctaggataccaactccccctcaacattttaccttaatccaacagtacagtaattagccgaaacttgcctggtttttcctactagactgtaagccctctagggacagggacagtgtcttattcatctctgtgttcttagtgcagagcctggcccgctgttggtgtttaataaagtgtgttgatctgaaatgccccagaccaaccaa

SEQ ID NO: 126439 - DNA, 990 bp, Homo sapiens
  Payload ID: 4791
  Gene Symbol: DCAKD
  Gene Name: dephospho-CoA kinase domain containing
  Uniprot ID: Q8WVC6
  ENST ID: ENST00000588499
  CDS Start-End: 173-868
gtaagcgctgcggagattgggctagaggcggaggcctgggccacggcggaggcgctgggtccttctggcactcctctggtggaccgcccccatcggccacacttgccctgctctccagtgattctgtagctcctggctccgtagtctcgcggacagctctctttcctggaagatgtttctggtgggcctgacagggggcattgcctcaggcaagagctcagtgatccaggtgttccagcagctgggctgtgcggtgattgacgtggacgtgatggcccggcacgtcgtgcagccaggataccctgcccaccggcgcatcgtagaggtcttcggcactgaggtcttgctggagaacggcgacataaatcgcaaggtcctgggggacctgatctttaaccagcctgaccggcggcagctgctcaacgccatcacccaccccgagattcgcaaggagatgatgaaggagacgttcaagtacttcctccggggataccgctacgtgattctggatatccccctgctgtttgagaccaagaagttgctcaagtacatgaagcacaccgtggtagtatactgcgaccgggacacacagctggcacggctgatgcggcggaacagcctgaaccgcaaggacgcagaggcccgcatcaatgcccagctgcccctgacagacaaggcccgcatggcccgccatgtcctagacaactcgggcgagtggagtgtcaccaaacgccaggtcatcctcttgcacactgagctggagcgctccctggagtacctgccgctgaggtttggggtcctcacagggctcgctgccattgccagcctcctctacctgctcacccactaccttctgccttacgcctagtggggcactcaaggcagggagccccaggcctccatctatctccttggaggctgaagccaggtaacacatcctgtttcctctcagccccctccccacacacacacacacacacacacacacac

SEQ ID NO: 126440 - DNA, 1000 bp, Homo sapiens
  Payload ID: 4791
  Gene Symbol: DCAKD
  Gene Name: dephospho-CoA kinase domain containing
  ENST ID: ENST00000593094
  CDS Start-End: 374-1000
agccggcctgtaagcgctgcggagattgggctagaggcggaggcctgggccacggcggaggcgctgggtacgtagcgcgccacgcgggccggtgagagccagccgggcgccggggagggggcgggccctggccgcggctgctacgcggggctgccaccgccccgggcgacccaatttcgcggcctagtggggcgtacgggcctcttttgaaagcctgagttacgatgtattgagcgcgtcgtatgcggccagcactaaggtccttctggcactcctctggtggaccgcccccatcggccacacttgccctgctctccagtgattctgtagctcctggctccgtagtctcgcggacagctctctttcctggaagatgtttctggtgggcctgacagggggcattgcctcaggcaagagctcagtgatccaggtgttccagcagctgggctgtgcggtgattgacgtggacgtgatggcccggcacgtcgtgcagccaggataccctgcccaccggcgcatcgtagaggtcttcggcactgaggtcttgctggagaacggcgacataaatcgcaaggtcctgggggacctgatctttaaccagcctgaccggcggcagctgctcaacgccatcacccaccccgagattcgcaaggagatgatgaaggagacgttcaagtacttcctccggggataccgctacgtgattctggatatccccctgctgtttgagaccaagaagttgctcaagtacatgaagcacaccgtggtagtatactgcgaccgggacacacagctggcacggctgatgcggcggaacagcctgaaccgcaaggacgcagaggcccgcatcaatgcccagctgcccctgacagacaaggcccgcatggcccgccatgtcctagacaactcgggcgagtggagtgtcaccaaacgccaggtcatcctcttgcacactgagctggagcgctccctggagtacctgccgctgaggtttggggtc

SEQ ID NO: 126441 - DNA, 2054 bp, Homo sapiens
  Payload ID: 4791
  Gene Symbol: DCAKD
  Gene Name: dephospho-CoA kinase domain containing
  Uniprot ID: Q8WVC6
  ENST ID: ENST00000614054
  CDS Start-End: 272-967
ccgggcgccggggagggggcgggccctggccgcggctgctacgcggggctgccaccgccccgggcgacccaatttcgcggcctagtggggcgtacgggcctcttttgaaagcctgagttacgatgtattgagcgcgtcgtatgcggccagcactaaggtccttctggcactcctctggtggaccgcccccatcggccacacttgccctgctctccagtgattctgtagctcctggctccgtagtctcgcggacagctctctttcctggaagatgtttctggtgggcctgacagggggcattgcctcaggcaagagctcagtgatccaggtgttccagcagctgggctgtgcggtgattgacgtggacgtgatggcccggcacgtcgtgcagccaggataccctgcccaccggcgcatcgtagaggtcttcggcactgaggtcttgctggagaacggcgacataaatcgcaaggtcctgggggacctgatctttaaccagcctgaccggcggcagctgctcaacgccatcacccaccccgagattcgcaaggagatgatgaaggagacgttcaagtacttcctccggggataccgctacgtgattctggatatccccctgctgtttgagaccaagaagttgctcaagtacatgaagcacaccgtggtagtatactgcgaccgggacacacagctggcacggctgatgcggcggaacagcctgaaccgcaaggacgcagaggcccgcatcaatgcccagctgcccctgacagacaaggcccgcatggcccgccatgtcctagacaactcgggcgagtggagtgtcaccaaacgccaggtcatcctcttgcacactgagctggagcgctccctggagtacctgccgctgaggtttggggtcctcacagggctcgctgccattgccagcctcctctacctgctcacccactaccttctgccttacgcctagtggggcactcaaggcagggagccccaggcctccatctatctccttggaggctgaagccaggtaacacatcctgtttcctctcagccccctccccacacacacacacacacacacacacacacacacacacacacacacacacacacggactctccgaatcagggctgggcctctgtgccaggccatcccgtctttggagtgtatcctatttgagatcaagaaatagcctgctgtccttcccaccttccctgagcagcacctacagaacagcaaccgtgatggtgtgtgaaagcaacagtcagagactgctatacatttctgtgggtgggggtagggaatactggctctgtggccctcctcagagctgggaggccaagggttcactgggcttgaatcctctctaagcacctaccccattgtggcctaaacctcctcagtggaccacgggaaatcatgttggaccaagggtttccatgttcaaacagtcaacaaggccctcccctaggttgagatattttttatactgaaggcccaggccccccagtatggcttgctgccagcaagcagcaaggattctctcgtgggtaacgctgtagccaggcaggaccagcctcttctgggagacccctctccccacgtagggtttgtgtagtgctcccacatcctgcttattgcctgccacccctgcttctcgcctggacctcttggtattccgtgtacaccatccttgctgtttcttgcctctgtgccttcaacctgctgctcctggcctgggataccttttattttcttttatttcttcttcctttttttttttttttttttttttaacctacaactagctctcagttcaggcactgtctaaagccccaggctgggttaggtggtctaggataccaactccccctcaacattttaccttaatccaacagtacagtaattagccgaaacttgcctggtttttcctactagactgtaagccctctagggacagggacagtgtcttattcatctctgtgttcttagtgcagagcctggcccgctgttggtgtttaataaagtgtgttgatctgaaatgccccagacc

SEQ ID NO: 126442 - DNA, 3340 bp, Homo sapiens
  Payload ID: 4792
  Gene Symbol: DERL1
  Gene Name: derlin 1
  Uniprot ID: Q9BUN8
  ENST ID: ENST00000259512
  CDS Start-End: 302-1057
acctggctccgccccccaggacgccgagcctcggccgggcggtaaaatcggcgcttaccctttaagcggcgggacttctggtcacgtcgtccgcggtcgccggaaggggaagtttcgcctcagaaggctgcctcgctggtccgaattcggtggcgccacgtccgcccgtctccgccttctgcatcgcggcttcggcggcttccacctagacacctaacagtcgcggagccggccgcgtcgtgagggggtcggcacggggagtcgggcggtcttgtgcatcttggctacctgtgggtcgaagatgtcggacatcggagactggttcaggagcatcccggcgatcacgcgctattggttcgccgccaccgtcgccgtgcccttggtcggcaaactcggcctcatcagcccggcctacctcttcctctggcccgaagccttcctttatcgctttcagatttggaggccaatcactgccaccttttatttccctgtgggtccaggaactggatttctttatttggtcaatttatatttcttatatcagtattctacgcgacttgaaacaggagcttttgatgggaggccagcagactatttattcatgctcctctttaactggatttgcatcgtgattactggcttagcaatggatatgcagttgctgatgattcctctgatcatgtcagtactttatgtctgggcccagctgaacagagacatgattgtatcattttggtttggaacacgatttaaggcctgctatttaccctgggttatccttggattcaactatatcatcggaggctcggtaatcaatgagcttattggaaatctggttggacatctttattttttcctaatgttcagatacccaatggacttgggaggaagaaattttctatccacacctcagtttttgtaccgctggctgcccagtaggagaggaggagtatcaggatttggtgtgccccctgctagcatgaggcgagctgctgatcagaatggcggaggcgggagacacaactggggccagggctttcgacttggagaccagtgaaggggcggcctcgggcagccgctcctctcaagccacatttcctcccagtgctgggtgcacttaacaactgcgttctggctaacactgttggacctgacccacactgaatgtagtctttcagtacgagacaaagtttcttaaatcccgaagaaaaatataagtgttccacaagtttcacgattctcattcaagtccttactgctgtgaagaacaaataccaactgtgcaaattgcaaaactgactacattttttggtgtcttctcttctcccctttccgtctgaataatgggttttagcgggtcctagtctgctggcattgagctggggctgggtcaccaaacccttcccaaaaggacccttatctctttcttgcacacatgcctctctcccacttttcccaacccccacatttgcaactagaagaggttgcccataaaattgctctgcccttgacaggttctgttatttattgacttttgccaaggcttggtcacaacaatcatattcacgtaattttccccctttggtggcagaactgtagcaatagggggagaagacaagcagcggatgaagcgttttctcagcttttggaattgcttcgacctgacatccgttgtaaccgtttgccacttcttcagatatttttataaaaaagtaccactgagtcagtgagggccacagattggtattaatgagatacgagggttgttgctgggtgtttgtttcctgagctaagtgatcaagactgtagtggagttgcagctaacatgggttaggtttaaaccatgggggatgcaacccctttgcgtttcatatgtaggcctactggctttgtgtagctggagtagttgggttgctttgtgttaggaggatccagatcatgttggctacagggagatgctctctttgagaggctcctgggcattgattccatttcaatctcattctggatatgtgttcattgagtaaaggaggagagaccctcatacgctatttaaatgtcacttttttgcctatcccccgttttttggtcatgtttcaattaattgtgaggaaggcgcagctcctctctgcacgtagatcattttttaaagctaatgtaagcacatctaagggaataacatgatttaaggttgaaatggctttagaatcatttgggtttgagggtgtgttattttgagtcatgaatgtacaagctctgtgaatcagaccagcttaaatacccacacctttttttcgtaggtgggcttttcctatcagagcttggctcataaccaaataaagttttttgaaggccatggcttttcacacagttattttattttatgacgttatctgaaagcagactgttaggagcagtattgagtggctgtcacactttgaggcaactaaaaaggcttcaaacgttttgatcagtttcttttcaggaaacattgtgctctaacagtatgactattctttcccccactcttaaacagtgtgatgtgtgttatcctaggaaatgagagttggcaaacaacttctcattttgaatagagtttgtgtgtacctctccatatttaatttatatgataaaataggtggggagagtctgaaccttaactgtcatgttttgttgttcatctgtggccacaataaagtttacttgtaaaattttagaggccattactccaattatgttgcacgtacactcattgtacaggcgtggagactcattgtatgtataagaatattctgacagtgagtgacccggagtctctggtgtaccctcttaccagtcagctgcctgcgagcagtcattttttcctaaaggtttacaagtatttagaactcttcagttcagggcaaaatgttcatgaagttattcctcttaaacatggttaggaagctgatgacgttattgattttgtctggattatgtttctggaataattttaccaaaacaagctatttgagttttgacttgacaaggcaaaacatgacagtggattctctttacaaatggaaaaaaaaaatccttattttgtataaaggacttccctttttgtaaactaatcctttttattggtaaaaattgtaaattaaaatgtgcaacttgaaggttgtctgtgttaagtttccatgtccctgctctgctgtctcttagatatcacataatttgtgtaaccaattatctcttgaagagcatttaggaagtacccagtattttttgctggattaattcctggatgcagaattcctgggttttcattttaatgaaggaggatgcttgctaactttga

SEQ ID NO: 126443 - DNA, 1994 bp, Homo sapiens
  Payload ID: 4792
  Gene Symbol: DERL1
  Gene Name: derlin 1
  Uniprot ID: Q9BUN8
  ENST ID: ENST00000405944
  CDS Start-End: 1-696
atgtcggacatcggagactggttcaggagcatcccggcgatcacgcgctattggttcgccgccaccgtcgccgtgcccttggtcggcaaactcggcctcatcagcccggcctacctcttcctctggcccgaagccttcctttatcgctttcagatttggaggccaatcactgccaccttttatttccctgtgggtccaggaactggatttctttatttggtcaatttatatttcttatatcagtattctacgcgacttgaaacaggagcttttgatgggaggccagcagactatttattcatgctcctctttaactggatttgcatcgtgattactggcttagcaatggatatgcagttgctgatgattcctctgatcatgtcagtactttatgtctgggcccagctgaacagagacatgattgtatcattttggtttggaacacgatttaaggcctgctatttaccctgggttatccttggattcaactatatcatcggaggctcatacccaatggacttgggaggaagaaattttctatccacacctcagtttttgtaccgctggctgcccagtaggagaggaggagtatcaggatttggtgtgccccctgctagcatgaggcgagctgctgatcagaatggcggaggcgggagacacaactggggccagggctttcgacttggagaccagtgaaggggcggcctcgggcagccgctcctctcaagccacatttcctcccagtgctgggtgcacttaacaactgcgttctggctaacactgttggacctgacccacactgaatgtagtctttcagtacgagacaaagtttcttaaatcccgaagaaaaatataagtgttccacaagtttcacgattctcattcaagtccttactgctgtgaagaacaaataccaactgtgcaaattgcaaaactgactacattttttggtgtcttctcttctcccctttccgtctgaataatgggttttagcgggtcctagtctgctggcattgagctggggctgggtcaccaaacccttcccaaaaggacccttatctctttcttgcacacatgcctctctcccacttttcccaacccccacatttgcaactagaagaggttgcccataaaattgctctgcccttgacaggttctgttatttattgacttttgccaaggcttggtcacaacaatcatattcacgtaattttccccctttggtggcagaactgtagcaatagggggagaagacaagcagcggatgaagcgttttctcagcttttggaattgcttcgacctgacatccgttgtaaccgtttgccacttcttcagatatttttataaaaaagtaccactgagtcagtgagggccacagattggtattaatgagatacgagggttgttgctgggtgtttgtttcctgagctaagtgatcaagactgtagtggagttgcagctaacatgggttaggtttaaaccatgggggatgcaacccctttgcgtttcatatgtaggcctactggctttgtgtagctggagtagttgggttgctttgtgttaggaggatccagatcatgttggctacagggagatgctctctttgagaggctcctgggcattgattccatttcaatctcattctggatatgtgttcattgagtaaaggaggagagaccctcatacgctatttaaatgtcacttttttgcctatcccccgttttttggtcatgtttcaattaattgtgaggaaggcgcagctcctctctgcacgtagatcattttttaaagctaatgtaagcacatctaagggaataacatgatttaaggttgaaatggctttagaatcatttgggtttgagggtgtgttattttgagtcatgaatgtacaagctctgtgaatcagaccagcttaaatacccacacctttttttcgtaggtgggcttttcctatcagagcttggctcataaccaaataaagttttttgaaggcc

SEQ ID NO: 126444 - DNA, 918 bp, Homo sapiens
  Payload ID: 4792
  Gene Symbol: DERL1
  Gene Name: derlin 1
  ENST ID: ENST00000419562
  CDS Start-End: 181-636
agaaggctgcctcgctggtccgaattcggtggcgccacgtccgcccgtctccgccttctgcatcgcggcttcggcggcttccacctagacacctaacagtcgcggagccggccgcgtcgtgagggggtcggcacggggagtcgggcggtcttgtgcatcttggctacctgtgggtcgaagatgtcggacatcggagactggttcaggagcatcccggcgatcacgcgctattggttcgccgccaccgtcgccgtgcccttggtcggcaaactcggcctcatcagcccggcctacctcttcctctggcccgaagccttcctttatcgctttcaggcctgctatttaccctgggttatccttggattcaactatatcatcggaggctcggtaatcaatgagcttattggaaatctggttggacatctttattttttcctaatgttcagatacccaatggacttgggaggaagaaattttctatccacacctcagtttttgtaccgctggctgcccagtaggagaggaggagtatcaggatttggtgtgccccctgctagcatgaggcgagctgctgatcagaatggcggaggcgggagacacaactggggccagggctttcgacttggagaccagtgaaggggcggcctcgggcagccgctcctctcaagccacatttcctcccagtgctgggtgcacttaacaactgcgttctggctaacactgttggacctgacccacactgaatgtagtctttcagtacgagacaaagtttcttaaatcccgaagaaaaatataagtgttccacaagtttcacgattctcattcaagtccttactgctgtgaagaacaaataccaactgtgcaaattgcaaaactgactacattttttggtgtcttctcttctcccctttccgtctg

SEQ ID NO: 126445 - DNA, 542 bp, Homo sapiens
  Payload ID: 4792
  Gene Symbol: DERL1
  Gene Name: derlin 1
  ENST ID: ENST00000523036
  CDS Start-End: 86-541
attctcccttccagatgcagtatgaggactgagtcagaggctatggaaaggagcttttgatgggaggccagcagactatttattcatgctcctctttaactggatttgcatcgtgattactggcttagcaatggatatgcagttgctgatgattcctctgatcatgtcagtactttatgtctgggcccagctgaacagagacatgattgtatcattttggtttggaacacgatttaaggcctgctatttaccctgggttatccttggattcaactatatcatcggaggctcggtaatcaatgagcttattggaaatctggttggacatctttattttttcctaatgttcagatacccaatggacttgggaggaagaaattttctatccacacctcagtttttgtaccgctggctgcccagtaggagaggaggagtatcaggatttggtgtgccccctgctagcatgaggcgagctgctgatcagaatggcggaggcgggagacacaactggggccagggctttcgacttggagaccagtgaa

SEQ ID NO: 126446 - DNA, 575 bp, Homo sapiens
  Payload ID: 4792
  Gene Symbol: DERL1
  Gene Name: derlin 1
  ENST ID: ENST00000519018
  CDS Start-End: 115-570
agagactttctttttcagtatctaaggccagtgtggtacaggtggttgtgtgtgtgtatgtgtgtttctaataataatggagcttttgatgggaggccagcagactatttattcatgctcctctttaactggatttgcatcgtgattactggcttagcaatggatatgcagttgctgatgattcctctgatcatgtcagtactttatgtctgggcccagctgaacagagacatgattgtatcattttggtttggaacacgatttaaggcctgctatttaccctgggttatccttggattcaactatatcatcggaggctcggtaatcaatgagcttattggaaatctggttggacatctttattttttcctaatgttcagatacccaatggacttgggaggaagaaattttctatccacacctcagtttttgtaccgctggctgcccagtaggagaggaggagtatcaggatttggtgtgccccctgctagcatgaggcgagctgctgatcagaatggcggaggcgggagacacaactggggccagggctttcgacttggagaccagtgaagggg

SEQ ID NO: 126447 - DNA, 4209 bp, Homo sapiens
  Payload ID: 4793
  Gene Symbol: DERL2
  Gene Name: derlin 2
  Uniprot ID: Q9GZP9
  ENST ID: ENST00000158771
  CDS Start-End: 57-776
gctggcggaaggggaaatggggtgggtggggggtggggcaggcgacggtggggaagatggcgtaccagagcttgcggctggagtacctgcagatcccaccggtcagccgcgcctacaccactgcctgcgtcctcaccaccgccgccgtgcagttggaattgatcacaccttttcagttgtacttcaatcctgaattaatctttaaacactttcaaatatggagattaatcaccaacttcttattttttgggccagttggattcaattttttatttaacatgatttttctatatcgttactgtcgaatgctagaagaaggctctttccgaggtcggacagcagactttgtatttatgttcctttttggtggattcttaatgaccctttttggtctgtttgtgagcttagttttcttgggccaggcctttacaataatgctcgtctatgtgtggagccgaaggaacccctatgtccgcatgaacttcttcggccttctcaacttccaggccccctttctgccctgggtgctcatgggattttccttgttgttggggaactcaatcattgtggaccttttgggtattgcagttggacacatatattttttcttggaagatgtatttcccaatcaacctggtggaataagaattctgaaaacaccatctattttgaaagctatttttgatacaccagatgaggatccaaattacaatccactacctgaggaacggccaggaggcttcgcctggggtgagggccagcggcttggaggttaaagcagcagtgccaataatgagacccagctgggaaggactcggtgatacccactgggatcttttatcctttgttgcaaaagtgtggacacttttgacagcttggcagattttaactccagaagcactttatgaaatggtacactgactaatccagaagacatttccaacagtttgccagtggttcctcactacactggtactgaaagtgtaatttcttagagccaaaaaactggagaaacaaatatcctgccacctctaacaagtacatgagtacttgatttttatggtataaggcagagccttttcttcctcttcttgatagatgaggccatggtgtaaatggaagtttcagagaggacaaaataaaacggaattccatttttctctcactgtattaaagcttttgtgtgtgatcttttaaattctgataatgtattgtagccctcctgcgtagatctgagctcagaacagtttacacagctgttcttcctgtgtcttcacaacttttaactggatttcatttcaggattggaaatacgtggctgtcatgctgtggttgtgtacatcttactaactcagaatgcaagattcagcaggaagatgatttatttctgtcatctggataggttgttttgcatctgggttttgccaaactttgtcagacaacatgaaaaaaaaggagggaggatggttcttgtagcagtaggaattcagctataggaaagtcagctgtaagctaatgtggcatcttatttgctttacttacatttctccattaagaagtatccagggaaagattggtaagggccacatttttgtaaaactaggaagattttcattagactttttttttcttttatttttaaaaaagttttaattaaaaatttttttttaaatacagatggggtctcactgtgttgcccaggctggtcttgaactcctggactcaagcaatcctcccacctcagcctcccaaagtgctaggatgacaggcatgagccaccatgcccagccattttttttttttttgccttttttgttttgttttgttttttgtttttttaattaaaaaaaaaaaatagagacagggtctcagattttcattagatttggaaaccaagttagaatgttgactttggagccagacgaacagataccagttagctaggcatatgttcttccagggtctttggctagttaacattagtcatttgcttcgtgaaaattcaagaaccttttcagagccaagtacctggattaccttcccaatcaggtagaaattagacagggtccacagaagtagacacttaatgctgtggttcaataaatacttcccctaaatattaagtcttccctgagtctcagcaggtttgcattcacactgcttaagtaacttccagaacctggaagagtcgaaagagcacccctaggaaagagatgattccaaacagctttcattaacggcatgtaggcacaggtccctttcccaaaagtggattgttagtagtagttcattcaacctttgttaaggggtagctttccagaatgtgacattgtcctcagaaagatagacataggcttaaacataatggacatcctaaataggaattttcagattgtttttgaagtgaaaagtgttttaatgtctttaaatggaattgcataactaatggtatttaagtattttacatgttgctaataactttgaatatgattgttgcaattttatggaacctgggtctatgggactgctttttaagcagtttaaaaaaggttttcaaagtttaaaagccaatcttagcatgtataatccttatgggattcttaagttttatcctatcttgtttttgctcaagaacgctttatcagtgacgtttgttagaattttgttttttgttttttttttttaaattgtttttgggctagaaatgagtttctctagttttatttgttctccctgagttggagttatgcaatgaatggcatttttgtggtaaaatactaatcctaaaatctgttaactcactgttcatttaagtagggaatatctgtatacattaatgactaggtaaaacaggaaatacattttgaatatacagcctaaaggcaggcagttacagggtttttgatttctccgattttatagggtgcaagttcccagtggcaggatgccctgctgtgtgactgactacactgtgtcctgagcagtggtaatttcaatcacctctcatcagtttggccagccctacaaccaccattcctagccctgtgttgcttgacaggatacctgtgcttgaatggacataaggaaaagtccttactttctccccaatttacctctcaatcttagttcttccagaacacacttccctttcacaatgcaaataaactgaaagtgagatttgatacatggaattttgagaccaaccaactaaccttacacataatttgagggattcctggattcttctagtgatactgaaaagcacacttgactaaagcatagtgttttttgtttgttatggaaatacggtatacgttcatttaaaaataaatggacatacaaattgcatctccttaggagatacattttatatacatttcggtgcgtttttttccagtatggatttctatttgtttctctcttcctcttgttttttctgtgtcactcttgtatgtcctcatatctttcatacctcttgtgtagtctctagaagcagaacacctaagtcctgggtctggataatgaaaccctcagtctctggggcctctgaaaataaggaagcattggagctattgccatgttgagtaatgggcttcctagaactattgtcatctatcctgccagtgttttatgttgtagctgtttttctttgacaggtgagttccagctatgttgttagtcatgatcctgccattattttctgtgttctgtaggatgtctccaggctacttaaacatattttatgagtttgcaataaaattgttgaatcttgtatgatcaagtcactcctctgctcagaaatccacagtgacttcttagtaagcccctacattatatgcatacttgtttttttcttaactttactcccacttctacctaacagggacctcaacttaagtctcttcagttcttcaaggcctggccttgttcctgattcctcaaaaaatcttgactctaaggcctattttattgtctgtctctgaatccctataaagcttcaagtctgtatgacattcttaacgccaaattatatattgtcttgtactgttcctagctggtacatgtatattagtcttgtctccctcatgagaatgtaagctccttaagggcagggaccatgtcttaatttttgtatccaccacagtgcctagcacagtgcttggcacatgggtgctgaataaatacctttgtttattgatcagcaaagta

SEQ ID NO: 126448 - DNA, 617 bp, Homo sapiens
  Payload ID: 4793
  Gene Symbol: DERL2
  Gene Name: derlin 2
  ENST ID: ENST00000571971
  CDS Start-End: 18-617
aggcgacggtggggaagatggcgtaccagagcttgcggctggagtacctgcagatcccaccggtcagccgcgcctacaccactgcctgcgtcctcaccaccgccgccgtgcagttggaattgatcacaccttttcagttgtacttcaatcctgaattaatctttaaacactttcaaatatggagattaatcaccaacttcttattttttgggccagttggattcaattttttatttaacatgatttttctatatcgttactgtcgaatgctagaagaaggctctttccgaggtcggacagcagactttgtatttatgttcctttttggtggattcttaatgacccagtcggacaggatgagcaagtcaaaggaacttttaacccaggcctttacaataatgctcgtctatgtgtggagccgaaggaacccctatgtccgcatgaacttcttcggccttctcaacttccaggccccctttctgccctgggtgctcatgggattttccttgttgttggggaactcaatcattgtggaccttttgggtattgcagttggacacatatattttttcttggaagatgtatttcccaatcaacctggtggaataagaattctg

SEQ ID NO: 126449 - DNA, 876 bp, Homo sapiens
  Payload ID: 4793
  Gene Symbol: DERL2
  Gene Name: derlin 2
  ENST ID: ENST00000573637
  CDS Start-End: 5-316
gaagatggcgtaccagagcttgcggctggagtacctgcagatcccaccggtcagccgcgcctacaccactgcctgcgtcctcaccaccgccgccgtggtgagcagctgcagtgccaccttctcattatctgggctggatatgactgggtcttcaggaaactggggtttgggcctcggggaggcccagaggggctggtcccggggatgggtggaggcgtacagggattactctggggttcgagttggcgccaagaatgcttatccagtgacgcgagaagggagtgctgcttcatggggggtcagcagttggaattgatcacaccttttcagttgtacttcaatcctgaattaatctttaaacactttcaaatatggagattaatcaccaacttcttattttttgggccagttggattcaattttttatttaacatgatttttctatatcgttactgtcgaatgctagaagaaggctctttccgaggtcggacagcagactttgtatttatgttcctttttggtggattcttaatgaccgtatccttcaacaaacaacacgggaaaatgttgaagaacaccctggctcttcctaaagcttgtcatctgtctcccacagttctctagatcttagcttcagggcactatcatttattttacagcacattttctgtgacaagtttccaaacctagcagtcggacaggatgagcaagtcaaaggaacttttaacccaggcctttacaataatgctcgtctatgtgtggagccgaaggaacccctatgtccgcatgaacttcttcggccttctcaacttccaggccccctttctgccctgggtgctcatgggattttccttgttgttggggaactcaatcatt

SEQ ID NO: 126450 - DNA, 657 bp, Homo sapiens
  Payload ID: 4793
  Gene Symbol: DERL2
  Gene Name: derlin 2
  ENST ID: ENST00000570848
  CDS Start-End: 18-452
aggcgacggtggggaagatggcgtaccagagcttgcggctggagtacctgcagatcccaccggtcagccgcgcctacaccactgcctgcgtcctcaccaccgccgccgtgcagttggaattgatcacaccttttcagttgtacttcaatcctgaattaatctttaaacactttcaaatatggagattaatcaccaacttcttattttttgggccagttggattcaattttttatttaacatgatttttctatatcgttactgtcgaatgctagaagaaggctctttccgaggtcggacagcagactttgtatttatgttcctttttggtggattcttaatgacccagtcggacaggatgagcaagtcaaaggaacttttaacccaggtattgcagttggacacatatattttttcttggaagatgtatttcccaatcaacctggtggaataagaattctgaaaacaccatctattttgaaagctatttttgatacaccagatgaggatccaaattacaatccactacctgaggaacggccaggaggcttcgcctggggtgagggccagcggcttggaggttaaagcagcagtgccaataatgagacccagctgggaaggactcggtgatacccactgggatcttttatcctttgttg

SEQ ID NO: 126451 - DNA, 551 bp, Homo sapiens
  Payload ID: 4793
  Gene Symbol: DERL2
  Gene Name: derlin 2
  ENST ID: ENST00000575605
  CDS Start-End: 1-477
tggagattaatcaccaacttcttattttttgggccagttggattcaattttttatttaacatgatttttctatatcgttactgtcgaatgctagaagaaggctctttccgaggtcggacagcagactttgtatttatgttcctttttggtggattcttaatgacccagtcggacaggatgagcaagtcaaaggaacttttaacccaggccccctttctgccctgggtgctcatgggattttccttgttgttggggaactcaatcattgtggaccttttgggtattgcagttggacacatatattttttcttggaagatgtatttcccaatcaacctggtggaataagaattctgaaaacaccatctattttgaaagctatttttgatacaccagatgaggatccaaattacaatccactacctgaggaacggccaggaggcttcgcctggggtgagggccagcggcttggaggttaaagcagcagtgccaataatgagacccagctgggaaggactcggtgatacccactgggatcttttatcctttgttg

SEQ ID NO: 126452 - DNA, 501 bp, Homo sapiens
  Payload ID: 4793
  Gene Symbol: DERL2
  Gene Name: derlin 2
  ENST ID: ENST00000574952
  CDS Start-End: 116-427
agtcgcgggaaaactaaagtgggcggggggcctttgggcccgccccgccgccggggcctgctggcggaaggggaaatggggtgggtggggggtggggcaggcgacggtggggaagatggcgtaccagagcttgcggctggagtacctgcagatcccaccggtcagccgcgcctacaccactgcctgcgtcctcaccaccgccgccgtggtgagcagctgcagtgccaccttctcattatctgggctggatatgactgggtcttcaggaaactggggtttgggcctcggggaggcccagaggggctggtcccggggatgggtggaggcgtacagggattactctggggttcgagttggcgccaagaatgcttatccagtgacgcgagaagggagtgctgcttcatggggggtcagcagttggaattgatcacaccttttcagttgtacttcaatcctgaattaatctttaaacactttcaagtattgcagttggacacatat

SEQ ID NO: 126453 - DNA, 589 bp, Homo sapiens
  Payload ID: 4793
  Gene Symbol: DERL2
  Gene Name: derlin 2
  ENST ID: ENST00000572834
  CDS Start-End: 2-226
gatggcgtaccagagcttgcggctggagtacctgcagatcccaccggtcagccgcgcctacaccactgcctgcgtcctcaccaccgccgccgtgcagttggaattgatcacaccttttcagttgtacttcaatcctgaattaatctttaaacactttcaagtattgcagttggacacatatattttttcttggaagatgtatttcccaatcaacctggtggaataagaattctgaaaacaccatctattttgaaagctatttttgatacaccagatgaggatccaaattacaatccactacctgaggaacggccaggaggcttcgcctggggtgagggccagcggcttggaggttaaagcagcagtgccaataatgagacccagctgggaaggactcggtgatacccactgggatcttttatcctttgttgcaaaagtgtggacacttttgacagcttggcagattttaactccagaagcactttatgaaatggtacactgactaatccagaagacatttccaacagtttgccagtggttcctcactacactggtactgaaagtgtaatttcttagagccaaaaaactg

SEQ ID NO: 126454 - DNA, 570 bp, Homo sapiens
  Payload ID: 4793
  Gene Symbol: DERL2
  Gene Name: derlin 2
  ENST ID: ENST00000571476
  CDS Start-End: 1-239
gcttgcggctggagtacctgcagatcccaccggtcagccgcgcctacaccactgcctgcgtcctcaccaccgccgccgtgcagttggaattgatcacaccttttcagttgtacttcaatcctgaattaatctttaaacactttcaaatatggagattaatcaccaacttcttattttttgggccagttggattcaattttttatttaacatgatttttctctttttggtctgtttgtgagcttagttttcttgggccaggcctttacaataatgctcgtctatgtgtggagccgaaggaacccctatgtccgcatgaacttcttcggccttctcaacttccaggccccctttctgccctgggtgctcatgggattttccttgttgttggggaactcaatcattgtggaccttttgggtattgcagttggacacatatattttttcttggaagatgtatttcccaatcaacctggtggaataagaattctgaaaacaccatctattttgaaagctatttttgatacaccagatgaggatccaaattacaatccactacctgaggaacggcc

SEQ ID NO: 126455 - DNA, 624 bp, Homo sapiens
  Payload ID: 4793
  Gene Symbol: DERL2
  Gene Name: derlin 2
  ENST ID: ENST00000576551
  CDS Start-End: 1-247
ggcgtaccagagcttgcggctggagtacctgcagatcccaccggtcagccgcgcctacaccactgcctgcgtcctcaccaccgccgccgtgcagttggaattgatcacaccttttcagttgtacttcaatcctgaattaatctttaaacactttcaaatatggagattaatcaccaacttcttattttttgggccagttggattcaattttttatttaacatgatttttctcagtcggacaggatgagcaagtcaaaggaacttttaacccaggcctttacaataatgctcgtctatgtgtggagccgaaggaacccctatgtccgcatgaacttcttcggccttctcaacttccaggccccctttctgccctgggtgctcatgggattttccttgttgttggggaactcaatcattgtggaccttttgggtattgcagttggacacatatattttttcttggaagatgtatttcccaatcaacctggtggaataagaattctgaaaacaccatctatttttcctagaatcagctgtttcttcaaggagccctggttcctttaaagtggagaatggtatttagaagccaagatctgggtgctagatgtgctcattgctattgga

SEQ ID NO: 126456 - DNA, 860 bp, Homo sapiens
  Payload ID: 4794
  Gene Symbol: DERL3
  Gene Name: derlin 3
  Uniprot ID: Q96Q80
  ENST ID: ENST00000318109
  CDS Start-End: 18-725
gtgcttgagaaggttcaatggcgtggcagggactagcggccgagttcctgcaggtgccggcggtgacgcgggcttacaccgcagcctgtgtcctcaccaccgccgcggtgcagctggagctcctcagcccctttcaactctacttcaacccgcaccttgtgttccggaagttccaggtctggaggctcgtcaccaacttcctcttcttcgggcccctgggattcagcttcttcttcaacatgctcttcgtgttccgctactgccgcatgctggaagagggctccttccgcggccgcacggccgacttcgtcttcatgtttctcttcgggggcgtccttatgaccctgctgggactcctgggcagcctgttcttcctgggccaggccctcatggccatgctggtgtacgtgtggagccgccgcagccctcgggtgagggtcaacttcttcggcctgctcactttccaggcaccgttcctgccttgggcgctcatgggcttctcgctgctgctgggcaactccatcctcgtggacctgctggggattgcggtgggccatatctactacttcctggaggacgtcttccccaaccagcctggaggcaagaggctcctgcagacccctggcttcctaaagctgctcctggatgcccctgcagaagaccccaattacctgcccctccctgaggaacagccaggaccccatctgccacccccgcagcagtgacccccacccagggccaggcctaagaggcttctggcagcttccatcctacccatgacccctacttggggcagaaaaaacccatcctaaaggctgggcccatgcaagggcccacctgaataaacagaatgagctgca

SEQ ID NO: 126457 - DNA, 3113 bp, Homo sapiens
  Payload ID: 4794
  Gene Symbol: DERL3
  Gene Name: derlin 3
  ENST ID: ENST00000404056
  CDS Start-End: 20-556
gcgtgcttgagaaggttcaatggcgtggcagggactagcggccgagttcctgcaggtgccggcggtgacgcgggcttacaccgcagcctgtgtcctcaccaccgccgcggtgttccaggtgaggccgccccgcgccgcgcacctgtgggcccgacccacccaccccgcacctgaccgcccgtcccccgtaggtctggaggctcgtcaccaacttcctcttcttcgggcccctgggattcagcttcttcttcaacatgctcttcgtgttccgctactgccgcatgctggaagagggctccttccgcggccgcacggccgacttcgtcttcatgtttctcttcgggggcgtccttatgaccctgctgggactcctgggcagcctgttcttcctgggccaggctctgctggtctaggactctgggctgtggagggtgaccccacagtccgtggctgtctcacagggattgcggtgggccatatctactacttcctggaggacgtcttccccaaccagcctggaggcaagaggctcctgcagacccctggcttcctgtgagtgttgagagccctccctccctctccccaccctcagaaggatccccaccgatggggacctgtgctggcctgtgctcaacacgggcccctccccacagaaagctgctcctggatgcccctgcagaagaccccaattacctgcccctccctgaggaacagccaggaccccatctgccacccccgcagcagtgacccccacccagggccaggcctaagaggcttctggcagcttccatcctacccatgacccctacttggggcagaaaaaacccatcctaaaggctgggcccatgcaagggcccacctgaataaacagaatgagctgcagtctcttggcccacagcactggcttccccatctcacctggccacatccttctatgcctgccccgtcctcactcagtgtggcctctcagcccaactgcaggtggtaggataggggtgcccacagagggcaaagaaactgcccatggttgcctggcagagctttgagctcacaggttgccaggcagagcttttgagctcacaggtgacaggctcagggttctcatcctggccccaccagggccttgggcaagtcctgcccaccataggcctctgctacctgccagtcagcggggaagttcaccagatttcggctgctggggccaggacaggcgtctcctaggttgtgccaaaccagcctacagatgttcctgccagtggtgccttcaggctgatgccaatctagcctctcctgtctctcatcagccaccctgacaggtgggcgtatgcctcatttttcatctggtgatgccaaagccccatggattcaggtgcagaagagggccaggactaggtcttctgccctttctatgacctcagagcctaagttttcaccttagcagagttctgagactgggtgaggcagggacttctggaaggttctgttcctgccctttttagctgaggacgtgtgtgagccttatccgacccctgtggctcatttttctcttctgacctggcagctttccttgttgttctaagcctgtccatgttgtggtttatttctggatgctcagtggcacggggcctcctccaaagacaggttgtcattttcatggtaacaacactgttctctgttgagtctgccctccgtgttgtagccagaccttgtggagatggctttgcggcggtgtgagctggcggtcaggagtgagggcccagccttcccggcacctcccagccaggtggccctgcccgacctgtggggtgaggcagccaaggttccttccatccccccagttgtggagacacagggctgcctcaccctttcattgccgaggttcctacctcatggacagaacaaacacctcagcaatgaaacctgttcatgtctaagagcagctgggctgggaatcttcccctttgttcaaggccttccagtaaggcccagctgtccccttgctgtgcatggggctctggggagttccactctttgatggagggcagaggccctgagtgcaaactccctgggaagagtcccatgctaacatgtgctcaaaggagccctcctctcacatctcagcgaccaagaaccccaatccctaatcagagctctgcctctgccccacatggggccctaccccacttccagggagcacagcagcctctgaccctagccctgccctggcagcatgggacctgccaacagctgagggtggcagcagtctgtgctgggatctgtgcccggatctgtgcccattctcttcagtaaggctggagctgcgagccagtttgctgccctcccagatcctgtgtccattctgaagaatggggacacctccctattacagatgagaacagaggggacatgaactccttggaggcagggctgggaagggaccctgggctgtgtctcctccctgtaccgtgtcaactccaagagctggcaccaggccgggagggctattcccatattcctcacagctggcttgtaaggcaggagctggcccaggccacagcacctgctggggtgggaaagggccccagctgacctggctatgggtgccactggagctagaacagccctcctgcacccaggctggcgacagcccagcagtgcccacacaggactgggccctccgcaggggacttcagagcagcaaggccccagctggcagtagcctgaccatctggacacagcagagccagggcggcccagggacggcaggagagctcgcggcaccttcctgaggccaagcaaggggagcagggttagggctgttcctgaaaggcagagagcctcttgccctgagcctcacagctactcttctcagctctctgggtctggaaggagaacaggctgaggggagctgagaggagctgaggtgctacccggagccccattcacccccacctgcccacttgggaatctgaggcagaggagggtgaggcctgtgtgccaaccttgttcacataccaccttcgtccccccaggccccggccccactcctggctctcattatttttatgttaaaactttgaagaaattgaacatgacctgttgaagaaattgaa

SEQ ID NO: 126458 - DNA, 1063 bp, Homo sapiens
  Payload ID: 4794
  Gene Symbol: DERL3
  Gene Name: derlin 3
  Uniprot ID: Q96Q80
  ENST ID: ENST00000406855
  CDS Start-End: 20-739
gcgtgcttgagaaggttcaatggcgtggcagggactagcggccgagttcctgcaggtgccggcggtgacgcgggcttacaccgcagcctgtgtcctcaccaccgccgcggtgcagctggagctcctcagcccctttcaactctacttcaacccgcaccttgtgttccggaagttccaggtctggaggctcgtcaccaacttcctcttcttcgggcccctgggattcagcttcttcttcaacatgctcttcgtgttccgctactgccgcatgctggaagagggctccttccgcggccgcacggccgacttcgtcttcatgtttctcttcgggggcgtccttatgaccctgctgggactcctgggcagcctgttcttcctgggccaggccctcatggccatgctggtgtacgtgtggagccgccgcagccctcgggtgagggtcaacttcttcggcctgctcactttccaggcaccgttcctgccttgggcgctcatgggcttctcgctgctgctgggcaactccatcctcgtggacctgctggggattgcggtgggccatatctactacttcctggaggacgtcttccccaaccagcctggaggcaagaggctcctgcagacccctggcttcctgggacttcagagcagcaaggccccagctggcagtagcctgaccatctggacacagcagagccagggcggcccagggacggcaggagagctcgcggcaccttcctgaggccaagcaaggggagcagggttagggctgttcctgaaaggcagagagcctcttgccctgagcctcacagctactcttctcagctctctgggtctggaaggagaacaggctgaggggagctgagaggagctgaggtgctacccggagccccattcacccccacctgcccacttgggaatctgaggcagaggagggtgaggcctgtgtgccaaccttgttcacataccaccttcgtccccccaggccccggccccactcctggctctcattatttttatgttaaaactttgaagaaattgaacatgacctgttgaagaaattgaa

SEQ ID NO: 126459 - DNA, 969 bp, Homo sapiens
  Payload ID: 4794
  Gene Symbol: DERL3
  Gene Name: derlin 3
  Uniprot ID: Q96Q80
  ENST ID: ENST00000476077
  CDS Start-End: 26-643
ggccacgcgtgcttgagaaggttcaatggcgtggcagggactagcggccgagttcctgcaggtgccggcggtgacgcgggcttacaccgcagcctgtgtcctcaccaccgccgcggtgcagctggagctcctcagcccctttcaactctacttcaacccgcaccttgtgttccggaagttccaggtctggaggctcgtcaccaacttcctcttcttcgggcccctgggattcagcttcttcttcaacatgctcttcgtgttccgctactgccgcatgctggaagagggctccttccgcggccgcacggccgacttcgtcttcatgtttctcttcgggggcgtccttatgaccctgctgggactcctgggcagcctgttcttcctgggccaggccctcatggccatgctggtgtacgtgtggagccgccgcagccctcgggtgagggtcaacttcttcggcctgctcactttccaggcaccgttcctgccttgggcgctcatgggcttctcgctgctgctgggcaactccatcctcgtggacctgctggggattgcggtgggccatatctactacttcctggaggacgtcttccccaaccagcctggaggcaagaggctcctgcagacccctggcttcctgtgagtgttgagagccctccctccctctccccaccctcagaaggatccccaccgatggggacctgtgctggcctgtgctcaacacgggcccctccccacagaaagctgctcctggatgcccctgcagaagaccccaattacctgcccctccctgaggaacagccaggaccccatctgccacccccgcagcagtgacccccacccagggccaggcctaagaggcttctggcagcttccatcctacccatgacccctacttggggcagaaaaaacccatcctaaaggctgggcccatgcaagggcccacctgaataaacagaatgagctgca

SEQ ID NO: 126460 - DNA, 3113 bp, Homo sapiens; identical to SEQ ID NO: 126457
  Payload ID: 4794
  Gene Symbol: DERL3
  Gene Name: derlin 3
  ENST ID: ENST00000614504
  CDS Start-End: 20-556

SEQ ID NO: 126461 - DNA, 1063 bp, Homo sapiens; identical to SEQ ID NO: 126458
  Payload ID: 4794
  Gene Symbol: DERL3
  Gene Name: derlin 3
  Uniprot ID: Q96Q80
  ENST ID: ENST00000620697
  CDS Start-End: 20-739

SEQ ID NO: 126462 - DNA, 969 bp, Homo sapiens; identical to SEQ ID NO: 126459
  Payload ID: 4794
  Gene Symbol: DERL3
  Gene Name: derlin 3
  Uniprot ID: Q96Q80
  ENST ID: ENST00000628868
  CDS Start-End: 26-643

SEQ ID NO: 126463 - DNA, 860 bp, Homo sapiens; identical to SEQ ID NO: 126456
  Payload ID: 4794
  Gene Symbol: DERL3
  Gene Name: derlin 3
  Uniprot ID: Q96Q80
  ENST ID: ENST00000631305
  CDS Start-End: 18-725

SEQ ID NO: 126464 - DNA, 7237 bp, Homo sapiens
  Payload ID: 4795
  Gene Symbol: DSE
  Gene Name: dermatan sulfate epimerase
  Uniprot ID: Q9UL01
  ENST ID: ENST00000331677
  CDS Start-End: 445-3321
ctgcttctctataggtgacccccgccccaaagtcccccctcccactaacttctctttgagaagagagtaaaaccgaattcgagagaaaagaggcagtaactattcgggaggaggcagactggagtgggcaccagtcccgcggagcctcagcgcccgccgcgtccctccctccgcccctttcgcccacacctacccgcccccgccggcccggctctcagtagcgtcgcccgaggctgcagcagcgcatcccggggcatggcgcggcgggggcgcggagggctcggttcggagggggccgggagcccgggcgccctggagtgaggaggaccgggagctggctctggaggctgcggaggcgacgccggagagaacgaagcctcggctgggagcggatctttcgaagatggtttggctgccttggagatttggagatctgatgccacgatgaggactcacacacggggggctcccagtgtgtttttcatatatttgctttgctttgtgtcagcctacatcaccgacgagaacccagaagttatgattcccttcaccaatgccaactacgacagccatcccatgctgtacttctccagggcagaagtggcggagctgcagctcagggctgccagctcgcacgagcacattgcagcccgcctcacggaggctgtgcacacgatgctgtccagccccttggaatacctccctccctgggatcccaaggactacagtgcccgctggaatgaaatttttggaaacaacttgggtgccttggcaatgttctgtgtgctgtatcctgagaacattgaagcccgagacatggccaaagactacatggagaggatggcagcgcagcctagttggttggtgaaagatgctccttgggatgaggtcccgcttgctcactccctggttggttttgccactgcttatgacttcttgtacaactacctgagcaagacacaacaggagaagtttcttgaagtgattgccaatgcctcagggtatatgtatgaaacttcatacaggagaggatggggatttcaatacctgcacaatcatcagcccaccaactgtatggctttgctcacgggaagcctagtcctgatgaatcaaggatatcttcaagaagcctacttatggaccaaacaagttctgaccatcatggagaaatctctggtcttgctcagggaggtgacggatggctccctctatgaaggagttgcgtatggcagctacaccactagatcactcttccaatacatgtttctcgtccagaggcacttcaacatcaaccactttggccatccgtggcttaaacaacactttgcatttatgtatagaaccatcctgccagggtttcaaaggactgtggctattgcggactcaaattacaactggttttatggtccagaaagccaattagtgttccttgataaatttgtcatgcgtaatggcagtggtaactggctagctgaccaaatcagaaggaaccgtgtggtggaaggtccaggaacaccatccaaagggcagcgctggtgcactctgcacacagaatttctctggtatgatggcagcttgaaatcggttcctcctccagactttggcacccctacactgcattattttgaagactggggtgtcgtgacttatggaagtgcactacctgcagaaatcaatagatctttcctttccttcaagtctggaaaactggggggacgtgcaatatatgacattgtccacagaaacaaatacaaagattggatcaaaggatggagaaattttaatgcagggcatgaacatcctgatcaaaactcatttacttttgctcccaatggtgtgcctttcattactgaggctctgtacgggccaaagtacaccttcttcaacaatgttttgatgttttccccagctgtgtcaaagagctgcttttctccctgggtgggtcaggtcacagaagactgctcatcaaaatggtctaaatacaagcatgacctggcagctagttgtcaggggagggtggttgcagcagaggagaaaaatggggtggttttcatccgaggagaaggtgtgggagcttataacccccagctcaacctgaagaatgttcagaggaatctcatcctcctacatccacagctgcttctccttgtagaccaaatacacctgggagaggagagtcccttggagacagcagcgagcttcttccataatgtggatgttccttttgaggagactgtggtagatggtgtccatggggctttcatcaggcagagagatggtctctataaaatgtactggatggacgatactggctacagcgagaaagcaacctttgcctcagtgacatatcctcggggctatccctacaatgggacaaactatgtgaatgtcaccatgcacctccgaagtcccatcaccagggcagcttacctcttcatagggccatctatagatgttcagagcttcactgtccacggagactctcagcaactggatgtgttcatagccaccagcaaacatgcctacgccacatacctgtggacaggtgaggccacaggacagtctgcctttgcacaggtcattgctgatcgtcacaaaattctgtttgaccggaattcagccatcaagagcagcattgtccctgaggtgaaggactatgctgctattgtggaacagaacttgcagcattttaaaccagtgtttcagctgctggagaagcagatactgtcccgagtccggaacacagctagctttaggaagactgctgaacgcctgctgagattttcagataagagacagactgaggaggccattgacaggatttttgccatatcacagcaacagcagcagcaaagcaagtcaaagaaaaaccgaagggcaggcaaacgctataaatttgtggatgctgtccctgatatttttgcacagattgaagtcaatgagaaaaagattagacagaaagctcagattttggcacagaaagaactacccatagatgaagatgaagaaatgaaagaccttttagattttgcagatgtaacatacgagaaacataaaaatgggggcttgattaaaggccggtttggacaggcacggatggtgacaactacacacagcagggccccatcactgtctgcttcctataccaggttgttcctgattctgaacattgctattttctttgtcatgttggcaatgcaactgacttatttccagagggcccagagcctacatggccaaagatgtctttatgcagttcttctcatagatagctgtattttattatggttgtactcttcttgttcccaatcacagtgttagcactgaagctataaattacctggtcattttgtgatcacaagagtctatgcaaaaaaaaaaatttctttaccccagattatcagatttttttccctcagattcattttaacaaattaagggaagatattttgacacaagaaagcaggaacgtggagaaattggagcaggaaaagaaattatcaaagcaatagaaatagcttggtggtcctatggtgtttttggaagtatttggcattgctaattgagcagtccatatagtactacttttagaagaaacaaaaagtctattttttaaagtaatgttttttcttatgagaaaaaggtttagatagaattgggttttattaatattaatttaatgctattagcaatttccatatactatattgtggaaaagactgaagaatacaattctgagaaatataaaaaaattttaatggtatactcatgttgaaagataaatgttgctaagtcctggtatgatggtgtgagcttccttggggaagtacttcttgagttatgtaactaacaggatgttttactacagatctggatggctattcagataacatggcaaaaaatgatagcagaagatcattaaaaacttaaaatatattttattagaaaacatttatctatgaatgaatatttccttgatgctggtctctgcacacatatgcttggttacttgcatgcattcattggttgttcaataagtgagatgattacagataatactgtattttccttatatggaaaaccgttatagacccaataacaactaaacctttcaaaagaaaatattttctattatgaatgttgattttcataccaaagaagatggagagtctaaaatttggatatgattcttatgtttttttaatagaaaaccttcttcaagtttattttcctaaataaacatcataattgtgaattttctctagtattcttcttctttgttccattatattcaaaatgcattaacattttccaaaatttttgaagagagatctttatttggacgtgtattcattaaatatataaagtagtgtttgaatcaaaagaagtattttctctgcttattaaccttaattgttgtttaagcatattttaaatatttaaaacaatagccaattctgatatttaagtagcacccaacttttaaaagcataaaattttcaatcaactcctcagaaggtaacagcagcatagaatactagaaaaataatccatagtttctacttgagcataagaaaatgatatacttaaaaggaacttaataaattatcatacattcagcatatttgagtcatatatttctcctttgaaacaaaatatgttcagctcaaattttacagtaaggacacactcactgatttataggtgtaaagtaacaacagtaacctttcctcttacttgctcttttagttcacagcaataccagtatgtaaccaaaagacaagctagagaaacttttaagtacctttctgcagttctaatttgaaccttcttgcataaagaaaacacaagtttgacttttaactgtgcttcacttattatgcttggaatctagaaaacgacttctgaggaagtaatttttttcccctctcatggaaagtctctagggaggatgtcattacacactgtttaaaagaataatgttttcaaaagaataatgcttccgtttgtcctgcatggatgctcttactaggatttaaacttgctttatgtgacagattctccatttacttaacctcactcaacattcctctcttttactctttctcactcaaaaggatgaactgtctgaaatgatcaaaaggaaattttgaaagaaaaaaaaaaggaaaattattctttgaggttaccaagcaaacctgatctcagatccaaactgagacatactttctaacagagatgaaaagtgcaagtgagtgccaaactcgcttttcttttgttttcattaggttaaggcttgacaatacgttagtcgccacagcatgatccagtgtaacatattagttcattttaaagtagtctttttaaaatacgcatctttaaaacaaaatgaattaaaattatgtgttttttttttttcttctaatgaacctggtatttatttccttaaaaagaaacttcctcaggcagtgacttaagtggttaagtgaaaaaaaaaaatgctgaaacaaatcacccctcttcataatgaaacatgttttttttaatcagggatagtgcatatttgagtaaaactagggaactttttgtaacttgaaaacaaagcaatgttaaatctcccttgaaactgagtaatcagttatggaatctgtttcaatgctgctcactatgacaggaatgtttcaagttcatttgataatatgtgagctgttgttcaggggattggcaggactcttggtcctagccttaaagaaaatttgagaatcactagcatacagagcttgtcagtgcagtaaaagtggtatattcctgggaagctgaggtgggagtattgcctgagcttaggagttctgtgctgcagtgagctatgactgtgccactgcactccagccttggagacagagtgagaccgtgtttctctcttttttttttttttaagtatattcccttgtttataactgattagcttatttcagttgatggtagatgagacctatggtggtggatgagacccagaattttcagagagaacattcttttgacaacattgttttaatcgtcaaagtcaggtggaagaccgtgttctggaactattttaattgttaaaatgtatcacctaagataatgaattcttccacaaatattttagtcatagtttttaagtaccacgtattctaaggttatcagaaaatatgtcttaacagaatgttttgcatactgaataatttgtttttgaaaaggaaaatttacatttgacttactcagtttttaaaaaattatttttatttctagagacacggtcctttctgcatcacccaggctgaagtgtagtggcgtgatcgtagctcactgcagccgcaaacttcccatcttaagcgattcttctgcctcagccttccaaagtactgggattagaggcataggtcatcatgcccggccaagttaaaaaaatttttgatagttcacaaaccactcacaaaagaatctgaaatttctccaagtgttaagagaaagcaagctatgaaatgctatatttgtaggcttaaaagtaaattagtgtgttttcttaaaaatctaaaccaagattaaaatgaatatagtcataggtatgaggggcatgtaatttatcttccgactggagatacctttgagagttaaaggaggagcaattaattgttattccaggacaacagatataaatcgagattatactaggtgaactgggacatatggtcatctttgtcatagcttaattcaggaaaaaaggagttagggaagtctgaaggtctaactcaaagtttgatgctttttaagcaagtttagggaacttgagatgacctgattgagacccctaaatctacagatgaggaaagcaagcctcaagcaaggggggcctgatcctttccctgttcgctgtgtattccctgtctgtggcaaagcccattgccttgattctcttctctttactttcatgttgagaagtagtttctttctgcagtttatttaatttactggcaaaatgacgtatttttttttcagcaatgtttcagctagatatttgctttatgcatgtaatgtcaatgaagtactcataagttttcaagaaatgactgatataaatcatgtgttccactacatagtctaaatatttagtatttggtcatctattttaatatgttcaaattctgttaaacaagacatagtcactatgtgaagaataaaaatagacaaagttgca

SEQ ID NO: 126465 - DNA, 4037 bp, Homo sapiens
  Payload ID: 4795
  Gene Symbol: DSE
  Gene Name: dermatan sulfate epimerase
  Uniprot ID: Q9UL01
  ENST ID: ENST00000359564
  CDS Start-End: 229-3105
agtagcgtcgcccgaggctgcagcagcgcatcccggggcatggcgcggcgggggcgcggagggctcggttcggagggggccgggagcccgggcgccctggagtgaggaggaccgggagctggctctggaggctgcggaggcgacgccggagagaacgaagcctcggctgggagcggatctttcgaagatggtttggctgccttggagatttggagatctgatgccacgatgaggactcacacacggggggctcccagtgtgtttttcatatatttgctttgctttgtgtcagcctacatcaccgacgagaacccagaagttatgattcccttcaccaatgccaactacgacagccatcccatgctgtacttctccagggcagaagtggcggagctgcagctcagggctgccagctcgcacgagcacattgcagcccgcctcacggaggctgtgcacacgatgctgtccagccccttggaatacctccctccctgggatcccaaggactacagtgcccgctggaatgaaatttttggaaacaacttgggtgccttggcaatgttctgtgtgctgtatcctgagaacattgaagcccgagacatggccaaagactacatggagaggatggcagcgcagcctagttggttggtgaaagatgctccttgggatgaggtcccgcttgctcactccctggttggttttgccactgcttatgacttcttgtacaactacctgagcaagacacaacaggagaagtttcttgaagtgattgccaatgcctcagggtatatgtatgaaacttcatacaggagaggatggggatttcaatacctgcacaatcatcagcccaccaactgtatggctttgctcacgggaagcctagtcctgatgaatcaaggatatcttcaagaagcctacttatggaccaaacaagttctgaccatcatggagaaatctctggtcttgctcagggaggtgacggatggctccctctatgaaggagttgcgtatggcagctacaccactagatcactcttccaatacatgtttctcgtccagaggcacttcaacatcaaccactttggccatccgtggcttaaacaacactttgcatttatgtatagaaccatcctgccagggtttcaaaggactgtggctattgcggactcaaattacaactggttttatggtccagaaagccaattagtgttccttgataaatttgtcatgcgtaatggcagtggtaactggctagctgaccaaatcagaaggaaccgtgtggtggaaggtccaggaacaccatccaaagggcagcgctggtgcactctgcacacagaatttctctggtatgatggcagcttgaaatcggttcctcctccagactttggcacccctacactgcattattttgaagactggggtgtcgtgacttatggaagtgcactacctgcagaaatcaatagatctttcctttccttcaagtctggaaaactggggggacgtgcaatatatgacattgtccacagaaacaaatacaaagattggatcaaaggatggagaaattttaatgcagggcatgaacatcctgatcaaaactcatttacttttgctcccaatggtgtgcctttcattactgaggctctgtacgggccaaagtacaccttcttcaacaatgttttgatgttttccccagctgtgtcaaagagctgcttttctccctgggtgggtcaggtcacagaagactgctcatcaaaatggtctaaatacaagcatgacctggcagctagttgtcaggggagggtggttgcagcagaggagaaaaatggggtggttttcatccgaggagaaggtgtgggagcttataacccccagctcaacctgaagaatgttcagaggaatctcatcctcctacatccacagctgcttctccttgtagaccaaatacacctgggagaggagagtcccttggagacagcagcgagcttcttccataatgtggatgttccttttgaggagactgtggtagatggtgtccatggggctttcatcaggcagagagatggtctctataaaatgtactggatggacgatactggctacagcgagaaagcaacctttgcctcagtgacatatcctcggggctatccctacaatgggacaaactatgtgaatgtcaccatgcacctccgaagtcccatcaccagggcagcttacctcttcatagggccatctatagatgttcagagcttcactgtccacggagactctcagcaactggatgtgttcatagccaccagcaaacatgcctacgccacatacctgtggacaggtgaggccacaggacagtctgcctttgcacaggtcattgctgatcgtcacaaaattctgtttgaccggaattcagccatcaagagcagcattgtccctgaggtgaaggactatgctgctattgtggaacagaacttgcagcattttaaaccagtgtttcagctgctggagaagcagatactgtcccgagtccggaacacagctagctttaggaagactgctgaacgcctgctgagattttcagataagagacagactgaggaggccattgacaggatttttgccatatcacagcaacagcagcagcaaagcaagtcaaagaaaaaccgaagggcaggcaaacgctataaatttgtggatgctgtccctgatatttttgcacagattgaagtcaatgagaaaaagattagacagaaagctcagattttggcacagaaagaactacccatagatgaagatgaagaaatgaaagaccttttagattttgcagatgtaacatacgagaaacataaaaatgggggcttgattaaaggccggtttggacaggcacggatggtgacaactacacacagcagggccccatcactgtctgcttcctataccaggttgttcctgattctgaacattgctattttctttgtcatgttggcaatgcaactgacttatttccagagggcccagagcctacatggccaaagatgtctttatgcagttcttctcatagatagctgtattttattatggttgtactcttcttgttcccaatcacagtgttagcactgaagctataaattacctggtcattttgtgatcacaagagtctatgcaaaaaaaaaaatttctttaccccagattatcagatttttttccctcagattcattttaacaaattaagggaagatattttgacacaagaaagcaggaacgtggagaaattggagcaggaaaagaaattatcaaagcaatagaaatagcttggtggtcctatggtgtttttggaagtatttggcattgctaattgagcagtccatatagtactacttttagaagaaacaaaaagtctattttttaaagtaatgttttttcttatgagaaaaaggtttagatagaattgggttttattaatattaatttaatgctattagcaatttccatatactatattgtggaaaagactgaagaatacaattctgagaaatataaaaaaattttaatggtatactcatgttgaaagataaatgttgctaagtcctggtatgatggtgtgagcttccttggggaagtacttcttgagttatgtaactaacaggatgttttactacagatctggatggctattcagataacatggcaaaaaatgatagcagaagatcattaaaaacttaaaatatattttattagaaaacatttatctatgaatgaatatttccttgatgctggtctctgcacacatatgcttggttacttgcatgcattcattggttgttcaataagtgagatgattacagataatactgtattttccttatatggaaaaccgttatagacccaataacaactaaacctttcaaaagaaaatattttctattatgaatgttgattttcataccaaagaagatggagagtctaaaatttggatatgattcttatgtttttttaatagaaaaccttcttcaagtttattttcctaaataaacatcataattgtg

SEQ ID NO: 126466 - DNA, 1130 bp, Homo sapiens
  Payload ID: 4795
  Gene Symbol: DSE
  Gene Name: dermatan sulfate epimerase
  ENST ID: ENST00000430252
  CDS Start-End: 699-1130
ctgcgcggttgactacgcttatcaatccatcgtattcctttgtcttcttgtcacaaaaagaatttcgtcagtctggaaggggagttttacttacgtaaatggatgtagaccagactcaagcatggctgccctgaagggcagacaggtttattgggcaacagctgggaaaatcagcggttggacttggccacatgctccaagaaggccacacgtccttcttcttaatggcataggagttggaggagcccttggcagcattgatgagctcctctgccaggcactcagcaatggtcttaatgttccggaaggcagcctcacgagcacctgtgcacagcagccagatggcctgattcacacggcgaagtggggacacgtccacagcctgtcgtctcacagtcccggcgcacccaatgcgtgtggagtcctcccggggaccactgttgatgatggcgttcaccaggacctgcagagggttctcgcctgtgagcaggtgtatgacctcgaaggcatgcttgacgatgcacacagtcatgagcttcttgccgttgttgcagccgtgcatcatcatggagttagtaaggcgctccacaatgggacactgagctttgtggaagcatttggcggcataccaccctgcactgtgaggatctttcgaagatggtttggctgccttggagatttggagatctgatgccacgatgaggactcacacacggggggctcccagtgtgtttttcatatatttgctttgctttgtgtcagcctacatcaccgacgagaacccagaagttatgattcccttcaccaatgccaactacgacagccatcccatgctgtacttctccagggcagaagtggcggagctgcagctcagggctgccagctcgcacgagcacattgcagcccgcctcacggaggctgtgcacacgatgctgtccagccccttggaatacctccctccctgggatcccaaggactacagtgcccgctggaatgaaatttttggaaacaacttgggtgccttggcaatgttctgtgtgctgtatcctgagaacattgaagcccgagacatggccaaagactacatggagaggatggcagcgcagcctagttggttggtgaaagatgct

SEQ ID NO: 126467 - DNA, 10586 bp, Homo sapiens
  Payload ID: 4795
  Gene Symbol: DSE
  Gene Name: dermatan sulfate epimerase
  Uniprot ID: Q9UL01
  ENST ID: ENST00000452085
  CDS Start-End: 195-3071
gcggacgacccaccttgagatgcatctagcgactgctcccagcatgtaggagcagttgtaaaatcacagccgtaacagtgcctgctctccagtgtctgaaaacaaatgtttttctggtcttcacttttttgaggcaggaaggatctttcgaagatggtttggctgccttggagatttggagatctgatgccacgatgaggactcacacacggggggctcccagtgtgtttttcatatatttgctttgctttgtgtcagcctacatcaccgacgagaacccagaagttatgattcccttcaccaatgccaactacgacagccatcccatgctgtacttctccagggcagaagtggcggagctgcagctcagggctgccagctcgcacgagcacattgcagcccgcctcacggaggctgtgcacacgatgctgtccagccccttggaatacctccctccctgggatcccaaggactacagtgcccgctggaatgaaatttttggaaacaacttgggtgccttggcaatgttctgtgtgctgtatcctgagaacattgaagcccgagacatggccaaagactacatggagaggatggcagcgcagcctagttggttggtgaaagatgctccttgggatgaggtcccgcttgctcactccctggttggttttgccactgcttatgacttcttgtacaactacctgagcaagacacaacaggagaagtttcttgaagtgattgccaatgcctcagggtatatgtatgaaacttcatacaggagaggatggggatttcaatacctgcacaatcatcagcccaccaactgtatggctttgctcacgggaagcctagtcctgatgaatcaaggatatcttcaagaagcctacttatggaccaaacaagttctgaccatcatggagaaatctctggtcttgctcagggaggtgacggatggctccctctatgaaggagttgcgtatggcagctacaccactagatcactcttccaatacatgtttctcgtccagaggcacttcaacatcaaccactttggccatccgtggcttaaacaacactttgcatttatgtatagaaccatcctgccagggtttcaaaggactgtggctattgcggactcaaattacaactggttttatggtccagaaagccaattagtgttccttgataaatttgtcatgcgtaatggcagtggtaactggctagctgaccaaatcagaaggaaccgtgtggtggaaggtccaggaacaccatccaaagggcagcgctggtgcactctgcacacagaatttctctggtatgatggcagcttgaaatcggttcctcctccagactttggcacccctacactgcattattttgaagactggggtgtcgtgacttatggaagtgcactacctgcagaaatcaatagatctttcctttccttcaagtctggaaaactggggggacgtgcaatatatgacattgtccacagaaacaaatacaaagattggatcaaaggatggagaaattttaatgcagggcatgaacatcctgatcaaaactcatttacttttgctcccaatggtgtgcctttcattactgaggctctgtacgggccaaagtacaccttcttcaacaatgttttgatgttttccccagctgtgtcaaagagctgcttttctccctgggtgggtcaggtcacagaagactgctcatcaaaatggtctaaatacaagcatgacctggcagctagttgtcaggggagggtggttgcagcagaggagaaaaatggggtggttttcatccgaggagaaggtgtgggagcttataacccccagctcaacctgaagaatgttcagaggaatctcatcctcctacatccacagctgcttctccttgtagaccaaatacacctgggagaggagagtcccttggagacagcagcgagcttcttccataatgtggatgttccttttgaggagactgtggtagatggtgtccatggggctttcatcaggcagagagatggtctctataaaatgtactggatggacgatactggctacagcgagaaagcaacctttgcctcagtgacatatcctcggggctatccctacaatgggacaaactatgtgaatgtcaccatgcacctccgaagtcccatcaccagggcagcttacctcttcatagggccatctatagatgttcagagcttcactgtccacggagactctcagcaactggatgtgttcatagccaccagcaaacatgcctacgccacatacctgtggacaggtgaggccacaggacagtctgcctttgcacaggtcattgctgatcgtcacaaaattctgtttgaccggaattcagccatcaagagcagcattgtccctgaggtgaaggactatgctgctattgtggaacagaacttgcagcattttaaaccagtgtttcagctgctggagaagcagatactgtcccgagtccggaacacagctagctttaggaagactgctgaacgcctgctgagattttcagataagagacagactgaggaggccattgacaggatttttgccatatcacagcaacagcagcagcaaagcaagtcaaagaaaaaccgaagggcaggcaaacgctataaatttgtggatgctgtccctgatatttttgcacagattgaagtcaatgagaaaaagattagacagaaagctcagattttggcacagaaagaactacccatagatgaagatgaagaaatgaaagaccttttagattttgcagatgtaacatacgagaaacataaaaatgggggcttgattaaaggccggtttggacaggcacggatggtgacaactacacacagcagggccccatcactgtctgcttcctataccaggttgttcctgattctgaacattgctattttctttgtcatgttggcaatgcaactgacttatttccagagggcccagagcctacatggccaaagatgtctttatgcagttcttctcatagatagctgtattttattatggttgtactcttcttgttcccaatcacagtgttagcactgaagctataaattacctggtcattttgtgatcacaagagtctatgcaaaaaaaaaaatttctttaccccagattatcagatttttttccctcagattcattttaacaaattaagggaagatattttgacacaagaaagcaggaacgtggagaaattggagcaggaaaagaaattatcaaagcaatagaaatagcttggtggtcctatggtgtttttggaagtatttggcattgctaattgagcagtccatatagtactacttttagaagaaacaaaaagtctattttttaaagtaatgttttttcttatgagaaaaaggtttagatagaattgggttttattaatattaatttaatgctattagcaatttccatatactatattgtggaaaagactgaagaatacaattctgagaaatataaaaaaattttaatggtatactcatgttgaaagataaatgttgctaagtcctggtatgatggtgtgagcttccttggggaagtacttcttgagttatgtaactaacaggatgttttactacagatctggatggctattcagataacatggcaaaaaatgatagcagaagatcattaaaaacttaaaatatattttattagaaaacatttatctatgaatgaatatttccttgatgctggtctctgcacacatatgcttggttacttgcatgcattcattggttgttcaataagtgagatgattacagataatactgtattttccttatatggaaaaccgttatagacccaataacaactaaacctttcaaaagaaaatattttctattatgaatgttgattttcataccaaagaagatggagagtctaaaatttggatatgattcttatgtttttttaatagaaaaccttcttcaagtttattttcctaaataaacatcataattgtgaattttctctagtattcttcttctttgttccattatattcaaaatgcattaacattttccaaaatttttgaagagagatctttatttggacgtgtattcattaaatatataaagtagtgtttgaatcaaaagaagtattttctctgcttattaaccttaattgttgtttaagcatattttaaatatttaaaacaatagccaattctgatatttaagtagcacccaacttttaaaagcataaaattttcaatcaactcctcagaaggtaacagcagcatagaatactagaaaaataatccatagtttctacttgagcataagaaaatgatatacttaaaaggaacttaataaattatcatacattcagcatatttgagtcatatatttctcctttgaaacaaaatatgttcagctcaaattttacagtaaggacacactcactgatttataggtgtaaagtaacaacagtaacctttcctcttacttgctcttttagttcacagcaataccagtatgtaaccaaaagacaagctagagaaacttttaagtacctttctgcagttctaatttgaaccttcttgcataaagaaaacacaagtttgacttttaactgtgcttcacttattatgcttggaatctagaaaacgacttctgaggaagtaatttttttcccctctcatggaaagtctctagggaggatgtcattacacactgtttaaaagaataatgttttcaaaagaataatgcttccgtttgtcctgcatggatgctcttactaggatttaaacttgctttatgtgacagattctccatttacttaacctcactcaacattcctctcttttactctttctcactcaaaaggatgaactgtctgaaatgatcaaaaggaaattttgaaagaaaaaaaaaaggaaaattattctttgaggttaccaagcaaacctgatctcagatccaaactgagacatactttctaacagagatgaaaagtgcaagtgagtgccaaactcgcttttcttttgttttcattaggttaaggcttgacaatacgttagtcgccacagcatgatccagtgtaacatattagttcattttaaagtagtctttttaaaatacgcatctttaaaacaaaatgaattaaaattatgtgttttttttttttcttctaatgaacctggtatttatttccttaaaaagaaacttcctcaggcagtgacttaagtggttaagtgaaaaaaaaaaatgctgaaacaaatcacccctcttcataatgaaacatgttttttttaatcagggatagtgcatatttgagtaaaactagggaactttttgtaacttgaaaacaaagcaatgttaaatctcccttgaaactgagtaatcagttatggaatctgtttcaatgctgctcactatgacaggaatgtttcaagttcatttgataatatgtgagctgttgttcaggggattggcaggactcttggtcctagccttaaagaaaatttgagaatcactagcatacagagcttgtcagtgcagtaaaagtggtatattcctgggaagctgaggtgggagtattgcctgagcttaggagttctgtgctgcagtgagctatgactgtgccactgcactccagccttggagacagagtgagaccgtgtttctctcttttttttttttttaagtatattcccttgtttataactgattagcttatttcagttgatggtagatgagacctatggtggtggatgagacccagaattttcagagagaacattcttttgacaacattgttttaatcgtcaaagtcaggtggaagaccgtgttctggaactattttaattgttaaaatgtatcacctaagataatgaattcttccacaaatattttagtcatagtttttaagtaccacgtattctaaggttatcagaaaatatgtcttaacagaatgttttgcatactgaataatttgtttttgaaaaggaaaatttacatttgacttactcagtttttaaaaaattatttttatttctagagacacggtcctttctgcatcacccaggctgaagtgtagtggcgtgatcgtagctcactgcagccgcaaacttcccatcttaagcgattcttctgcctcagccttccaaagtactgggattagaggcataggtcatcatgcccggccaagttaaaaaaatttttgatagttcacaaaccactcacaaaagaatctgaaatttctccaagtgttaagagaaagcaagctatgaaatgctatatttgtaggcttaaaagtaaattagtgtgttttcttaaaaatctaaaccaagattaaaatgaatatagtcataggtatgaggggcatgtaatttatcttccgactggagatacctttgagagttaaaggaggagcaattaattgttattccaggacaacagatataaatcgagattatactaggtgaactgggacatatggtcatctttgtcatagcttaattcaggaaaaaaggagttagggaagtctgaaggtctaactcaaagtttgatgctttttaagcaagtttagggaacttgagatgacctgattgagacccctaaatctacagatgaggaaagcaagcctcaagcaaggggggcctgatcctttccctgttcgctgtgtattccctgtctgtggcaaagcccattgccttgattctcttctctttactttcatgttgagaagtagtttctttctgcagtttatttaatttactggcaaaatgacgtatttttttttcagcaatgtttcagctagatatttgctttatgcatgtaatgtcaatgaagtactcataagttttcaagaaatgactgatataaatcatgtgttccactacatagtctaaatatttagtatttggtcatctattttaatatgttcaaattctgttaaacaagacatagtcactatgtgaagaataaaaatagacaaagttgcattatgacttttcttcttgcatatacagtttccctcttggttttgggatttttttaattgaagttttatttggcataaattatgaacatacatgattgaaaaagtatagtactagaagccttatttaaaaaacaaaacaataaattatctgtcccttcccctctcattcttagtttgtacttcccagaagtaaccaatttctaattcttttggctgttacatatattgtgtacttgtttacaataaggtctaaaactgcctactaatgaagctttagctctcttacccattctttatacttattggaagataataggtgctatggaaggaaaagtcagggtaaggagactgggaagaggaggccataattttaaatgtggtgatcaggttaggctttattgatgtctccacttccattctctgtgtcattttgaaaatctatttgctgttaatttaatggggttttaggaaggaactgaaggaaatttatatattgagtgcagtatgtttaaatggaagtcccacagcacttttcagttgagttaacaaataacgaatgacaataacatgtttacagagcatctactatatgccaagtattgttttaggaactgaagatatggtagagaataggaataataaaagctggcccttgtatagtttatgttctagtgggagcaaataataacagtaatagtgcaggatgtcaagtagtggtaagtactgtggagaataaagcaaggggaggggatgtaaggtgatggtgaattggtactgtcccataaacagtggtttctgatgtgattacttatgatcagacacttgaaagaaataagggaatgaatcacagggacatctaagagagaggagcattccagatagaacagcagttcgaaggccctgagctcagtatgtgtttggtgtatttaggactaggaggccagtgtggctagagcagagtgggggaggggagggtgataggaataggatcagatcatacatgctctcacagactgcagcaaagacttggattatgagttggggagtcagttgcaatgaactgagatgtggctgactgcaggaggaataagtagtaggaagcgggtccaggaggttgttttagccatgttaagtttaagatactttctaaaaatccaagtggagatgtaccagcctggaatccaggggcaggctgtggctgaagatgtaattgttggtgccttcttaaaggttaaacagaaatttactagctgtgtgagaggagaagtgcattctgggtaaatggaatagaataaagaaaaaagtacgaaaaagcaaacctggttcaggaattctccagactggtggtgttggcccacagggtgtgtgatggagaatgggtgaagatgaaactgaaaaggcaagcagggaggctattgtgcaggactttgtaggacatgctaaggaatctggactttattctgccatgaggctgctcaaccatttttatgcctcagcataactgagggctacaacataacacccatcactcaacaagcatggcagcgattttcatgggataggaaatgtgtatgggagcaaaagggacatgggtgaggggtgttgatgatgccacatatacctgtgtgtatgtgaaactttgaaaaatccctgagatggctctgatatgccccccatattccatatgtttactccctggggtgaggtggggcagggagggggtaccctctgcttagaaatcgctgcaagcaatggcaagccattaaagaattttctttttaaataatcagatttgcattttagaaaggcaattttagcttcagtgtagagagtggacccaatggggaagaggttaggagaccatttccatagtctgggtagaagacaattagctccttgaataagtctggagagggaatgtttaactcctagcccacaggcaaaatgtgtggccaaaggaatgaatattttgtggaagtattgatcagaaagataatgagtcaaggatccctaatggtatatatgtctgagtcttatttaatataagaagagcatggttgcctgccatggctctgctgccgtcaccctggctatcccttaataagcccaggaaattgttcaaatatttctgccatttgtgttttcagcttgccttgttcagggacttcacatagaatggtataactggagtacagggtgtgtatgtagtggcgggtgatagaaaattagactggaaaagtagaccaggctccagggcaggagggtctcttttcctcactccatttaatttaaaaaagaaatagtttcaattatataagcattgtgattaatgcaggcagttggagtactttctaaatcagaaaagtaaaagtgctgctccttctgcatatctctagaaatttgttatggggaagtctttatcaaagaatgtccctatgatttcagtagaatttcttaagaaaagagcttctaaaaacattcagtcagcccagcacattccaaattaaataatgagaagtgtgtttagtatttatttaggaattcttttctgaacaaaaaaacgttttcaatggtctaggcacttcctttttcttccaaagaaatggtaataacaggacactagaagtacctttctgtgtaaagcaaacatcttgtcagttttccttactttgtacttttcagtctctgctgtttaccatttttgtccaggatcagagacctccagtaaaataaaaggaatttctgtttattgtctccttgataatcttgatttctaaactcctttactcctctcttgaaggtatttgttttactgacaaaagaatggatccaggtcatttagtagagttctgaagagaattcttagagcactctatatattcaaacctccgtattttttgatacaaaaaggactgatgaaagggagacgtgattcttttgaaagattaattcacagaattttttatcacagttgaaatatcaattgcaataacaactgaaaactgattgctattactgaacactgcccttaggtggctcactcttagaagacacaaagtcactggactacaatcctttagggcagggattgtgtctcttgctcgttgtatatacatggttcttacacagtgcctggcattcaaaaaatgcattcagaaaaatttggtattcaaaaaatgcttgatgaattgactgactgcctgaatgaataaataaattggtggattaatgactgaatggagtacagaagactgtggtcccagaagaccttaacattgagcttgctgcagactgaatgtttgcctcctctcaaaattaatatgttgaaacctaatccttaatgtgatagtattaggatgtggggcctttggaaagtgattaggttatgaaggtggagccctcgtgaatgggagtagtatccttataaaagataccccagagaggtcccttgtcccttccaacatgtgaggctacagtgaaaagatggccatctgtaaaccaggaagtgagtcctcaccagataccacatctgttgtgctttgatcttggatttccctgtccccagaactgtggtaaataaatttctgttgtttgtaagcc

SEQ ID NO: 126468 - DNA, 9531 bp, Homo sapiens
  Payload ID: 4796
  Gene Symbol: DSEL
  Gene Name: dermatan sulfate epimerase-like
  Uniprot ID: Q8IZU8
  ENST ID: ENST00000310045
  CDS Start-End: 1475-5143
acctgctttcggccccgccccgcccgccgccggcctgctcacggctcctcccgtcctccccgaagccccgcctctgaccccgccctgtcctgtctccgtcccgccccacgcccgccagccagcgtcgctgtctctcgccttccctgaggccccgccttcagccccgccttcaaccccgccccgtcctgcctccgccccgcccccgcttgccggcccgcgtcgccgtctcaccctccccgggctgcgcggccggagctggcacagaggatcctcggccgcggcgacatcaccgcctgggcacgcgggcgctgctctggatacggcgccaccgagagaacccgccgcccgcgggtctctgtcctgcggtccgtggttgcccccacaagcgtccggcgtttcctgagggcgggcgtgtccgggccgtgcgggtcgcggggaccgagcgcggctgaggagaccgagctggggcagcgcctgccgtagcgcgggagacgacgcgggggtcttgcggagccccgcgggagcctggcccgccgtgcagagcagttttctggaactctccacctccgtctcccttggggcccagtgcggcgccgagcccccgtcgggatctgcctgagaaaagtgtcatgaaaaaagagcagaagagagacctcactgttgctgaaaggggaattttctttccccgttggcggttacttcatgatcggacgagaagtatctaggtgactgaagatattccatttttatgtttgtacacatgaagctgataaaagaagatgtgaacatgatttctctttgtcataataggctgatgagtaagtaagcctgaaaaatatttgaaatgaaggcaagaattttgaatttttaaaaaccaactaagactttgatcacttgttgaggatgtttctctctcataaatgaaagaaaaacgtattcacaagacaagaagtataaaaagttgagaggaatgacaactgagtccactcactcgaagaatgtcagtacttcatcatcttctttgggcaaacatacacaaatgcatcatacatgtgtggtgagcttatcaccagtgatggttttctgtgctagaaatgactcttaatttgaattttggagtgctttttctctttttttacaatgtgtgttccaactctttgtgttaaatagatttaagtaaaggaggtaaatgctaaattcatagtgttttttacctgtatcacttccctgtgtattatggaaaaattagagattttaacgttattcaaagttttactggaagcaaaactgtgccagggacagagatatacaatttaagttttctctttttggcaactgcacttgcttaaaatgtactgaatgtcagctggatttcacagcatatcagatttacagtctttgtcttatcaaggcctttactgtatgttttatactaaccagatgggaaacacattgagcatcatatctgacatgtatgcctaagggaggagctcccccatggatcatggcgttaatgtttacaggacatttactattcttagcattattgatgtttgctttctctacttttgaggaatctgtgagcaattattccgaatgggcagttttcacagatgatatagatcagtttaaaacacagaaagtgcaagatttcagacccaaccaaaagctgaagaaaagtatgcttcatccaagtttatattttgatgctggagaaatccaagcaatgagacaaaagtctcgtgcaagccatttgcatctttttagagctatcagaagtgcagtgacagttatgctgtccaacccaacatactacctacctccaccaaagcatgctgattttgctgccaagtggaatgaaatttatggtaacaatctgcctcctttagcattgtactgtttgttatgcccagaagacaaagttgcctttgaatttgtcttggaatatatggacaggatggttggctacaaagactggctagtagagaatgcaccaggagatgaggttccaattggccattccttaacaggttttgccactgcctttgactttttatataacttattagataatcatcgaagacaaaaatacctggaaaaaatatgggttattactgaggaaatgtacgagtattccaaggtccgctcatggggcaaacagcttctccataaccaccaagccactaatatgatagcattactcacaggggccttggtgactggagtagataaaggatctaaagcaaatatatggaaacaggctgtagtggatgtcatggaaaagacaatgtttctattgaatcatattgttgatggttctttggatgaaggtgtggcctatggaagctacacagctaaatccgtcacacagtatgtttttctggcccagcgccattttaatatcaacaacttggataataactggttaaagatgcacttttggttctattatgccacccttttacctggcttccaaagaactgtgggtatagcagattccaattataattggttttatggtccagaaagccagctagttttcttggataagttcatcttaaagaatggagctggaaattggttagctcagcaaattagaaagcaccgacctaaagatggaccgatggttccttcaactgcccaaaggtggagtactcttcacactgaatacatctggtatgatccccagctcacaccacagccacctgctgattatggtactgcaaaaatacacacattccctaactggggtgtggttacttatggggctgggttgccaaacacacagaccaacacctttgtgtcttttaaatctgggaagctggggggacgagctgtgtatgacatagttcattttcagccatattcctggattgatgggtggagaagttttaacccaggacatgagcatccagatcagaactcatttacttttgcccccaatggacaagtatttgtttctgaagctctctatggacccaagttgagccaccttaacaatgtattggtgtttgctccatcaccctcaagccagtgtaataagccctgggaaggtcaactgggagaatgtgcgcagtggcttaagtggactggcgaggaggttggtgatgcagctggggaaataatcactgcctctcaacatggggaaatggtatttgtgagtggggaagccgtgtctgcttattcttcagcaatgagactgaaaagtgtatatcgtgctttgcttctcttaaattcccaaactctgctagttgttgatcatattgagaggcaagaagattccccaataaattctgtcagtgccttctttcataatttggatattgattttaaatatatcccatataagtttatgaataggtataatggtgccatgatggatgtgtgggatgcacattacaaaatgttttggtttgatcatcatggcaatagtcccatggccagtatacaggaagcagagcaagctgctgaatttaaaaaacgatggactcaatttgttaatgttacttttcagatggaacccacaatcacaagaattgcatatgtcttttatgggccatatatcaatgtctccagctgcagatttattgatagttccaatcctggacttcagatttctctcaatgtcaataatactgaacatgttgtttctattgtaactgattaccataacctgaagacaagattcaattatctgggattcggtggctttgccagtgtggctgatcaaggccaaataacccgatttggtttgggcactcaagcaatagtaaagcctgtaagacatgataggattattttcccctttggatttaaatttaatatagcagttggattaattttgtgcattagcttggtgattttaactttccaatggcgtttttacctttcttttagaaaactaatgcgatggatattaatacttgttattgccttgtggtttattgagcttttggatgtgtggagcacttgtagtcagcccatttgtgcaaaatggacaaggacagaggctgagggaagcaagaagtctttgtcttctgaagggcaccacatggatcttcctgatgttgtcattacctcacttcctggttcaggagctgaaattctcaaacaactttttttcaacagtagtgattttctctacatcagggttcctacagcctacattgatattcctgaaactgagttggaaatcgactcatttgtagatgcttgtgaatggaaggtgtcagatatccgcagtgggcattttcgtttactccgaggctggttgcagtctttagtccaggacacaaaattacatttgcaaaacatccatctgcatgaacccaataggggtaaactggcccaatattttgcaatgaataaggacaaaaaaagaaaatttaaaaggagagagtctttgccagaacaaagaagtcaaatgaaaggcgcctttgatagagatgctgaatatattagggctttgaggagacacctggtttactatccaagtgcacgtcctgtgctcagtttaagcagtggaagctggacgttaaagcttcatttttttcaggaagttttaggagcttcgatgagggcattgtacatagtaagagaccctcgggcatggatttattcaatgttgtacaatagtaaaccaagtctttattctttgaagaatgtaccagagcatttagcaaaattgtttaaaatagagggaggtaaaggcaaatgtaacttaaattcgggttatgctttcgagtatgaaccattgaggaaagaattatcaaaatccaaatcaaatgcagtgtccctcttgtctcacttgtggctagcaaatacagcagcagccttgagaataaatacagatttgctgcctactagctaccagctggtcaagtttgaagatattgtgcattttcctcagaaaactactgaaaggatttttgcctttcttggaattcctttgtctcctgctagtttaaaccaaatattgtttgccacctctacaaaccttttttaccttccctatgaaggggaaatatcaccaactaatactaatgtttggaaacagaacttgcctagagatgaaattaaactaattgaaaacatctgctggactctgatggatcgcctaggatatccaaagtttatggactaaatgctgcaggtcagcagaaatttgcactaataatacttaccaacccactttgtggatatgaatcagaagagtttgtttattctttagtgtgtgtgtgtgtgtgcacgcgtgtatgtgttcagtgttgtttgcacagagagattgttttaaaaaatggcaccatatttggcctagcaggatttatttttatgtcatcacctcccttgcctttgtttctgaaaattttgtctgctaaaaagtttctgctacagagtggtagatgaagttatatcatggggtcaggggagatgggaaaattttaagtttttgtctaactccccttcatctgtaactgtgctaatctatctagagacctcaaacactgctaaaggccttgcaattgctgctttacccacgcatctcttgctttcaagatggactacaaaagttccttatccttttgaaaaggtcttctgacacacttatcttgcacaaagaaaaagaaaatttcttttactgtgtttaatgttcagtgatatcactgaggaaatggtgaaagctcctatcagaactataggatttcttctgggaaatacagatggaaatacagaatgaatatgtttttttgaggtcggaaactgactttaaaagcctccttgaagttttttacttagaaatataaggaataagtctttgaacaatctgggtggcaagggctggtagattattttagacatgattgtctgtttaaaactctcctttcactttttatcctccctggagctacagctgttcgccatcacatcactcccatcctatcctttctgtcactgtcaagcaaaacaatcagtagttactaatcgctgaactctcaatattgtggggcattttccccccagttgattaattttgcgttaaagactgacacagacttagaatcaaatttatttttctggaattaacactctgtgactcaaagtagtgccactgcagtgtctttttaaactggaaacagaattggaaaactgcctgacttatcttgcatccctttgaatgagtttacagactgccagtgtctgcaaaagttgaaagcaaatgggagatgatgtcagaggcatctgtttcctttaccatctgcatcttattataaatgtagtcgtcataaagtgtggtttattttattttggtaggctctgaaatcaaaatgctacgccattataagccagtggagtaattacaatgtattggatgaaaacataaggcagtgtggagacttgatgaaaatctctgtacagattgcagtcttcttcctgatgtttcaaactgtggttcccccaagctctctaacacttggaagtctgtcattctgacctagataaaagtggttctttctcagtagttattattatgtcaaaatgtgcctccagagtgataaagctctgtatatgttagattccagctaaacctaacttggctgtcatttttcttccattatagtgtgagtggagactgccccccctccccaacatattccttcccatatctctcatgattgtccctctgtaatttcaaaatgaatgaaattcatgtgaatgtaggttgagagggcactgaagacctgaatctacactagtaatctcaagaaagattattcattctatctcagagttaccggcaagcatataaaatgctacttggataatatctacatgaatattgcatgctacatggttgataacactatttccattattgggcagaatctcagtgtttactttcaattcctaggatatgtgatcgtgaatcagatcacatataaaaagtctggattgtcagtagtattagatctgatcaaggtaggaattacaattgcatgcaggtagcaagcaagaaagcagaaactactgttccctttattttaacattgtacagacaatacagaaatgtacctgttggcggccgggtgcagtggctcacgcctgtaatcccagcacttcgggaggccgaggcgggtggatcacgaggtcaggagatcaagaccatcctggctaacacggtgaaaccccgtctctactaaaaaaaaaagtacaaaaaattagccgggcgtggtggcgggcacctgtagtcccagctacacgggaggctgaggcaggagaatggcatgaacctgggaggcagagcttgcagtgagtggagatgcgccactgcactccagcctgggcgacagagcgagactccgcctcaaaaaaaaaaaaaaaagaaaaaaagaaatgtacctgttggcaggagaaggccagatggagtatgtggagtaatagggaaagaagagttacagaaaatgaaaaagaaaatgagttacactgagaatgaatatgggaacacgtcattgatagcaaaagaaaggtacaggcttacgaaaatgatctttacaatgtatcccagctttcacccccacatggcaatgcagagttgtatttacttgtttctgtactcacctactcccaccccaagggaaaattttagacatgaaccctactatttagttattctaaaatagaaagtttgctggagaaagcgtccactcacagattgttctgtaaggaatgttatgtatgggtgagcgggtgacacatccattgggtatgtatgcatgtgatggtgcctgagacccctgccttagaaacagaattcctaaggggattgactctcccagcatgttcccaggtcctgcacccttagggtgatctaggaaaattttaaatagcttctactcttatttttgttctttgaaataattaaaagagggattatcactatctgatacttctgaaagaaacacttacaaaatttcttatctgtaaaatccgtctttttctacattaacttccccaaacataggcctaattgagataattgcttttattataataataggattgaaattttaaaattttgaaaggacttattaattttgctgacaaaagtgaagtaacaaatataatgataattggctttttaaattttcaaacaacatagatttactcaagatgaaataaaaaggccatattcagagttgaatttaatgaaaactcagaggaaataggaaaatctgctcaggagaaagaagctaaatctgcatagatttagtttgtagaatttaatttaaaatttaaattttaacaaagtgatgacacaacaatatgtacgtttaggtgtggacaccaaaatattagacatttgattgtccttttacatagagaataactaataaatgcctgacaagaatgggacaatccttccttgtatcaaaattcccaggtcttgctacattgccctctgcaaatgtattcaaagaagaacctcctccaccacttacttttggttggcataattgttcagcaacgatttctgtacatcaccaagtatctttggcattcttggtatacaaagtatatcacaattttaagtgagtaaatattaatgataatttttgaattgctttgtttggcttgattaactttgatcagaaatagaaacgttttcatttgttgatttaggaaaaagcataaatagaatgcagtataacaccacttccaaaggtaaggatacctaacattcttttttttttttttttttttttttttgggatggagtctcactttgttgcccaggctggagtgcagtggtctgatctcggctcactgcaacctccgcctaccgggttcaagtgattctcctacgtcagcctcctgaatagctgggattacaggtgcacgccaccatgcttggctcatttttgtatttttagtagtgacagcgtttcaccacattggtcaggctggtctcaatctcttgacctggtgatctgcccacctgggcctcccaaaatgctgggattacaggcatgagccaccacacctggcaagggtacctgacattctaagatatcaagacacttaatatgtgggctattagctgcttatttaaatgttgaccaaattgtctgatatatctgattaatcatgatttcacttcatttcggaagaaaaattatccatatcatttttaaagacgcaaatgactttggatttttgcatagagtacaatagacacttcaaacaatagattctaacattctctgaaacacttgagatgtttgagctaccatttatatgggttatttatatttagtctaagtaacacatacatgtttaattgattctgttttcatggatagattcaactaagtcttccaagcaattaattttttgttcgtcgtcgtttttccttcatacgttatctagttatgcagcactggaaacagactgaagatcataaaccagttttatcagacctatgtgtaataagactcctgttaatacaaaaataaaaagctaaaagcaacttgt

SEQ ID NO: 126469 - DNA, 9531 bp, Homo sapiens; identical to SEQ ID NO: 126468
  Payload ID: 4796
  Gene Symbol: DSEL
  Gene Name: dermatan sulfate epimerase-like
  Uniprot ID: Q8IZU8
  ENST ID: ENST00000572659
  CDS Start-End: 1475-5143

SEQ ID NO: 126470 - DNA, 1786 bp, Homo sapiens
  Payload ID: 4797
  Gene Symbol: DPT
  Gene Name: dermatopontin
  Uniprot ID: Q07507
  ENST ID: ENST00000367817
  CDS Start-End: 91-696
acatctggaagccacatgtcagcggcagctatataaaacggtcagaccagcaatcttagagtgacattgtttgccaaaatcccaggcagcatggacctcagtcttctctgggtacttctgcccctagtcaccatggcctggggccagtatggcgattatggatacccataccagcagtatcatgactacagcgatgatgggtgggtgaatttgaaccggcaaggcttcagctaccagtgtccccaggggcaggtgatagtggccgtgaggagcatcttcagcaagaaggaaggttctgacagacaatggaactacgcctgcatgcccacgccacagagcctcggggaacccacggagtgctggtgggaggagatcaacagggctggcatggaatggtaccagacgtgctccaacaatgggctggtggcaggattccagagccgctacttcgagtcagtgctggatcgggagtggcagttttactgttgtcgctacagcaagaggtgcccatattcctgctggctaacaacagaatatccaggtcactatggtgaggaaatggacatgatttcctacaattatgattactatatccgaggagcaacaaccactttctctgcagtggaaagggatcgccagtggaagttcataatgtgccggatgactgaatacgactgtgaatttgcaaatgtttagatttgccacataccaaatctgggtgaaaggaaaggggccggggacaggagggtgtccacatatgttaacatcagttggatctcctatagaagtttctgctgctctctttccttctccctgagctggtaactgcaatgccaacttcctgggcctttctgactagtatcacacttctaataaaatccacaattaaaccatgtttctcacttttcacatgtttcatagcaactgctttatatgactgatgatggcttccttgcacaccacatatacagtgcgcatgcttacagccgggcttctggagcaccagctgcagcctggctactgctttttactgcagaatgaactgcaagttcagcatagtggaggggagaggcagaactggaggagaggtgcagtgaaggttctctacagctaagcctgtttgaatgatacgtaggttccccaccaaaagcaggctttctgccctgagggacatcttcccactcccctgctccacatgagccatgcatgcttagcaatccaagtgcagagctctttgctccaggagtgaggagactgggaggtgaaatggggaaatggaagggtttggaggcagagctgaaaacagggttggaaggatttcctgaattagaagacaaacgttagcatacccagtaaggaaaatgagtgcaggggccaggggaacccgtgaggatcactctcaaatgagattaaaaacaaggaagcagagaatggtcagagaatgggattcagattgggaacttgtggggatgagagtgaccaggttgaactgggaagtggaaaaaggagtttgagtcactggcacctagaagcctgcccacgattcctaggaaggctggcagacaccctggaaccctggggagctactggcaaactctcctggattgggcctgatttttttggtgggaaaggctgccctggggatcaactttccttctgtgtgtggctcaggagttcttctgcagagatggcgctatctttcctcctcctgtgatgtcctgctcccaaccatttgtactcttcattacaaaagaaataaaaatattaacgttcactatgctgaaaa

SEQ ID NO: 126471 - DNA, 645 bp, Homo sapiens
  Payload ID: 4798
  Gene Symbol: DCD
  Gene Name: dermcidin
  Uniprot ID: P81605
  ENST ID: ENST00000293371
  CDS Start-End: 191-523
cagccagcctttgttgacttaacaggtggctctgaggtgggagaagaggaggaggagaacacaccactggaagactggttcccattggtccctgtcatgcttaaaaaaaggcccagagaggcagtcttgacaccctagatcccaagatctccaaggatttggtggcatacccactccagcacacagaagcatgaggttcatgactctcctcttcctgacagctctggcaggagccctggtctgtgcctatgatccagaggccgcctctgccccaggatcggggaacccttgccatgaagcatcagcagctcaaaaggaaaatgcaggtgaagacccagggttagccagacaggcaccaaagccaaggaagcagagatccagccttctggaaaaaggcctagacggagcaaaaaaagctgtggggggactcggaaaactaggaaaagatgcagtcgaagatctagaaagcgtgggtaaaggagccgtccatgacgttaaagacgtccttgactcagtactatagctgtaaggagaagctgagaaatgatacccaggagcagcaggctttacgtcttcagcctaaaacctaaaaaaaaaaaaaaaaaaaaaaatttaaaacagctattaaactgaaagcatctgtaa

SEQ ID NO: 126472 - DNA, 670 bp, Homo sapiens
  Payload ID: 4798
  Gene Symbol: DCD
  Gene Name: dermcidin
  Uniprot ID: P81605
  ENST ID: ENST00000456047
  CDS Start-End: 191-556
cagccagcctttgttgacttaacaggtggctctgaggtgggagaagaggaggaggagaacacaccactggaagactggttcccattggtccctgtcatgcttaaaaaaaggcccagagaggcagtcttgacaccctagatcccaagatctccaaggatttggtggcatacccactccagcacacagaagcatgaggttcatgactctcctcttcctgacagctctggcaggagccctggtctgtgcctatgatccagaggccgcctctgccccaggatcggggaacccttgccatgaagcatcagcagctcaaaaggaaaatgcaggtgaagacccagggttagccagacaggcaccaaagccaaggaagcagagatccagccttctggaaaaaggcctagacggagcaaaaaaagctgtggggggactcggaaaactaggaaaagatgcagtcgaagatctagaaagcgtgggtaaaggtggggaagagaggttggtctttggggctcctgtgaatctaacctccatccctctgacttctgtgagccgtccatgacgttaaagacgtccttgactcagtactatagctgtaaggagaagctgagaaatgatacccaggagcagcaggctttacgtcttcagcctaaaacctaaaaaaaaaaaaaaaaaa

SEQ ID NO: 126473 - DNA, 773 bp, Homo sapiens
  Payload ID: 4798
  Gene Symbol: DCD
  Gene Name: dermcidin
  Uniprot ID: P81605
  ENST ID: ENST00000546807
  CDS Start-End: 191-424
cagccagcctttgttgacttaacaggtggctctgaggtgggagaagaggaggaggagaacacaccactggaagactggttcccattggtccctgtcatgcttaaaaaaaggcccagagaggcagtcttgacaccctagatcccaagatctccaaggatttggtggcatacccactccagcacacagaagcatgaggttcatgactctcctcttcctgacagctctggcaggagccctggtctgtgcctatgatccagaggccgcctctgccccaggatcggggaaccataaacaaatggattgtttacagctacagaagcccccttcagagactgccaaatttctgtcctcatccaccaacctgcctagaagagagaagctagtgccctctgcaaaacctccccacactagggggctggtataagggatgaaaactagggggagtctctttaagcttgccatgaagcatcagcagctcaaaaggaaaatgcaggtgaagacccagggttagccagacaggcaccaaagccaaggaagcagagatccagccttctggaaaaaggcctagacggagcaaaaaaagctgtggggggactcggaaaactaggaaaagatgcagtcgaagatctagaaagcgtgggtaaaggagccgtccatgacgttaaagacgtccttgactcagtactatagctgtaaggagaagctgagaaatgatacccaggagcagcaggctttacgtcttcagcctaaaacctaaaaaaaaaaaaaaaaaa

SEQ ID NO: 126474 - DNA, 1927 bp, Homo sapiens
  Payload ID: 4799
  Gene Symbol: DMKN
  Gene Name: dermokine
  Uniprot ID: Q6E0U4
  ENST ID: ENST00000339686
  CDS Start-End: 178-1608
tctgagaagcccaggcagttgaggacaggagagagaaggctgcagacccagagggagggaggacagggagtcggaaggaggaggacagaggagggcacagagacgcagagcaagggcggcaaggaggagaccctggtgggaggaagacactctggagagagagggggctgggcagagatgaagttccaggggcccctggcctgcctcctgctggccctctgcctgggcagtggggaggctggccccctgcagagcggagaggaaagcactgggacaaatattggggaggcccttggacatggcctgggagacgccctgagcgaaggggtgggaaaggccattggcaaagaggccggaggggcagctggctctaaagtcagtgaggcccttggccaagggaccagagaagcagttggcactggagtcaggcaggttccaggctttggcgtagcagatgctttgggcaacagggtcggggaagcagcccatgctctgggaaacactgggcacgagattggcagacaggcagaagatgtcattcgacacggagcagatgctgtccgcggctcctggcagggggtgcctggccacaatggtgcttgggaaacttctggaggccatggcatctttggctctcaaggtggccttggaggccagggccagggcaatcctggaggtctggggactccgtgggtccacggataccccggaaactcagcaggcagctttggaatgaatcctcagggagctccctggggtcaaggaggcaatggagggccaccaaactttgggaccaacactcagggagctgtggcccagcctggctatggttcagtgagagccagcaaccagaatgaagggtgcacgaatcccccaccatctggctcaggtggaggctccagcaactctgggggaggcagcggctcacagtcgggcagcagtggcagtggcagcaatggtgacaacaacaatggcagcagcagtggtggcagcagcagtggcagcagcagtggcggcagcagtggcggcagcagtggtggcagcagtggcaacagtggtggcagcagaggtgacagcggcagtgagtcctcctggggatccagcaccggctcctcctccggcaaccacggtgggagcggcggaggaaatggacataaacccgggtgtgaaaagccagggaatgaagcccgcgggagcggggaatctgggattcagaactctgagacgtctcctgggatgtttaactttgacactttctggaagaattttaaatccaagctgggtttcatcaactgggatgccataaacaagaaccaggtcccgccccccagcacccgagccctcctctacttcagccgactctgggaggatttcaaacagaacactcctttcctcaactggaaagcaattattgagggtgcggacgcgtcatcactgcagaaacgtgcaggcagagacgatcagaactacaattacaaccagcatgcgtatcccactgcctatggtgggaagtactcagtcaagacccctgcaaaggggggagtctcaccttcttcctcggcttcccgggtgcaacctggcctgctgcagtgggtgaagttttggtaggcaatttcttgcaaccaccaccgaggccccgaaaagcactggtcgtcagggagctcctccccttggcccccagcctgtgccagccctggcccggctgccacacctctgtttcctaggctggggacccagcttgtctctccttgtttcttcccactgcactgtggtgcttcagtggccaccagcctcgtcacatacaccagcatctttctgtacctcctccctttggtgacctgaagtcactgtgacagttctccaggaaggaggagcttcctacttttgagtttctctgtggaaataaaacatgaatcttgtttcccta

SEQ ID NO: 126475 - DNA, 458 bp, Homo sapiens
  Payload ID: 4799
  Gene Symbol: DMKN
  Gene Name: dermokine
  ENST ID: ENST00000392206
  CDS Start-End: 44-343
attgcgtagttccgaataccctcggccacacctggccttctccatgctcggaataacttcctgcagcgaccaacaggctaaagagggggaaggtctggagggatccagcaccggctcctcctccggcaaccacggtgggagcggcggaggaaatggacataaacccgggtgtgaaaagccagggaatgaagcccgcgggagcggggaatctgggattcagaactctgagacgtctcctgggatgtttaactttgacactttctggaagaattttaaatccaagctgggtttcatcaactgggatgccataaacaaggaccagagaagctctcgcatcccgtgacctccagacaaggagccaccagattggatgggagcccccacactccctccttaaaacaccaccctctcatcactaatctcagcccttgcccttgaaataaaccttagctgcccca

SEQ ID NO: 126476 - DNA, 935 bp, Homo sapiens
  Payload ID: 4799
  Gene Symbol: DMKN
  Gene Name: dermokine
  ENST ID: ENST00000402589
  CDS Start-End: 5-616
ctccatgctcggaataacttcctgcagcgaccaacaggctaaagagggggaaggtctggagggatccagcaccggctcctcctccggcaaccacggtgggagcggcggaggaaatggacataaacccgggtgtgaaaagccagggaatgaagcccgcgggagcggggaatctgggattcagaactctgagacgtctcctgggatgtttaactttgacactttctggaagaattttaaatccaagctgggtttcatcaactgggatgccataaacaagaaccaggtcccgccccccagcacccgagccctcctctacttcagccgactctgggaggatttcaaacagaacactcctttcctcaactggaaagcaattattgagggtgcggacgcgtcatcactgcagaaacgtgcaggcagagacgatcagccgggtgcaggatggcaggaggtggcagctgtaacttccaagaactacaattacaaccagcatgcgtatcccactgcctatggtgggaagtactcagtcaagacccctgcaaaggggggagtctcaccttcttcctcggcttcccgggtgcaacctggcctgctgcagtgggtgaagttttggtaggcaatttcttgcaaccaccaccgaggccccgaaaagcactggtcgtcagggagctcctccccttggcccccagcctgtgccagccctggcccggctgccacacctctgtttcctaggctggggacccagcttgtctctccttgtttcttcccactgcactgtggtgcttcagtggccaccagcctcgtcacatacaccagcatctttctgtacctcctccctttggtgacctgaagtcactgtgacagttctccaggaaggaggagcttcctacttttgagtttctctgtggaaataaaacatgaatcttgtttcccta

SEQ ID NO: 126477 - DNA, 600 bp, Homo sapiens
  Payload ID: 4799
  Gene Symbol: DMKN
  Gene Name: dermokine
  Uniprot ID: Q6E0U4
  ENST ID: ENST00000408915
  CDS Start-End: 9-281
acaagcacatgaacatgaagccggccactgcctctgctctgctcctgctcctgctgggcctggcctggacccaggggagccacggctggggtgcggacgcgtcatcactgcagaaacgtgcaggcagagacgatcagaactacaattacaaccagcatgcgtatcccactgcctatggtgggaagtactcagtcaagacccctgcaaaggggggagtctcaccttcttcctcggcttcccgggtgcaacctggcctgctgcagtgggtgaagttttggtaggcaatttcttgcaaccaccaccgaggccccgaaaagcactggtcgtcagggagctcctccccttggcccccagcctgtgccagccctggcccggctgccacacctctgtttcctaggctggggacccagcttgtctctccttgtttcttcccactgcactgtggtgcttcagtggccaccagcctcgtcacatacaccagcatctttctgtacctcctccctttggtgacctgaagtcactgtgacagttctccaggaaggaggagcttcctacttttgagtttctctgtggaaataaaacatgaatcttgtttcccta

SEQ ID NO: 126478 - DNA, 923 bp, Homo sapiens
  Payload ID: 4799
  Gene Symbol: DMKN
  Gene Name: dermokine
  ENST ID: ENST00000434389
  CDS Start-End: 1-604
cggcggaggaaatggacataaacccgggtgtgaaaagccagggaatgaagcccgcgggagcggggaatctgggattcagggcttcagaggacagggagtttccagcaacatgagggaaataagcaaagagggcaatcgcctccttggaggctctggagacaattataggaactctgagacgtctcctgggatgtttaactttgacactttctggaagaattttaaatccaagctgggtttcatcaactgggatgccataaacaagaaccaggtcccgccccccagcacccgagccctcctctacttcagccgactctgggaggatttcaaacagaacactcctttcctcaactggaaagcaattattgagggtgcggacgcgtcatcactgcagaaacgtgcaggcagagacgatcagccgggtgcaggatggcaggaggtggcagctgtaacttccaagaactacaattacaaccagcatgcgtatcccactgcctatggtgggaagtactcagtcaagacccctgcaaaggggggagtctcaccttcttcctcggcttcccgggtgcaacctggcctgctgcagtgggtgaagttttggtaggcaatttcttgcaaccaccaccgaggccccgaaaagcactggtcgtcagggagctcctccccttggcccccagcctgtgccagccctggcccggctgccacacctctgtttcctaggctggggacccagcttgtctctccttgtttcttcccactgcactgtggtgcttcagtggccaccagcctcgtcacatacaccagcatctttctgtacctcctccctttggtgacctgaagtcactgtgacagttctccaggaaggaggagcttcctacttttgagtttctctgtggaaataaaacatgaatcttgtttcccta

SEQ ID NO: 126479 - DNA, 1293 bp, Homo sapiens
  Payload ID: 4799
  Gene Symbol: DMKN
  Gene Name: dermokine
  Uniprot ID: Q6E0U4
  ENST ID: ENST00000424570
  CDS Start-End: 7-1203
gcagagatgaagttccaggggcccctggcctgcctcctgctggccctctgcctgggcagtggggaggctggccccctgcagagcggagaggaaagcactgggacaaatattggggaggcccttggacatggcctgggagacgccctgagcgaaggggtgggaaaggccattggcaaagaggccggaggggcagctggctctaaagtcagtgaggcccttggccaagggaccagagaagcagttggcactggagtcaggcaggttccaggctttggcgtagcagatgctttgggcaacagggtcggggaagcagcccatgctctgggaaacactgggcacgagattggcagacaggcagaagatgtcattcgacacggagcagatgctgtccgcggctcctggcagggggtgcctggccacaatggtgcttgggaaacttctggaggccatggcatctttggctctcaaggtggccttggaggccagggccagggcaatcctggaggtctggggactccgtgggtccacggataccccggaaactcagcaggcagctttggaatgaatcctcagggagctccctggggtcaaggaggcaatggagggccaccaaactttgggaccaacactcagggagctgtggcccagcctggctatggttcagtgagagccagcaaccagaatgaagggtgcacgaatcccccaccatctggctcaggtggaggctccagcaactctgggggaggcagcggctcacagtcgggcagcagtggcagtggcagcaatggtgacaacaacaatggcagcagcagtggtggcagcagcagtggcagcagcagtggcggcagcagtggcggcagcagtggtggcagcagtggcaacagtggtggcagcagaggtgacagcggcagtgagtcctcctggggatccagcaccggctcctcctccggcaaccacggtgggagcggcggaggaaatggacataaacccgggtgtgaaaagccagggaatgaagcccgcgggagcggggaatctgggattcagggcttcagaggacagggagtttccagcaacatgaggaactctgagacgtctcctgggatgtttaactttgacactttctggaagaattttaaatccaagctgggtttcatcaactgggatgccataaacaaggaccagagaagctctcgcatcccgtgacctccagacaaggagccaccagattggatgggagcccccacactccctccttaaaacaccaccctctcatcactaatctcagcccttgcc

SEQ ID NO: 126480 - DNA, 1496 bp, Homo sapiens
  Payload ID: 4799
  Gene Symbol: DMKN
  Gene Name: dermokine
  Uniprot ID: Q6E0U4
  ENST ID: ENST00000419602
  CDS Start-End: 8-1405
ggcagagatgaagttccaggggcccctggcctgcctcctgctggccctctgcctgggcagtggggaggctggccccctgcagagcggagaggaaagcactgggacaaatattggggaggcccttggacatggcctgggagacgccctgagcgaaggggtgggaaaggccattggcaaagaggccggaggggcagctggctctaaagtcagtgaggcccttggccaagggaccagagaagcagttggcactggagtcaggcaggttccaggctttggcgtagcagatgctttgggcaacagggtcggggaagcagcccatgctctgggaaacactgggcacgagattggcagacaggcagaagatgtcattcgacacggagcagatgctgtccgcggctcctggcagggggtgcctggccacaatggtgcttgggaaacttctggaggccatggcatctttggctctcaaggtggccttggaggccagggccagggcaatcctggaggtctggggactccgtgggtccacggataccccggaaactcagcaggcagctttggaatgaatcctcagggagctccctggggtcaaggaggcaatggagggccaccaaactttgggaccaacactcagggagctgtggcccagcctggctatggttcagtgagagccagcaaccagaatgaagggtgcacgaatcccccaccatctggctcaggtggaggctccagcaactctgggggatccagcaccggctcctcctccggcaaccacggtgggagcggcggaggaaatggacataaacccgggtgtgaaaagccagggaatgaagcccgcgggagcggggaatctgggattcagggcttcagaggacagggagtttccagcaacatgagggaaataagcaaagagggcaatcgcctccttggaggctctggagacaattatagggggcaagggtcgagctggggcagtggaggaggtgacgctgttggtggagtcaatactgtgaactctgagacgtctcctgggatgtttaactttgacactttctggaagaattttaaatccaagctgggtttcatcaactgggatgccataaacaagaaccaggtcccgccccccagcacccgagccctcctctacttcagccgactctgggaggatttcaaacagaacactcctttcctcaactggaaagcaattattgagggtgcggacgcgtcatcactgcagaaacgtgcaggcagagacgatcagaactacaattacaaccagcatgcgtatcccactgcctatggtgggaagtactcagtcaagacccctgcaaaggggggagtctcaccttcttcctcggcttcccgggtgcaacctggcctgctgcagtgggtgaagttttggtaggcaatttcttgcaaccaccaccgaggccccgaaaagcactggtcgtcagggagctcctccccttggcccccagcctgtgccagccctggcc

SEQ ID NO: 126481 - DNA, 867 bp, Homo sapiens
  Payload ID: 4799
  Gene Symbol: DMKN
  Gene Name: dermokine
  Uniprot ID: Q6E0U4
  ENST ID: ENST00000414866
  CDS Start-End: 44-613
attgcgtagttccgaataccctcggccacacctggccttctccatgctcggaataacttcctgcagcgaccaacaggctaaagagggggaaggtctggagggatccagcaccggctcctcctccggcaaccacggtgggagcggcggaggaaatggacataaacccgggtgtgaaaagccagggaatgaagcccgcgggagcggggaatctgggattcagaactctgagacgtctcctgggatgtttaactttgacactttctggaagaattttaaatccaagctgggtttcatcaactgggatgccataaacaagaaccaggtcccgccccccagcacccgagccctcctctacttcagccgactctgggaggatttcaaacagaacactcctttcctcaactggaaagcaattattgagggtgcggacgcgtcatcactgcagaaacgtgcaggcagagacgatcagaactacaattacaaccagcatgcgtatcccactgcctatggtgggaagtactcagtcaagacccctgcaaaggggggagtctcaccttcttcctcggcttcccgggtgcaacctggcctgctgcagtgggtgaagttttggtaggcaatttcttgcaaccaccaccgaggccccgaaaagcactggtcgtcagggagctcctccccttggcccccagcctgtgccagccctggcccggctgccacacctctgtttcctaggctggggacccagcttgtctctccttgtttcttcccactgcactgtggtgcttcagtggccaccagcctcgtcacatacaccagcatctttctgtacctcctccctttggtgacctgaagtcactgtgacagttctcc

SEQ ID NO: 126482 - DNA, 1611 bp, Homo sapiens
  Payload ID: 4799
  Gene Symbol: DMKN
  Gene Name: dermokine
  Uniprot ID: Q6E0U4
  ENST ID: ENST00000447113
  CDS Start-End: 184-1494
gtggactctgagaagcccaggcagttgaggacaggagagagaaggctgcagacccagagggagggaggacagggagtcggaaggaggaggacagaggagggcacagagacgcagagcaagggcggcaaggaggagaccctggtgggaggaagacactctggagagagagggggctgggcagagatgaagttccaggggcccctggcctgcctcctgctggccctctgcctgggcagtggggaggctggccccctgcagagcggagaggaaagcactgggacaaatattggggaggcccttggacatggcctgggagacgccctgagcgaaggggtgggaaaggccattggcaaagaggccggaggggcagctggctctaaagtcagtgaggcccttggccaagggaccagagaagcagttggcactggagtcaggcaggttccaggctttggcgtagcagatgctttgggcaacagggtcggggaagcagcccatgctctgggaaacactgggcacgagattggcagacaggcagaagatgtcattcgacacggagcagatgctgtccgcggctcctggcagggggtgcctggccacaatggtgcttgggaaacttctggaggccatggcatctttggctctcaaggtggccttggaggccagggccagggcaatcctggaggtctggggactccgtgggtccacggataccccggaaactcagcaggcagctttggaatgaatcctcagggagctccctggggtcaaggaggcaatggagggccaccaaactttgggaccaacactcagggagctgtggcccagcctggctatggttcagtgagagccagcaaccagaatgaagggtgcacgaatcccccaccatctggctcaggtggaggctccagcaactctgggggaggcagcggctcacagtcgggcagcagtggcagtggcagcaatggtgacaacaacaatggcagcagcagtggtggcagcagcagtggcagcagcagtggcggcagcagtggcggcagcagtggtggcagcagtggcaacagtggtggcagcagaggtgacagcggcagtgagtcctcctggggatccagcaccggctcctcctccggcaaccacggtgggagcggcggaggaaatggacataaacccgggtgtgaaaagccagggaatgaagcccgcgggagcggggaatctgggattcagggcttcagaggacagggagtttccagcaacatgagggaaataagcaaagagggcaatcgcctccttggaggctctggagacaattatagggggcaagggtcgagctggggcagtggaggaggtgacgctgttggtggagtcaatactgtgaactctgagacgtctcctgggatgtttaactttgacactttctggaagaattttaaatccaagctgggtttcatcaactgggatgccataaacaaggaccagagaagctctcgcatcccgtgacctccagacaaggagccaccagattggatgggagcccccacactccctccttaaaacaccaccctctcatcactaatctcagcccttgcccttgaaataaaccttagctgccccaca

SEQ ID NO: 126483 - DNA, 364 bp, Homo sapiens
  Payload ID: 4799
  Gene Symbol: DMKN
  Gene Name: dermokine
  ENST ID: ENST00000450261
  CDS Start-End: 16-364
cacctggccttctccatgctcggaataacttcctgcagcgaccaacaggctaaagagggggaaggtctggagggatccagcaccggctcctcctccggcaaccacggtgggagcggcggaggaaatggacataaacccgggtgtgaaaagccagggaatgaagcccgcgggagcggggaatctgggattcaggggcaagggtcgagctggggcagtggaggaggtgacgctgttggtggagtcaatactgtgaactctgagacgtctcctgggatgtttaactttgacactttctggaagaattttaaatccaagctgggtttcatcaactgggatgccataaacaaggaccagagaagctctc

SEQ ID NO: 126484 - DNA, 510 bp, Homo sapiens
  Payload ID: 4799
  Gene Symbol: DMKN
  Gene Name: dermokine
  ENST ID: ENST00000458071
  CDS Start-End: 9-404
ccttctccatgctcggaataacttcctgcagcgaccaacaggctaaagagggggaaggtctggagggatccagcaccggctcctcctccggcaaccacggtgggagcggcggaggaaatggacataaacccgggtgtgaaaagccagggaatgaagcccgcgggagcggggaatctgggattcagggcttcagaggacagggagtttccagcaacatgagggggcaagggtcgagctggggcagtggaggaggtgacgctgttggtggagtcaatactgtgaactctgagacgtctcctgggatgtttaactttgacactttctggaagaattttaaatccaagctgggtttcatcaactgggatgccataaacaaggaccagagaagctctcgcatcccgtgacctccagacaaggagccaccagattggatgggagcccccacactccctccttaaaacaccaccctctcatcactaatctcagcccttgcccttgaaataaacctta

SEQ ID NO: 126485 - DNA, 1447 bp, Homo sapiens
  Payload ID: 4799
  Gene Symbol: DMKN
  Gene Name: dermokine
  Uniprot ID: Q6E0U4
  ENST ID: ENST00000429837
  CDS Start-End: 7-1356
gcagagatgaagttccaggggcccctggcctgcctcctgctggccctctgcctgggcagtggggaggctggccccctgcagagcggagaggaaagcactgggacaaatattggggaggcccttggacatggcctgggagacgccctgagcgaaggggtgggaaaggccattggcaaagaggccggaggggcagctggctctaaagtcagtgaggcccttggccaagggaccagagaagcagttggcactggagtcaggcaggttccaggctttggcgtagcagatgctttgggcaacagggtcggggaagcagcccatgctctgggaaacactgggcacgagattggcagacaggcagaagatgtcattcgacacggagcagatgctgtccgcggctcctggcagggggtgcctggccacaatggtgcttgggaaacttctggaggccatggcatctttggctctcaaggtggccttggaggccagggccagggcaatcctggaggtctggggactccgtgggtccacggataccccggaaactcagcaggcagctttggaatgaatcctcagggagctccctggggtcaaggaggcaatggagggccaccaaactttgggaccaacactcagggagctgtggcccagcctggctatggttcagtgagagccagcaaccagaatgaagggtgcacgaatcccccaccatctggctcaggtggaggctccagcaactctgggggatccagcaccggctcctcctccggcaaccacggtgggagcggcggaggaaatggacataaacccgggtgtgaaaagccagggaatgaagcccgcgggagcggggaatctgggattcaggggcaagggtcgagctggggcagtggaggaggtgacgctgttggtggagtcaatactgtgaactctgagacgtctcctgggatgtttaactttgacactttctggaagaattttaaatccaagctgggtttcatcaactgggatgccataaacaagaaccaggtcccgccccccagcacccgagccctcctctacttcagccgactctgggaggatttcaaacagaacactcctttcctcaactggaaagcaattattgagggtgcggacgcgtcatcactgcagaaacgtgcaggcagagacgatcagccgggtgcaggatggcaggaggtggcagctgtaacttccaagaactacaattacaaccagcatgcgtatcccactgcctatggtgggaagtactcagtcaagacccctgcaaaggggggagtctcaccttcttcctcggcttcccgggtgcaacctggcctgctgcagtgggtgaagttttggtaggcaatttcttgcaaccaccaccgaggccccgaaaagcactggtcgtcagggagctcctccccttggcccccagcctgtgccagccctggcc

SEQ ID NO: 126486 - DNA, 842 bp, Homo sapiens
  Payload ID: 4799
  Gene Symbol: DMKN
  Gene Name: dermokine
  ENST ID: ENST00000443640
  CDS Start-End: 13-774
ctggccttctccatgctcggaataacttcctgcagcgaccaacaggctaaagagggggaaggtctggagggatccagcaccggctcctcctccggcaaccacggtgggagcggcggaggaaatggacataaacccgggtgtgaaaagccagggaatgaagcccgcgggagcggggaatctgggattcagggcttcagaggacagggagtttccagcaacatgagggaaataagcaaagagggcaatcgcctccttggaggctctggagacaattatagggggcaagggtcgagctggggcagtggaggaggtgacgctgttggtggagtcaatactgtgaactctgagacgtctcctgggatgtttaactttgacactttctggaagaattttaaatccaagctgggtttcatcaactgggatgccataaacaagaaccaggtcccgccccccagcacccgagccctcctctacttcagccgactctgggaggatttcaaacagaacactcctttcctcaactggaaagcaattattgagggtgcggacgcgtcatcactgcagaaacgtgcaggcagagacgatcagccgggtgcaggatggcaggaggtggcagctgtaacttccaagaactacaattacaaccagcatgcgtatcccactgcctatggtgggaagtactcagtcaagacccctgcaaaggggggagtctcaccttcttcctcggcttcccgggtgcaacctggcctgctgcagtgggtgaagttttggtaggcaatttcttgcaaccaccaccgaggccccgaaaagcactggtcgtcagggagctcctccccttggcc

SEQ ID NO: 126487 - DNA, 1111 bp, Homo sapiens
  Payload ID: 4799
  Gene Symbol: DMKN
  Gene Name: dermokine
  Uniprot ID: Q6E0U4
  ENST ID: ENST00000451297
  CDS Start-End: 1-1110
atgaagttccaggggcccctggcctgcctcctgctggccctctgcctgggcagtggggaggctggccccctgcagagcggagaggaaagcactgggacaaatattggggaggcccttggacatggcctgggagacgccctgagcgaaggggtgggaaaggccattggcaaagaggccggaggggcagctggctctaaagtcagtgaggcccttggccaagggaccagagaagcagttggcactggagtcaggcaggttccaggctttggcgtagcagatgctttgggcaacagggtcggggaagcagcccatgctctgggaaacactgggcacgagattggcagacaggcagaagatgtcattcgacacggagcagatgctgtccgcggctcctggcagggggtgcctggccacaatggtgcttgggaaacttctggaggccatggcatctttggctctcaaggtggccttggaggccagggccagggcaatcctggaggtctggggactccgtgggtccacggataccccggaaactcagcaggcagctttggaatgaatcctcagggagctccctggggtcaaggaggcaatggagggccaccaaactttgggaccaacactcagggagctgtggcccagcctggctatggttcagtgagagccagcaaccagaatgaagggtgcacgaatcccccaccatctggctcaggtggaggctccagcaactctgggggaggcagcggctcacagtcgggcagcagtggcagtggcagcaatggtgacaacaacaatggcagcagcagtggtggcagcagcagtggcagcagcagtggcggcagcagtggcggcagcagtggtggcagcagtggcaacagtggtggcagcagaggtgacagcggcagtgagtcctcctggggatccagcaccggctcctcctccggcaaccacggtgggagcggcggaggaaatggacataaacccgggaactctgagacgtctcctgggatgtttaactttgacactttctggaagaattttaaatccaagctgggtttcatcaactgggatgccataaacaaggaccagagaagctctcgcatcccgtgac

SEQ ID NO: 126488 - DNA, 848 bp, Homo sapiens
  Payload ID: 4799
  Gene Symbol: DMKN
  Gene Name: dermokine
  ENST ID: ENST00000436012
  CDS Start-End: 13-531
ctggccttctccatgctcggaataacttcctgcagcgaccaacaggctaaagagggggaaggtctggagggatccagcaccggctcctcctccggcaaccacggtgggagcggcggaggaaatggacataaacccgggaactctgagacgtctcctgggatgtttaactttgacactttctggaagaattttaaatccaagctgggtttcatcaactgggatgccataaacaagaaccaggtcccgccccccagcacccgagccctcctctacttcagccgactctgggaggatttcaaacagaacactcctttcctcaactggaaagcaattattgagggtgcggacgcgtcatcactgcagaaacgtgcaggcagagacgatcagaactacaattacaaccagcatgcgtatcccactgcctatggtgggaagtactcagtcaagacccctgcaaaggggggagtctcaccttcttcctcggcttcccgggtgcaacctggcctgctgcagtgggtgaagttttggtaggcaatttcttgcaaccaccaccgaggccccgaaaagcactggtcgtcagggagctcctccccttggcccccagcctgtgccagccctggcccggctgccacacctctgtttcctaggctggggacccagcttgtctctccttgtttcttcccactgcactgtggtgcttcagtggccaccagcctcgtcacatacaccagcatctttctgtacctcctccctttggtgacctgaagtcactgtgacagttctccaggaaggaggagcttcctacttttgagtttctctgtggaaataaaacatgaatcttgtttccc

SEQ ID NO: 126489 - DNA, 1257 bp, Homo sapiens
  Payload ID: 4799
  Gene Symbol: DMKN
  Gene Name: dermokine
  Uniprot ID: Q6E0U4
  ENST ID: ENST00000418261
  CDS Start-End: 7-1167
gcagagatgaagttccaggggcccctggcctgcctcctgctggccctctgcctgggcagtggggaggctggccccctgcagagcggagaggaaagcactgggacaaatattggggaggcccttggacatggcctgggagacgccctgagcgaaggggtgggaaaggccattggcaaagaggccggaggggcagctggctctaaagtcagtgaggcccttggccaagggaccagagaagcagttggcactggagtcaggcaggttccaggctttggcgtagcagatgctttgggcaacagggtcggggaagcagcccatgctctgggaaacactgggcacgagattggcagacaggcagaagatgtcattcgacacggagcagatgctgtccgcggctcctggcagggggtgcctggccacaatggtgcttgggaaacttctggaggccatggcatctttggctctcaaggtggccttggaggccagggccagggcaatcctggaggtctggggactccgtgggtccacggataccccggaaactcagcaggcagctttggaatgaatcctcagggagctccctggggtcaaggaggcaatggagggccaccaaactttgggaccaacactcagggagctgtggcccagcctggctatggttcagtgagagccagcaaccagaatgaagggtgcacgaatcccccaccatctggctcaggtggaggctccagcaactctgggggaggcagcggctcacagtcgggcagcagtggcagtggcagcaatggtgacaacaacaatggcagcagcagtggtggcagcagcagtggcagcagcagtggcggcagcagtggcggcagcagtggtggcagcagtggcaacagtggtggcagcagaggtgacagcggcagtgagtcctcctggggatccagcaccggctcctcctccggcaaccacggtgggagcggcggaggaaatggacataaacccgggtgtgaaaagccagggaatgaagcccgcgggagcggggaatctgggattcagaactctgagacgtctcctgggatgtttaactttgacactttctggaagaattttaaatccaagctgggtttcatcaactgggatgccataaacaaggaccagagaagctctcgcatcccgtgacctccagacaaggagccaccagattggatgggagcccccacactccctccttaaaacaccaccctctcatcactaatctcagcccttgcc

SEQ ID NO: 126490 - DNA, 642 bp, Homo sapiens
  Payload ID: 4799
  Gene Symbol: DMKN
  Gene Name: dermokine
  ENST ID: ENST00000463292
  CDS Start-End: 82-192
ccggcctgcggtgggcagcagctcaggttctccaaatcattgcgtagttccgaataccctcggccacacctggccttctccatgctcggaataacttcctgcagcgaccaacaggctaaagagggggaagggatccagcaccggctcctcctccggcaaccacggtgggagcggcggaggaaatggacataaacccgggtgtgaaaagccagggaatgaagcccgcgggagcggggaatctgggattcagaactctgagacgtctcctgggatgtttaactttgacactttctggaagaattttaaatccaagctgggtttcatcaactgggatgccataaacaagaaccaggtcccgccccccagcacccgagccctcctctacttcagccgactctgggaggatttcaaacagaacactcctttcctcaactggaaagcaattattgagggtgcggacgcgtcatcactgcagaaacgtgcaggcagagacgatcagaactacaattacaaccagcatgcgtatcccactgcctatggtgggaagtactcagtcaagacccctgcaaaggggggagtctcaccttcttcctcggcttcccgggtgcaacctggcctgctgcagtgggtgaagttttggta

SEQ ID NO: 126491 - DNA, 666 bp, Homo sapiens
  Payload ID: 4799
  Gene Symbol: DMKN
  Gene Name: dermokine
  ENST ID: ENST00000498211
  CDS Start-End: 9-119
ccttctccatgctcggaataacttcctgcagcgaccaacaggctaaagagggggaagggatccagcaccggctcctcctccggcaaccacggtgggagcggcggaggaaatggacataaacccgggtgtgaaaagccagggaatgaagcccgcgggagcggggaatctgggattcagggcttcagaggacagggagtttccagcaacatgagggggcaagggtcgagctggggcagtggaggaggtgacgctgttggtggagtcaatactgtgaactctgagacgtctcctgggatgtttaactttgacactttctggaagaattttaaatccaagctgggtttcatcaactgggatgccataaacaagaaccaggtcccgccccccagcacccgagccctcctctacttcagccgactctgggaggatttcaaacagaacactcctttcctcaactggaaagcaattattgagggtgcggacgcgtcatcactgcagaaacgtgcaggcagagacgatcagaactacaattacaaccagcatgcgtatcccactgcctatggtgggaagtactcagtcaagacccctgcaaaggggggagtctcaccttcttcctcggcttcccgggtgcaacctggcctgctgcagtgggtgaagttttggtag

SEQ ID NO: 126492 - DNA, 505 bp, Homo sapiens
  Payload ID: 4799
  Gene Symbol: DMKN
  Gene Name: dermokine
  ENST ID: ENST00000493517
  CDS Start-End: 44-154
attgcgtagttccgaataccctcggccacacctggccttctccatgctcggaataacttcctgcagcgaccaacaggctaaagagggggaagggatccagcaccggctcctcctccggcaaccacggtgggagcggcggaggaaatggacataaacccgggtgtgaaaagccagggaatgaagcccgcgggagcggggaatctgggattcagaactctgagacgtctcctgggatgtttaactttgacactttctggaagaattttaaatccaagctgggtttcatcaactgggatgccataaacaaggatttcaaacagaacactcctttcctcaactggaaagcaattattgagggtgcggacgcgtcatcactgcagaaacgtgcaggcagagacgatcagaactacaattacaaccagcatgcgtatcccactgcctatggtgggaagtactcagtcaagacccctgcaaaggtgagaccggcaaccaccctgtcttcccg

SEQ ID NO: 126493 - DNA, 754 bp, Homo sapiens
  Payload ID: 4799
  Gene Symbol: DMKN
  Gene Name: dermokine
  ENST ID: ENST00000464894
  CDS Start-End: 44-154
attgcgtagttccgaataccctcggccacacctggccttctccatgctcggaataacttcctgcagcgaccaacaggctaaagagggggaagggatccagcaccggctcctcctccggcaaccacggtgggagcggcggaggaaatggacataaacccgggtgtgaaaagccagggaatgaagcccgcgggagcggggaatctgggattcagggcttcagaggacagggagtttccagcaacatgagggaaataagcaaagagggcaatcgcctccttggaggctctggagacaattatagggggcaagggtcgagctggggcagtggaggaggtgacgctgttggtggagtcaatactgtgaactctgagacgtctcctgggatgtttaactttgacactttctggaagaattttaaatccaagctgggtttcatcaactgggatgccataaacaagaaccaggtcccgccccccagcacccgagccctcctctacttcagccgactctgggaggatttcaaacagaacactcctttcctcaactggaaagcaattattgagggtgcggacgcgtcatcactgcagaaacgtgcaggcagagacgatcagccgggtgcaggatggcaggaggtggcagctgtaacttccaagaactacaattacaaccagcatgcgtatcccactgcctatggtgggaagtactcagtcaagacccctgcaaaggtgagaccggcaaccaccctgtcttcccg

SEQ ID NO: 126494 - DNA, 609 bp, Homo sapiens
  Payload ID: 4799
  Gene Symbol: DMKN
  Gene Name: dermokine
  ENST ID: ENST00000498593
  CDS Start-End: 44-154
attgcgtagttccgaataccctcggccacacctggccttctccatgctcggaataacttcctgcagcgaccaacaggctaaagagggggaagggatccagcaccggctcctcctccggcaaccacggtgggagcggcggaggaaatggacataaacccgggtgtgaaaagccagggaatgaagcccgcgggagcggggaatctgggattcaggggcaagggtcgagctggggcagtggaggaggtgacgctgttggtggagtcaatactgtgaactctgagacgtctcctgggatgtttaactttgacactttctggaagaattttaaatccaagctgggtttcatcaactgggatgccataaacaagaaccaggtcccgccccccagcacccgagccctcctctacttcagccgactctgggaggatttcaaacagaacactcctttcctcaactggaaagcaattattgagggtgcggacgcgtcatcactgcagaaacgtgcaggcagagacgatcaggtgagtctctgtcctcaagttaccctgcagggcccttggtcccccttggccttgctcccgggtctgggcaatctgaaattctctttca

SEQ ID NO: 126495 - DNA, 691 bp, Homo sapiens
  Payload ID: 4799
  Gene Symbol: DMKN
  Gene Name: dermokine
  ENST ID: ENST00000488762
  CDS Start-End: 16-126
cacctggccttctccatgctcggaataacttcctgcagcgaccaacaggctaaagagggggaagggatccagcaccggctcctcctccggcaaccacggtgggagcggcggaggaaatggacataaacccgggaattttaaatccaagctgggtttcatcaactgggatgccataaacaagggtgcggacgcgtcatcactgcagaaacgtgcaggcagagacgatcagaactacaattacaaccagcatgcgtatcccactgcctatggtgggaagtactcagtcaagacccctgcaaaggggggagtctcaccttcttcctcggcttcccgggtgcaacctggcctgctgcagtgggtgaagttttggtaggcaatttcttgcaaccaccaccgaggccccgaaaagcactggtcgtcagggagctcctccccttggcccccagcctgtgccagccctggcccggctgccacacctctgtttcctaggctggggacccagcttgtctctccttgtttcttcccactgcactgtggtgcttcagtggccaccagcctcgtcacatacaccagcatctttctgtacctcctccctttggtgacctgaagtcactgtgacagttctccaggaaggaggagcttcctacttttgagtttctctgtggaaataaaacatgaatcttgtttccct

SEQ ID NO: 126496 - DNA, 1579 bp, Homo sapiens
  Payload ID: 4799
  Gene Symbol: DMKN
  Gene Name: dermokine
  ENST ID: ENST00000490622
  CDS Start-End: 44-154
attgcgtagttccgaataccctcggccacacctggccttctccatgctcggaataacttcctgcagcgaccaacaggctaaagagggggaagggatccagcaccggctcctcctccggcaaccacggtgggagcggcggaggaaatggacataaacccgggtgtgaaaagccagggaatgaagcccgcgggagcggggaatctgggattcagaactctgagacgtctcctgggatgtttaactttgacactttctggaagaattttaaatccaagctgggtttcatcaactgggatgccataaacaagaaccaggtcccgccccccagcacccgagccctcctctacttcagccgactctgggaggatttcaaacagaacactcctttcctcaactggaaagcaattattgagggtgcggacgcgtcatcactgcagaaacgtgcaggcagagacgatcaggtgagtctctgtcctcaagttaccctgcagggcccttggtcccccttggccttgctcccgggtctgggcaatctgaaattctctttcactcctccattcaatggctttctcagccgggtgcaggatggcaggaggtggcagctgtaacttccaaggtgagacatctaccatggacccgctgggttacgtcctggcacttcttttcttggtctcctaccctcacctcccaagtaacacttgaagagttggcagaggtcttgagggcaggaggaggagtaggaggaggaggcggcggccatttgggctaggacagtaaaggcaggtgagggtgggggccctggctggctggaggagattgtataaaagaaaacacgtgacacaaggaggggagcaggcaggtgttttaggaaaggtctggtccaggcaggaaggtgggatgtttattccagagcaaaatggccttcgtccgtctgttctaaccgccatgcccacttcttccacagaactacaattacaaccagcatgcgtatcccactgcctatggtgggaagtactcagtcaagacccctgcaaaggggggagtctcaccttcttcctcggcttcccgggtgcaacctggcctgctgcagtgggtgaagttttggtaggtgagtgtcagagtgagccgacccaggccacatcctggcagtggaggcacagtcacccggggcagggccaggatcttggtatatcctcagatctcagtgggcagcgacatgaagtcaggcggagcaaaagtgaggggcaccacaggcgaacaggcaatttcttgcaaccaccaccgaggccccgaaaagcactggtcgtcagggagctcctccccttggcccccagcctgtgccagccctggcccggctgccacacctctgtttcctaggctggggacccagcttgtctctccttgtttcttcccactgcactgtggtgcttcagtggccaccagcctcgtcacatacaccagcatctttctgtacctcctccctttggtgacctgaagtcactgtgacagttctccaggaaggaggagcttcctacttttgagtttctctgtggaaataaaacatgaatcttgtttccct

SEQ ID NO: 126497 - DNA, 877 bp, Homo sapiens
  Payload ID: 4799
  Gene Symbol: DMKN
  Gene Name: dermokine
  ENST ID: ENST00000467532
  CDS Start-End: 9-119
ccttctccatgctcggaataacttcctgcagcgaccaacaggctaaagagggggaagggatccagcaccggctcctcctccggcaaccacggtgggagcggcggaggaaatggacataaacccgggaactctgagacgtctcctgggatgtttaactttgacactttctggaagaattttaaatccaagctgggtttcatcaactgggatgccataaacaagaaccaggtcccgccccccagcacccgagccctcctctacttcagccgactctgggaggatttcaaacagaacactcctttcctcaactggaaagcaattattgagggtgcggacgcgtcatcactgcagaaacgtgcaggcagagacgatcagccgggtgcaggatggcaggaggtggcagctgtaacttccaagaactacaattacaaccagcatgcgtatcccactgcctatggtgggaagtactcagtcaagacccctgcaaaggggggagtctcaccttcttcctcggcttcccgggtgcaacctggcctgctgcagtgggtgaagttttggtaggcaatttcttgcaaccaccaccgaggccccgaaaagcactggtcgtcagggagctcctccccttggcccccagcctgtgccagccctggcccggctgccacacctctgtttcctaggctggggacccagcttgtctctccttgtttcttcccactgcactgtggtgcttcagtggccaccagcctcgtcacatacaccagcatctttctgtacctcctccctttggtgacctgaagtcactgtgacagttctccaggaaggaggagcttcctacttttgagtttctctgtggaaataaaacatgaatcttgtttcc

SEQ ID NO: 126498 - DNA, 441 bp, Homo sapiens
  Payload ID: 4799
  Gene Symbol: DMKN
  Gene Name: dermokine
  ENST ID: ENST00000480507
  CDS Start-End: 84-194
ccccggcctgcggtgggcagcagctcaggttctccaaatcattgcgtagttccgaataccctcggccacacctggccttctccatgctcggaataacttcctgcagcgaccaacaggctaaagagggggaagggatccagcaccggctcctcctccggcaaccacggtgggagcggcggaggaaatggacataaacccgggaactctgagacgtctcctgggatgtttaactttgacactttctggaagaattttaaatccaagctgggtttcatcaactgggatgccataaacaaggaccagagaagctctcgcatcccgtgacctccagacaaggagccaccagattggatgggagcccccacactccctccttaaaacaccaccctctcatcactaatctcagcccttgcccttgaaataaaccttagctgccccaca

SEQ ID NO: 126499 - DNA, 970 bp, Homo sapiens
  Payload ID: 4799
  Gene Symbol: DMKN
  Gene Name: dermokine
  ENST ID: ENST00000462721
  CDS Start-End: 13-123
ctggccttctccatgctcggaataacttcctgcagcgaccaacaggctaaagagggggaagggatccagcaccggctcctcctccggcaaccacggtgggagcggcggaggaaatggacataaacccgggtgtgaaaagccagggaatgaagcccgcgggagcggggaatctgggattcagaactctgagacgtctcctgggatgtttaactttgacactttctggaagaattttaaatccaagctgggtttcatcaactgggatgccataaacaagaaccaggtcccgccccccagcacccgagccctcctctacttcagccgactctgggaggatttcaaacagaacactcctttcctcaactggaaagcaattattgagggtgcggacgcgtcatcactgcagaaacgtgcaggcagagacgatcagccgggtgcaggatggcaggaggtggcagctgtaacttccaagaactacaattacaaccagcatgcgtatcccactgcctatggtgggaagtactcagtcaagacccctgcaaaggggggagtctcaccttcttcctcggcttcccgggtgcaacctggcctgctgcagtgggtgaagttttggtaggcggagcaaaagtgaggggcaccacaggcgaacaggcaatttcttgcaaccaccaccgaggccccgaaaagcactggtcgtcagggagctcctccccttggcccccagcctgtgccagccctggcccggctgccacacctctgtttcctaggctggggacccagcttgtctctccttgtttcttcccactgcactgtggtgcttcagtggccaccagcctcgtcacatacaccagcatctttctgtacctcctccctttggtgacctgaagtcactgtgacagttctccaggaaggaggagcttcctacttttgagtttctctgtggaaataaaacatgaatcttgtttcccta

SEQ ID NO: 126500 - DNA, 827 bp, Homo sapiens
  Payload ID: 4799
  Gene Symbol: DMKN
  Gene Name: dermokine
  ENST ID: ENST00000467637
  CDS Start-End: 20-625
gccacacctggccttctccatgctcggaataacttcctgcagcgaccaacaggctaaagagggggaaggtctggagggatccagcaccggctcctcctccggcaaccacggtgggagcggcggaggaaatggacataaacccgggtgtgaaaagccagggaatgaagcccgcgggagcggggaatctgggattcagggcttcagaggacagggagtttccagcaacatgaggaactctgagacgtctcctgggatgtttaactttgacactttctggaagaattttaaatccaagctgggtttcatcaactgggatgccataaacaagaaccaggtcccgccccccagcacccgagccctcctctacttcagccgactctgggaggatttcaaacagaacactcctttcctcaactggaaagcaattattgagggtgcggacgcgtcatcactgcagaaacgtgcaggcagagacgatcagaactacaattacaaccagcatgcgtatcccactgcctatggtgggaagtactcagtcaagacccctgcaaaggggggagtctcaccttcttcctcggcttcccgggtgcaacctggcctgctgcagtgggtgaagttttggtaggcaatttcttgcaaccaccaccgaggccccgaaaagcactggtcgtcagggagctcctccccttggcccccagcctgtgccagccctggcccggctgccacacctctgtttcctaggctggggacccagcttgtctctccttgtttcttcccactgcactgtggtgcttcagtggccaccagcctcgtcacatacaccagca

SEQ ID NO: 126501 - DNA, 630 bp, Homo sapiens
  Payload ID: 4799
  Gene Symbol: DMKN
  Gene Name: dermokine
  ENST ID: ENST00000460051
  CDS Start-End: 9-119
ccttctccatgctcggaataacttcctgcagcgaccaacaggctaaagagggggaagggatccagcaccggctcctcctccggcaaccacggtgggagcggcggaggaaatggacataaacccgggtgtgaaaagccagggaatgaagcccgcgggagcggggaatctgggattcaggggcaagggtcgagctggggcagtggaggaggtgacgctgttggtggagtcaatactgtgaactctgagacgtctcctgggatgtttaactttgacactttctggaagaattttaaatccaagctgggtttcatcaactgggatgccataaacaagaaccaggtcccgccccccagcacccgagccctcctctacttcagccgactctgggaggatttcaaacagaacactcctttcctcaactggaaagcaattattgagggtgcggacgcgtcatcactgcagaaacgtgcaggcagagacgatcagaactacaattacaaccagcatgcgtatcccactgcctatggtgggaagtactcagtcaagacccctgcaaaggggggagtctcaccttcttcctcggcttcccgggtgcaacctggcctgctgcagtgggtgaagttttggtag

SEQ ID NO: 126502 - DNA, 822 bp, Homo sapiens
  Payload ID: 4799
  Gene Symbol: DMKN
  Gene Name: dermokine
  ENST ID: ENST00000464709
  CDS Start-End: 9-119
ccttctccatgctcggaataacttcctgcagcgaccaacaggctaaagagggggaagggatccagcaccggctcctcctccggcaaccacggtgggagcggcggaggaaatggacataaacccgggtgtgaaaagccagggaatgaagcccgcgggagcggggaatctgggattcagggcttcagaggacagggagtttccagcaacatgagggcaagtcagctaacctctccgagcctgagcttcctccagtaaaatgaggacagtgaaacctgactcacgcagccttcagttactgtacagctttccatgtcaccaccagaccaaggtgttgtggagtccagactctggagacagatgctgcataaggggcaagggtcgagctggggcagtggaggaggtgacgctgttggtggagtcaatactgtgaactctgagacgtctcctgggatgtttaactttgacactttctggaagaattttaaatccaagctgggtttcatcaactgggatgccataaacaagaaccaggtcccgccccccagcacccgagccctcctctacttcagccgactctgggaggatttcaaacagaacactcctttcctcaactggaaagcaattattgagggtgcggacgcgtcatcactgcagaaacgtgcaggcagagacgatcagaactacaattacaaccagcatgcgtatcccactgcctatggtgggaagtactcagtcaagacccctgcaaaggggggagtctcaccttcttcctcggcttcccgggtgcaacctggcctgctgcagtgggtgaagttttggtag

SEQ ID NO: 126503 - DNA, 324 bp, Homo sapiens
  Payload ID: 4799
  Gene Symbol: DMKN
  Gene Name: dermokine
  ENST ID: ENST00000601650
  CDS Start-End: 1-324
gccggccactgcctctgctctgctcctgctcctgctgggcctggcctggacccaggggagccacggctgggtgggtaccgcagggtgcacagggtgcggacgcgtcatcactgcagaaacgtgcaggcagagacgatcagaactacaattacaaccagcatgcgtatcccactgcctatggtgggaagtactcagtcaagacccctgcaaaggggggagtctcaccttcttcctcggcttcccgggtgcaacctggcctgctgcagtgggtgaagttttggtaggcaatttcttgcaaccaccaccgaggccccgaaaagcact

SEQ ID NO: 126504 - DNA, 648 bp, Homo sapiens
  Payload ID: 4799
  Gene Symbol: DMKN
  Gene Name: dermokine
  ENST ID: ENST00000493979
  CDS Start-End: 9-119
ccttctccatgctcggaataacttcctgcagcgaccaacaggctaaagagggggaagggatccagcaccggctcctcctccggcaaccacggtgggagcggcggaggaaatggacataaacccgggtgtgaaaagccagggaatgaagcccgcgggagcggggaatctgggattcagggcttcagaggacagggagtttccagcaacatgaggaactctgagacgtctcctgggatgtttaactttgacactttctggaagaattttaaatccaagctgggtttcatcaactgggatgccataaacaagaaccaggtcccgccccccagcacccgagccctcctctacttcagccgactctgggaggatttcaaacagaacactcctttcctcaactggaaagcaattattgagggtgcggacgcgtcatcactgcagaaacgtgcaggcagagacgatcagccgggtgcaggatggcaggaggtggcagctgtaacttccaagaactacaattacaaccagcatgcgtatcccactgcctatggtgggaagtactcagtcaagacccctgcaaaggggggagtctcaccttcttcctcggcttcccgggtgcaacctggcctgctgcagtgggtgaagttttggtag

SEQ ID NO: 126505 - DNA, 271 bp, Homo sapiens
  Payload ID: 4799
  Gene Symbol: DMKN
  Gene Name: dermokine
  ENST ID: ENST00000593342
  CDS Start-End: 1-224
ctgctctgctcctgctcctgctgggcctggcctggacccaggggagccacggctggggtgcggacgcgtcatcactgcagaaacgtgcaggcagagacgatcagaactacaattacaaccagcatgcgtatcccactgcctatggtgggaagtactcagtcaagacccctgcaaaggcttcccgggtgcaacctggcctgctgcagtgggtgaagttttggtaggcaatttcttgcaaccaccaccgaggccccgaaaagcactggtcgtc

SEQ ID NO: 126506 - DNA, 606 bp, Homo sapiens
  Payload ID: 4799
  Gene Symbol: DMKN
  Gene Name: dermokine
  ENST ID: ENST00000483855
  CDS Start-End: 9-119
ccttctccatgctcggaataacttcctgcagcgaccaacaggctaaagagggggaagggatccagcaccggctcctcctccggcaaccacggtgggagcggcggaggaaatggacataaacccgggtgtgaaaagccagggaatgaagcccgcgggagcggggaatctgggattcagggcttcagaggacagggagtttccagcaacatgaggaactctgagacgtctcctgggatgtttaactttgacactttctggaagaattttaaatccaagctgggtttcatcaactgggatgccataaacaagaaccaggtcccgccccccagcacccgagccctcctctacttcagccgactctgggaggatttcaaacagaacactcctttcctcaactggaaagcaattattgagggtgcggacgcgtcatcactgcagaaacgtgcaggcagagacgatcagaactacaattacaaccagcatgcgtatcccactgcctatggtgggaagtactcagtcaagacccctgcaaaggggggagtctcaccttcttcctcggcttcccgggtgcaacctggcctgctgcagtgggtgaagttttggtag

SEQ ID NO: 126507 - DNA, 582 bp, Homo sapiens
  Payload ID: 4799
  Gene Symbol: DMKN
  Gene Name: dermokine
  ENST ID: ENST00000462538
  CDS Start-End: 84-194
ccccggcctgcggtgggcagcagctcaggttctccaaatcattgcgtagttccgaataccctcggccacacctggccttctccatgctcggaataacttcctgcagcgaccaacaggctaaagagggggaagggatccagcaccggctcctcctccggcaaccacggtgggagcggcggaggaaatggacataaacccgggtgtgaaaagccagggaatgaagcccgcgggagcggggaatctgggattcagggcttcagaggacagggagtttccagcaacatgagggaaataagcaaagagggcaatcgcctccttggaggctctggagacaattataggaactctgagacgtctcctgggatgtttaactttgacactttctggaagaattttaaatccaagctgggtttcatcaactgggatgccataaacaaggaccagagaagctctcgcatcccgtgacctccagacaaggagccaccagattggatgggagcccccacactccctccttaaaacaccaccctctcatcactaatctcagcccttgcccttgaaataaaccttagctgccccaca

SEQ ID NO: 126508 - DNA, 712 bp, Homo sapiens
  Payload ID: 4799
  Gene Symbol: DMKN
  Gene Name: dermokine
  ENST ID: ENST00000476246
  CDS Start-End: 26-136
ccctcggccacacctggccttctccatgctcggaataacttcctgcagcgaccaacaggctaaagagggggaagggatccagcaccggctcctcctccggcaaccacggtgggagcggcggaggaaatggacataaacccgggtgtgaaaagccagggaatgaagcccgcgggagcggggaatctgggattcagaactctgagacgtctcctgggatgtttaactttgacactttctggaagaattttaaatccaagctgggtttcatcaactgggatgccataaacaaggatttcaaacagaacactcctttcctcaactggaaagcaattattgagggtgcggacgcgtcatcactgcagaaacgtgcaggcagagacgatcaggtgagtctctgtcctcaagttaccctgcagggcccttggtcccccttggccttgctcccgggtctgggcaatctgaaattctctttcactcctccattcaatggctttctcagccgggtgcaggatggcaggaggtggcagctgtaacttccaaggtgagacatctaccatggacccgctgggttacgtcctggcacttcttttcttggtctcctaccctcacctcccaagtaacacttgaagagttggcagaggtcttgagggcaggaggaggagtaggaggaggaggcggcggccatttgggctaggacagtaaaggcaggtga

SEQ ID NO: 126509 - DNA, 820 bp, Homo sapiens
  Payload ID: 4799
  Gene Symbol: DMKN
  Gene Name: dermokine
  ENST ID: ENST00000480502
  CDS Start-End: 33-587
ccgaataccctcggccacacctggccttctccatgctcggaataacttcctgcagcgaccaacaggctaaagagggggaaggtctggagggatccagcaccggctcctcctccggcaaccacggtgggagcggcggaggaaatggacataaacccgggtgtgaaaagccagggaatgaagcccgcgggagcggggaatctgggattcagaactctgagacgtctcctgggatgtttaactttgacactttctggaagaattttaaatccaagctgggtttcatcaactgggatgccataaacaaggatttcaaacagaacactcctttcctcaactggaaagcaattattgagggtgcggacgcgtcatcactgcagaaacgtgcaggcagagacgatcagccgggtgcaggatggcaggaggtggcagctgtaacttccaagaactacaattacaaccagcatgcgtatcccactgcctatggtgggaagtactcagtcaagacccctgcaaaggggggagtctcaccttcttcctcggcttcccgggtgcaacctggcctgctgcagtgggtgaagttttggtaggcaatttcttgcaaccaccaccgaggccccgaaaagcactggtcgtcagggagctcctccccttggcccccagcctgtgccagccctggcccggctgccacacctctgtttcctaggctggggacccagcttgtctctccttgtttcttcccactgcactgtggtgcttcagtggccaccagcctcgtcacatacaccagcatctttctgtacctcctccctttggtgacctg

SEQ ID NO: 126510 - DNA, 414 bp, Homo sapiens
  Payload ID: 4799
  Gene Symbol: DMKN
  Gene Name: dermokine
  ENST ID: ENST00000488892
  CDS Start-End: 49-297
aaatcattgcgtagttccgaataccctcggccacacctggccttctccatgctcggaataacttcctgcagcgaccaacaggctaaagagggggaaggtctggagggatccagcaccggctcctcctccggcaaccacggtgggagcggcggaggaaatggacataaacccgggaactctgagacgtctcctgggatgtttaactttgacactttctggaagaattttaaatccaagctgggtttcatcaactgggatgccataaacaaggaccagagaagctctcgcatcccgtgacctccagacaaggagccaccagattggatgggagcccccacactccctccttaaaacaccaccctctcatcactaatctcagcccttgcccttgaaataaaccttagctgccccaca

SEQ ID NO: 126511 - DNA, 557 bp, Homo sapiens
  Payload ID: 4799
  Gene Symbol: DMKN
  Gene Name: dermokine
  ENST ID: ENST00000602679
  CDS Start-End: 274-557
gggaaggtctggaggttggaaagaggactggaatctgattggggttccaacaaatctgtaacaccgctgggaacgactgggtcccctttaggtcctttaggacagcgtttgaaatcttgctttcccctgcagggatccagcaccggctcctcctccggcaaccacggtgggagcggcggaggaaatggacataaacccgggtgtgaaaagccagggaatgaagcccgcgggagcggggaatctgggattcagaactctgagacgtctcctgggatgtttaactttgacactttctggaagaattttaaatccaagctgggtttcatcaactgggatgccataaacaagaaccaggtcccgccccccagcacccgagccctcctctacttcagccgactctgggaggatttcaaacagaacactcctttcctcaactggaaagcaattattgagggtgcggacgcgtcatcactgcagaaacgtgcaggcagagacgatcagaactacaattacaaccagcatgcgtatcccactgcctatggtgggaagtactcagt

SEQ ID NO: 126512 - DNA, 593 bp, Homo sapiens
  Payload ID: 4799
  Gene Symbol: DMKN
  Gene Name: dermokine
  Uniprot ID: Q6E0U4
  ENST ID: ENST00000472252
  CDS Start-End: 138-509
gctcggaataacttcctgcagcgaccaacaggctaaagagggggaagggatccagcaccggctcctcctccggcaaccacggtgggagcggcggaggaaatggacataaacccgggaactctgagacgtctcctgggatgtttaactttgacactttctggaagaattttaaatccaagctgggtttcatcaactgggatgccataaacaagaaccaggtcccgccccccagcacccgagccctcctctacttcagccgactctgggaggatttcaaacagaacactcctttcctcaactggaaagcaattattgagggtgcggacgcgtcatcactgcagaaacgtgcaggcagagacgatcagaactacaattacaaccagcatgcgtatcccactgcctatggtgggaagtactcagtcaagacccctgcaaaggggggagtctcaccttcttcctcggcttcccgggtgcaacctggcctgctgcagtgggtgaagttttggtaggcggagcaaaagtgaggggcaccacaggcgaacaggcaatttcttgcaaccaccaccgaggccccgaaaagcactggtcgtcag

SEQ ID NO: 126513 - DNA, 827 bp, Homo sapiens
  Payload ID: 4799
  Gene Symbol: DMKN
  Gene Name: dermokine
  ENST ID: ENST00000602781
  CDS Start-End: 2-613
catgctcggaataacttcctgcagcgaccaacaggctaaagagggggaaggtctggagggatccagcaccggctcctcctccggcaaccacggtgggagcggcggaggaaatggacataaacccgggtgtgaaaagccagggaatgaagcccgcgggagcggggaatctgggattcagaactctgagacgtctcctgggatgtttaactttgacactttctggaagaattttaaatccaagctgggtttcatcaactgggatgccataaacaagaaccaggtcccgccccccagcacccgagccctcctctacttcagccgactctgggaggatttcaaacagaacactcctttcctcaactggaaagcaattattgagggtgcggacgcgtcatcactgcagaaacgtgcaggcagagacgatcagccgggtgcaggatggcaggaggtggcagctgtaacttccaagaactacaattacaaccagcatgcgtatcccactgcctatggtgggaagtactcagtcaagacccctgcaaaggggggagtctcaccttcttcctcggcttcccgggtgcaacctggcctgctgcagtgggtgaagttttggtaggtgagtgtcagagtgagccgacccaggccacatcctggcagtggaggcacagtcacccggggcagggccaggatcttggtatatcctcagatctcagtgggcagcgacatgaagtcaggtatgctctgggtgcgtgctctaaaggtgataaggaagaggggacctcatggtggggtgtggagaaagacccataataaagtgatctagggctggg

SEQ ID NO: 126514 - DNA, 762 bp, Homo sapiens
  Payload ID: 4799
  Gene Symbol: DMKN
  Gene Name: dermokine
  ENST ID: ENST00000460327
  CDS Start-End: 1-290
tcccgccccccagcacccgagccctcctctacttcagccgactctgggaggatttcaaacagaacactcctttcctcaactggaaagcaattattgagggtgcggacgcgtcatcactgcagaaacgtgcaggcagagacgatcagaactacaattacaaccagcatgcgtatcccactgcctatggtgggaagtactcagtcaagacccctgcaaaggggggagtctcaccttcttcctcggcttcccgggtgcaacctggcctgctgcagtgggtgaagttttggtaggtgagtgtcagagtgagccgacccaggccacatcctggcagtggaggcacagtcacccggggcagggccaggatcttggtatatcctcagatctcagtgggcagcgacatgaagtcaggcggagcaaaagtgaggggcaccacaggcgaacaggcaatttcttgcaaccaccaccgaggccccgaaaagcactggtcgtcagggagctcctccccttggcccccagcctgtgccagccctggcccggctgccacacctctgtttcctaggctggggacccagcttgtctctccttgtttcttcccactgcactgtggtgcttcagtggccaccagcctcgtcacatacaccagcatctttctgtacctcctccctttggtgacctgaagtcactgtgacagttctccaggaaggaggagcttcctacttttgagtttctctgtggaaataaaacatgaatcttgtttcccta

SEQ ID NO: 126515 - DNA, 567 bp, Homo sapiens
  Payload ID: 4799
  Gene Symbol: DMKN
  Gene Name: dermokine
  ENST ID: ENST00000461300
  CDS Start-End: 349-450
ccccggcctgcggtgggcagcagctcaggttctccaaatcattgcgtagttccgaataccctcggccacacctggccttctccatgctcggaataacttcctgcagcgaccaacaggctaaagagggggaaggtctggaggttggaaagaggactggaatctgattggggttccaacaaatctgtaacaccgctgggaacgactgggtcccctttaggtcctttaggacagcgtttgaaatcttgctttcccctgcagggatccagcaccggctcctcctccggcaaccacggtgggagcggcggaggaaatggacataaacccgggaactctgagacgtctcctgggatgtttaactttgacactttctggaagaattttaaatccaagctgggtttcatcaactgggatgccataaacaaggaccagagaagctctcgcatcccgtgacctccagacaaggagccaccagattggatgggagcccccacactccctccttaaaacaccaccctctcatcactaatctcagcccttgcccttgaaataaaccttagctgccccaca

SEQ ID NO: 126516 - DNA, 577 bp, Homo sapiens
  Payload ID: 4799
  Gene Symbol: DMKN
  Gene Name: dermokine
  ENST ID: ENST00000474928
  CDS Start-End: 359-460
ttgcgtagttccgaataccctcggccacacctggccttctccatgctcggaataacttcctgcagcgaccaacaggctaaagagggggaaggtctggaggttggaaagaggactggaatctgattggggttccaacaaatctgtaacaccgctgggaacgactgggtcccctttaggtcctttaggacagcgtttgaaatcttgctttcccctgcagggatccagcaccggctcctcctccggcaaccacggtgggagcggcggaggaaatggacataaacccgggtgtgaaaagccagggaatgaagcccgcgggagcggggaatctgggattcagaactctgagacgtctcctgggatgtttaactttgacactttctggaagaattttaaatccaagctgggtttcatcaactgggatgccataaacaaggaccagagaagctctcgcatcccgtgacctccagacaaggagccaccagattggatgggagcccccacactccctccttaaaacaccaccctctcatcactaatctcagcccttgcccttgaaataaaccttagctgccccaca

SEQ ID NO: 126517 - DNA, 738 bp, Homo sapiens
  Payload ID: 4799
  Gene Symbol: DMKN
  Gene Name: dermokine
  Uniprot ID: Q6E0U4
  ENST ID: ENST00000492341
  CDS Start-End: 249-620
ctgcagcgaccaacaggctaaagagggggaaggtctggaggttggaaagaggactggaatctgattggggttccaacaaatctgtaacaccgctgggaacgactgggtcccctttaggtcctttaggacagcgtttgaaatcttgctttcccctgcagggatccagcaccggctcctcctccggcaaccacggtgggagcggcggaggaaatggacataaacccgggaactctgagacgtctcctgggatgtttaactttgacactttctggaagaattttaaatccaagctgggtttcatcaactgggatgccataaacaagaaccaggtcccgccccccagcacccgagccctcctctacttcagccgactctgggaggatttcaaacagaacactcctttcctcaactggaaagcaattattgagggtgcggacgcgtcatcactgcagaaacgtgcaggcagagacgatcagaactacaattacaaccagcatgcgtatcccactgcctatggtgggaagtactcagtcaagacccctgcaaaggggggagtctcaccttcttcctcggcttcccgggtgcaacctggcctgctgcagtgggtgaagttttggtaggtgagtgtcagagtgagccgacccaggccacatcctggcagtggaggcacagtcacccggggcagggccaggatcttggtatatcctcagatctcagtgggcagcgacatgaagtcag

SEQ ID NO: 126518 - DNA, 638 bp, Homo sapiens
  Payload ID: 4799
  Gene Symbol: DMKN
  Gene Name: dermokine
  ENST ID: ENST00000597212
  CDS Start-End: 1-459
tccagcaccggctcctcctccggcaaccacggtgggagcggcggaggaaatggacataaacccgggaactctgagacgtctcctgggatgtttaactttgacactttctggaagaattttaaatccaagctgggtttcatcaactgggatgccataaacaagaaccaggtcccgccccccagcacccgagccctcctctacttcagccgactctgggaggatttcaaacagaacactcctttcctcaactggaaagcaattattgagggtgcggacgcgtcatcactgcagaaacgtgcaggcagagacgatcagaactacaattacaaccagcatgcgtatcccactgcctatggtgggaagtactcagtcaagacccctgcaaaggggggagtctcaccttcttcctcggcttcccgggtgcaacctggcctgctgcagtgggtgaagttttggtaggtgagtgtcagagtgagccgacccaggccacatcctggcagtggaggcacagtcacccggggcagggccaggatcttggtatatcctcagatctcagtgggcagcgacatgaagtcaggcaatttcttgcaaccaccaccgaggccccgaaaagcactggtcgtcagggagctcctccc

SEQ ID NO: 126519 - DNA, 351 bp, Homo sapiens
  Payload ID: 4799
  Gene Symbol: DMKN
  Gene Name: dermokine
  ENST ID: ENST00000595571
  CDS Start-End: 1-111
tccggcaaccacggtgggagcggcggaggaaatggacataaacccgggatctcccgactctggctcacaaagtgggttcttctctcatcccatatctccttggttccatagaactctgagacgtctcctgggatgtttaactttgacactttctggaagaattttaaatccaagctgggtttcatcaactgggatgccataaacaaggaccagagaagctctcgcatcccgtgacctccagacaaggagccaccagattggatgggagcccccacactccctccttaaaacaccaccctctcatcactaatctcagcccttgcccttgaaataaaccttagctgccccaca

SEQ ID NO: 126520 - DNA, 370 bp, Homo sapiens
  Payload ID: 4799
  Gene Symbol: DMKN
  Gene Name: dermokine
  ENST ID: ENST00000470746
  CDS Start-End: 10-120
gccttctccatgctcggaataacttcctgcagcgaccaacaggctaaagagggggaagggatccagcaccggctcctcctccggcaaccacggtgggagcggcggaggaaatggacataaacccgggtgtgaaaagccagggaatgaagcccgcgggagcggggaatctgggattcagaattttaaatccaagctgggtttcatcaactgggatgccataaacaaggaccagagaagctctcgcatcccgtgacctccagacaaggagccaccagattggatgggagcccccacactccctccttaaaacaccaccctctcatcactaatctcagcccttgcccttgaaataaaccttagctgccccaca

SEQ ID NO: 126521 - DNA, 1936 bp, Homo sapiens
  Payload ID: 4800
  Gene Symbol: DHH
  Gene Name: desert hedgehog
  Uniprot ID: O43323
  ENST ID: ENST00000266991
  CDS Start-End: 308-1498
gtccggagtccgggcgttctggcagcaccagagtcctgcagcagagacgggctgggctggcactcacccacgaccccccttccctgctatgatggtttgtcagtagcaggtcctagacaccccccgcccgctcccggggcacgtgggcagagctagcagcagccaggtgcacggagccacaagagctctagggcactctgggggcagctgtgcctgctgccctctctggtgcctgtggagatgcctaactgacaggagagttagtgaggacaagaacgctcccttttggccgaggtccgctgtatccatggctctcctgaccaatctactgcccctgtgctgcttggcacttctggcgctgccagcccagagctgcgggccgggccgggggccggttggccggcgccgctatgcgcgcaagcagctcgtgccgctactctacaagcaatttgtgcccggcgtgccagagcggaccctgggcgccagtgggccagcggaggggagggtggcaaggggctccgagcgcttccgggacctcgtgcccaactacaaccccgacatcatcttcaaggatgaggagaacagtggagccgaccgcctgatgaccgagcgttgtaaggagcgggtgaacgctttggccattgccgtgatgaacatgtggcccggagtgcgcctacgagtgactgagggctgggacgaggacggccaccacgctcaggattcactccactacgaaggccgtgctttggacatcactacgtctgaccgcgaccgcaacaagtatgggttgctggcgcgcctcgcagtggaagccggcttcgactgggtctactacgagtcccgcaaccacgtccacgtgtcggtcaaagctgataactcactggcggtccgggcgggcggctgctttccgggaaatgcaactgtgcgcctgtggagcggcgagcggaaagggctgcgggaactgcaccgcggagactgggttttggcggccgatgcgtcaggccgggtggtgcccacgccggtgctgctcttcctggaccgggacttgcagcgccgggcttcatttgtggctgtggagaccgagtggcctccacgcaaactgttgctcacgccctggcacctggtgtttgccgctcgagggccggcgcccgcgccaggcgactttgcaccggtgttcgcgcgccggctacgcgctggggactcggtgctggcgcccggcggggatgcgcttcggccagcgcgcgtggcccgtgtggcgcgggaggaagccgtgggcgtgttcgcgccgctcaccgcgcacgggacgctgctggtgaacgatgtcctggcctcttgctacgcggttctggagagtcaccagtgggcgcaccgcgcttttgcccccttgagactgctgcacgcgctaggggcgctgctccccggcggggccgtccagccgactggcatgcattggtactctcggctcctctaccgcttagcggaggagctactgggctgagcgtcccaggcatagaaacctcgaagcgcccgaggaaacgagggcctgctggctgagatatggggctgtgggcagcagacgatgccgactggaagggagggagagggagggggagggagaaaatggggctatgcctggcttaggggcaacctcgtactgagaggaggtgataccgggtcctaggtaggtagggctgatggtgcgcactccttaaagaggactatttagcctctcccccagtgcttcagccccacccgataattttattttatttcttatttataaattgtaatataatgattcccttgcccagcttgccaaggtgaggggctggggcatggcattaacactgtctgacacagccagccagtctgacatctgacgttttcctgcaaggtgggctaataaagggaaggctttcaggagcttactggaaaa

SEQ ID NO: 126522 - DNA, 2248 bp, Homo sapiens
  Payload ID: 4801
  Gene Symbol: DES
  Gene Name: desmin
  Uniprot ID: P17661
  ENST ID: ENST00000373960
  CDS Start-End: 87-1499
gtctcccctcgccgcatccactctccggccggccgcctgcccgccgcctcctccgtgcgcccgccagcctcgcccgcgccgtcaccatgagccaggcctactcgtccagccagcgcgtgtcctcctaccgccgcaccttcggcggggccccgggcttcccactcggctccccgctgagttcgcccgtgttcccgcgggcgggtttcggctctaagggctcctccagctcggtgacgtcccgcgtgtaccaggtgtcgcgcacgtcgggcggggccgggggcctggggtcgctgcgggccagccggctggggaccacccgcacgccctcctcctacggcgcaggcgagctgctggacttctcactggccgacgcggtgaaccaggagtttctgaccacgcgcaccaacgagaaggtggagctgcaggagctcaatgaccgcttcgccaactacatcgagaaggtgcgcttcctggagcagcagaacgcggcgctcgccgccgaagtgaaccggctcaagggccgcgagccgacgcgagtggccgagctctacgaggaggagctgcgggagctgcggcgccaggtggaggtgctcactaaccagcgcgcgcgcgtcgacgtcgagcgcgacaacctgctcgacgacctgcagcggctcaaggccaagctgcaggaggagattcagttgaaggaagaagcagagaacaatttggctgccttccgagcggacgtggatgcagctactctagctcgcattgacctggagcgcagaattgaatctctcaacgaggagatcgcgttccttaagaaagtgcatgaagaggagatccgtgagttgcaggctcagcttcaggaacagcaggtccaggtggagatggacatgtctaagccagacctcactgccgccctcagggacatccgggctcagtatgagaccatcgcggctaagaacatttctgaagctgaggagtggtacaagtcgaaggtgtcagacctgacccaggcagccaacaagaacaacgacgccctgcgccaggccaagcaggagatgatggaataccgacaccagatccagtcctacacctgcgagattgacgccctgaagggcactaacgattccctgatgaggcagatgcgggaattggaggaccgatttgccagtgaggccagtggctaccaggacaacattgcgcgcctggaggaggaaatccggcacctcaaggatgagatggcccgccatctgcgcgagtaccaggacctgctcaacgtgaagatggccctggatgtggagattgccacctaccggaagctgctggagggagaggagagccggatcaatctccccatccagacctactctgccctcaacttccgagaaaccagccctgagcaaaggggttctgaggtccataccaagaagacggtgatgatcaagaccatcgagacacgggatggggaggtcgtcagtgaggccacacagcagcagcatgaagtgctctaaagacagagaccctctgccaccagagaccgtcctcacccctgtcctcactgctccctgaagccagccttcttccatcccaggacaccacacccagcctcagtcctcccctcacagcctctgacccctcctcactggccatccctcgtggtccccaacagcgacatagcccatccctgcctggtcacagggcatgccccggccacctctgcggaccccagctgtgagccttggctgttggcagtgagtgagcctggctcttgtgctggatggagcccaggcgggagcggtggccctgtccctcccacctctgtgacctcaggcactagcctttggctctggagacagccccagagcagggtgttgggatactgcagggccaggactgagccccgcagacctccccagcccctagcccaggagagagaaagccaggcaggtagccagggggactagcccctgtggagactggggggcttgaaattgtccccgtggtctcttactttcctttccccagcccagggtggacttagaaagcaggggctacaagagggaatccccgaaggtgctggaggtgggagcaggagattgagaaggagagaaagtgggtgagatgctggagaagagaggagaggagagaggcagagagcggtctcaggctggtgggaggggcgcccacctccccacgccctcccctcccctgctgcaggggctctggagagaaacaataaagagattcacacacaagccaa

SEQ ID NO: 126523 - DNA, 4271 bp, Homo sapiens
  Payload ID: 4802
  Gene Symbol: DSC1
  Gene Name: desmocollin 1
  Uniprot ID: Q08554
  ENST ID: ENST00000257197
  CDS Start-End: 263-2785
acttgtaggaaagcctctttgcatttagacgtaattgaactggaaggaaggagactggccagggaatagggggaaagaaattctcccgttgctcctcctactgtttatcacttgcctccggactgtcttccaaaccaagctcagctgcatcaaggtggcagcagaataccctgtgcaagtgccagcgtcttcttagccgctctgtgcatcccaggctgccctgttatctggccaccgtccctggccattgggactgcttctgatggctctggcctctgctgccccagggagcatcttctgtaagcagctccttttctctctcctggttttaacattactttgcgatgcttgtcagaaagtttatcttcgagttccttctcatcttcaggctgaaacacttgtaggcaaagtgaatctggaggagtgtctcaagtcggccagcctaatccggtccagtgaccctgccttcagaattctagaagatggctcaatttacacaacacatgacctcattttgtcttctgaaaggaaaagtttttccattttcctttcagatggtcagagacgggaacaacaagagataaaagttgtactgtcagcaagagaaaacaagtctcctaagaagagacataccaaagacacagccctcaagcgcagcaagagacgatgggctcctattccagcttcattgatggagaactcgttgggtccatttccacaacacgttcagcagatccaatctgatgctgcacagaattacaccatcttttattccataagtgggccaggcgtggacaaagaacccttcaatttgttttacatagagaaagacactggggatatcttttgtacaaggagcattgaccgtgagaaatatgaacagtttgcgttatatggctatgcaacaactgcagatggctatgcaccagaatatccactccctttgatcatcaaaattgaagatgataatgataacgccccatattttgaacacagagtgactatctttactgtgcctgaaaattgccgatccggaacttcagtgggaaaagtgaccgccacagaccttgacgaacctgacactctccatactcgtctgaaatataaaatcttacaacaaatcccagatcatccaaagcatttctccatacacccagataccggtgtcatcaccacaactacaccttttctggatagagaaaaatgtgatacttaccagttaataatggaagtgcgagacatgggtggtcagcctttcggtttatttaatacaggaacaattactatttcacttgaggatgaaaatgacaatccaccatctttcacagaaacttcttatgttacagaagtagaagaaaacagaattgacgtggagattttacgaatgaaggtacaggatcaggatttgccaaacactcctcactcaaaggctgtatacaaaatcctacaaggaaatgaaaatggaaacttcataattagcacagatccaaatacaaatgaaggagtgctgtgtgttgtcaagccattgaactatgaagtcaatcgccaagttattttgcaagttggtgtcattaacgaggcacaattctctaaagcagcgagctcacaaactcctacaatgtgcactacaactgtcaccgttaaaattatagacagtgatgagggccctgaatgccaccctccagtgaaagttattcagagtcaagatggcttcccagctggccaagaactccttggatacaaagcactggacccggaaatatccagtggtgaaggcttaaggtatcagaagttaggggatgaagataactggtttgaaattaatcaacacactggcgacttgagaactctaaaagtactagatagagaatccaaatttgtaaaaaacaaccaatacaatatttcagttgttgcagtggatgcagttggccgatcttgcactggaacattagtagttcatttggatgattacaacgatcacgcacctcaaattgacaaagaagtgaccatttgtcagaataatgaggattttgctgttctgaaacctgtagatccagatggacctgaaaatggaccaccttttcaattctttctggataattctgccagtaaaaactggaacatagaagaaaaggatggtaaaactgccattcttcgtcaacggcaaaatcttgattataactattattctgtgcctattcaaataaaagacaggcatggtttagttgcaacacatatgttaacagtgagagtatgtgactgttcaactccatctgagtgtagaatgaaggataaaagtacaagagacgttagaccaaatgtaatacttggaagatgggctattcttgctatggtgttgggttctgtattgttattatgtattctgtttacatgtttctgtgtcactgctaagagaacagtcaagaaatgttttccagaagacatagcccagcaaaatttaattgtatcaaatactgaaggacctggagaagaagtaacggaagcaaatattagactccccatgcagacatccaacatttgtgacacaagcatgtctgttggtactgttggtggccagggaatcaaaacacagcaaagttttgagatggtcaaaggaggctacactttggattccaacaaaggaggtggacatcagaccttggagtccgtcaagggagtggggcagggagatactggcagatatgcgtacacggactggcagagtttcacccaacctcggcttggcgaagaatccattagaggacacactctgattaaaaattaaacagtaaaagaaggtgtatttgtgtggacaagatgaggagcataaacattgtgaagactacgtttgttcgtataactatgaaggcaaaggttctctggccggctcagtaggttgctgcagcgatcggcaggaagaagagggactggagtttctagatcacctggaacccaaatttaggacattagcaaagacatgcatcaagaaataaatgtgccttttaatagtgtaatatccacagatgcataagtaggaatttattacttgcagaatgttagcagcatctgctaatgtttttgtttatggaggtaaactttgtcatgtataggtaagggtactataaatatgagattcccctacattctccttgtctggtataacttccatgttctctagaaatcaaggttttgtttgttaattctcttttatatgcatgtatatattgcccttttcacgactgtactgtacaccttcttgcaccttttatttgcaaactgatgttactttttgtgctgtggaagagcatttgggaaagctgggtattatagaggccaatgaaagatgaatttgcattgtagatgtacgaattaaatatgttcttcaaaatcttggggagaattatgttcttagaacatagttggtgccagataattgcattctctccacctgagtggtttaaaaaggacttttaagtattcttcagtgcaatcttcagttttgtgattaagttcatttctcttttacacttttgtactcctcagagcagtgctcccagcattgttttctttcaggatccttcagagctcagtccctggacctctgcccatgtggatttgttgttaggtcactccaacttctagggttcttggaaagataaggaccagaacaagctcatagcaaattgaggggcagagattttatgaagattacatgagaagatttccatgaaagaattgcagccctgaggtccatgggttgacttatgctcacaaatatgtttcgtttgctcaacatggtttactactaacattttaaaaatataaatactttagcaaaaacattcactcttgagtttgacataggcctgccttatctgtggttgccacctgccatctccaagcatttggacaactagccctgatgcattaggctgcaactctgatatacagagactagcaccttgaatatgccagaaattgaattaccatctgtattagaacttaagactcagcctaaatttacagttactttaagaaaatgggcagtcagaattagggactagaatgtatatgagaaacccccactctactaaaaatataagaaattagccggacatggtggcgaatgactgtaatcccagctactcaggaggctgaggcaggagaatcgcttgaatccaggaggcggaggttgcagtgagccgagattgccactgcactccagcctgggcaacaagagcgaaactccgtctcaaaaaaaaaaaaaaaaa

SEQ ID NO: 126524 - DNA, 4225 bp, Homo sapiens
  Payload ID: 4802
  Gene Symbol: DSC1
  Gene Name: desmocollin 1
  Uniprot ID: Q08554
  ENST ID: ENST00000257198
  CDS Start-End: 263-2947
acttgtaggaaagcctctttgcatttagacgtaattgaactggaaggaaggagactggccagggaatagggggaaagaaattctcccgttgctcctcctactgtttatcacttgcctccggactgtcttccaaaccaagctcagctgcatcaaggtggcagcagaataccctgtgcaagtgccagcgtcttcttagccgctctgtgcatcccaggctgccctgttatctggccaccgtccctggccattgggactgcttctgatggctctggcctctgctgccccagggagcatcttctgtaagcagctccttttctctctcctggttttaacattactttgcgatgcttgtcagaaagtttatcttcgagttccttctcatcttcaggctgaaacacttgtaggcaaagtgaatctggaggagtgtctcaagtcggccagcctaatccggtccagtgaccctgccttcagaattctagaagatggctcaatttacacaacacatgacctcattttgtcttctgaaaggaaaagtttttccattttcctttcagatggtcagagacgggaacaacaagagataaaagttgtactgtcagcaagagaaaacaagtctcctaagaagagacataccaaagacacagccctcaagcgcagcaagagacgatgggctcctattccagcttcattgatggagaactcgttgggtccatttccacaacacgttcagcagatccaatctgatgctgcacagaattacaccatcttttattccataagtgggccaggcgtggacaaagaacccttcaatttgttttacatagagaaagacactggggatatcttttgtacaaggagcattgaccgtgagaaatatgaacagtttgcgttatatggctatgcaacaactgcagatggctatgcaccagaatatccactccctttgatcatcaaaattgaagatgataatgataacgccccatattttgaacacagagtgactatctttactgtgcctgaaaattgccgatccggaacttcagtgggaaaagtgaccgccacagaccttgacgaacctgacactctccatactcgtctgaaatataaaatcttacaacaaatcccagatcatccaaagcatttctccatacacccagataccggtgtcatcaccacaactacaccttttctggatagagaaaaatgtgatacttaccagttaataatggaagtgcgagacatgggtggtcagcctttcggtttatttaatacaggaacaattactatttcacttgaggatgaaaatgacaatccaccatctttcacagaaacttcttatgttacagaagtagaagaaaacagaattgacgtggagattttacgaatgaaggtacaggatcaggatttgccaaacactcctcactcaaaggctgtatacaaaatcctacaaggaaatgaaaatggaaacttcataattagcacagatccaaatacaaatgaaggagtgctgtgtgttgtcaagccattgaactatgaagtcaatcgccaagttattttgcaagttggtgtcattaacgaggcacaattctctaaagcagcgagctcacaaactcctacaatgtgcactacaactgtcaccgttaaaattatagacagtgatgagggccctgaatgccaccctccagtgaaagttattcagagtcaagatggcttcccagctggccaagaactccttggatacaaagcactggacccggaaatatccagtggtgaaggcttaaggtatcagaagttaggggatgaagataactggtttgaaattaatcaacacactggcgacttgagaactctaaaagtactagatagagaatccaaatttgtaaaaaacaaccaatacaatatttcagttgttgcagtggatgcagttggccgatcttgcactggaacattagtagttcatttggatgattacaacgatcacgcacctcaaattgacaaagaagtgaccatttgtcagaataatgaggattttgctgttctgaaacctgtagatccagatggacctgaaaatggaccaccttttcaattctttctggataattctgccagtaaaaactggaacatagaagaaaaggatggtaaaactgccattcttcgtcaacggcaaaatcttgattataactattattctgtgcctattcaaataaaagacaggcatggtttagttgcaacacatatgttaacagtgagagtatgtgactgttcaactccatctgagtgtagaatgaaggataaaagtacaagagacgttagaccaaatgtaatacttggaagatgggctattcttgctatggtgttgggttctgtattgttattatgtattctgtttacatgtttctgtgtcactgctaagagaacagtcaagaaatgttttccagaagacatagcccagcaaaatttaattgtatcaaatactgaaggacctggagaagaagtaacggaagcaaatattagactccccatgcagacatccaacatttgtgacacaagcatgtctgttggtactgttggtggccagggaatcaaaacacagcaaagttttgagatggtcaaaggaggctacactttggattccaacaaaggaggtggacatcagaccttggagtccgtcaagggagtggggcagggagatactggcagatatgcgtacacggactggcagagtttcacccaacctcggcttggcgaaaaggtgtatttgtgtggacaagatgaggagcataaacattgtgaagactacgtttgttcgtataactatgaaggcaaaggttctctggccggctcagtaggttgctgcagcgatcggcaggaagaagagggactggagtttctagatcacctggaacccaaatttaggacattagcaaagacatgcatcaagaaataaatgtgccttttaatagtgtaatatccacagatgcataagtaggaatttattacttgcagaatgttagcagcatctgctaatgtttttgtttatggaggtaaactttgtcatgtataggtaagggtactataaatatgagattcccctacattctccttgtctggtataacttccatgttctctagaaatcaaggttttgtttgttaattctcttttatatgcatgtatatattgcccttttcacgactgtactgtacaccttcttgcaccttttatttgcaaactgatgttactttttgtgctgtggaagagcatttgggaaagctgggtattatagaggccaatgaaagatgaatttgcattgtagatgtacgaattaaatatgttcttcaaaatcttggggagaattatgttcttagaacatagttggtgccagataattgcattctctccacctgagtggtttaaaaaggacttttaagtattcttcagtgcaatcttcagttttgtgattaagttcatttctcttttacacttttgtactcctcagagcagtgctcccagcattgttttctttcaggatccttcagagctcagtccctggacctctgcccatgtggatttgttgttaggtcactccaacttctagggttcttggaaagataaggaccagaacaagctcatagcaaattgaggggcagagattttatgaagattacatgagaagatttccatgaaagaattgcagccctgaggtccatgggttgacttatgctcacaaatatgtttcgtttgctcaacatggtttactactaacattttaaaaatataaatactttagcaaaaacattcactcttgagtttgacataggcctgccttatctgtggttgccacctgccatctccaagcatttggacaactagccctgatgcattaggctgcaactctgatatacagagactagcaccttgaatatgccagaaattgaattaccatctgtattagaacttaagactcagcctaaatttacagttactttaagaaaatgggcagtcagaattagggactagaatgtatatgagaaacccccactctactaaaaatataagaaattagccggacatggtggcgaatgactgtaatcccagctactcaggaggctgaggcaggagaatcgcttgaatccaggaggcggaggttgcagtgagccgagattgccactgcactccagcctgggcaacaagagcgaaactccgtctcaaaaaaaaaaaaaaaaa

SEQ ID NO: 126525 - DNA, 4826 bp, Homo sapiens
  Payload ID: 4803
  Gene Symbol: DSC2
  Gene Name: desmocollin 2
  Uniprot ID: Q02487
  ENST ID: ENST00000251081
  CDS Start-End: 34-2577
cgctcggcccgcgacctgccccgagccctctccatggaggcagcccgcccctccggctcctggaacggagccctctgccggctgctcctgctgaccctcgcgatcttaatatttgccagtgatgcctgcaaaaatgtgacattacatgttccctccaaactagatgccgagaaacttgttggtagagttaacctgaaagagtgctttacagctgcaaatctaattcattcaagtgatcctgacttccaaattttggaggatggttcagtctatacaacaaatactattctattgtcctcggagaagagaagttttaccatattactttccaacactgagaaccaagaaaagaagaaaatatttgtctttttggagcatcaaacaaaggtcctaaagaaaagacatactaaagaaaaagttctaaggcgcgccaagagaagatgggctccaattccttgttcgatgctagaaaactccttgggtccttttccacttttccttcaacaggttcaatctgacacggcccaaaactataccatatactattccataagaggtcctggagttgaccaagaacctcggaatttattttatgtggagagagacactggaaacttgtattgtactcgtcctgtagatcgtgagcagtatgaatcttttgagataattgcctttgcaacaactccagatgggtatactccagaacttccactgcccctaataatcaaaatagaggatgaaaatgataactacccaatttttacagaagaaacttatacttttacaatttttgaaaattgcagagtgggcactactgtgggacaagtgtgtgctactgacaaagatgagcctgacacgatgcacacacgcctgaagtactccatcattgggcaggtgccaccatcacccaccctattttctatgcatccaactacaggcgtgatcaccacaacatcatctcagctagacagagagttaattgacaagtaccagttgaaaataaaagtacaagacatggatggtcagtattttggtctacagacaacttcaacttgtatcattaacattgatgatgtaaatgaccacttgccaacatttactcgtacttcttatgtgacatcagtggaagaaaatacagttgatgtggaaatcttacgagttactgttgaggataaggacttagtgaatactgctaactggagagctaattataccattttaaagggcaatgaaaatggcaattttaaaattgtaacagatgccaaaaccaatgaaggagttctttgtgtagttaagcctttgaattatgaagaaaagcaacagatgatcttgcaaattggtgtagttaatgaagctccattttccagagaggctagtccaagatcagccatgagcacagcaacagttactgttaatgtagaagatcaggatgagggccctgagtgtaaccctccaatacagactgttcgcatgaaagaaaatgcagaagtgggaacaacaagcaatggatataaagcatatgacccagaaacaagaagtagcagtggcataaggtataagaaattaactgatccaacagggtgggtcaccattgatgaaaatacaggatcaatcaaagttttcagaagcctggatagagaggcagagaccatcaaaaatggcatatataatattacagtccttgcatcagaccaaggagggagaacatgtacggggacactgggcattatacttcaagacgtgaatgataacagcccattcatacctaaaaagacagtgatcatctgcaaacccaccatgtcatctgcggagattgttgcggttgatcctgatgagcctatccatggcccaccctttgactttagtctggagagttctacttcagaagtacagagaatgtggagactgaaagcaattaatgatacagcagcacgtctttcctatcagaatgatcctccatttggctcatatgtagtacctataacagtgagagatagacttggcatgtctagtgtcacttcattggatgttacactgtgtgactgcattaccgaaaatgactgcacacatcgtgtagatccaaggattggcggtggaggagtacaacttggaaagtgggccatccttgcaatattgttgggcatagcattgctcttttgcatcctgtttacgctggtctgtggggcttctgggacgtctaaacaaccaaaagtaattcctgatgatttagcccagcagaacctaattgtatcaaacacagaagctcctggagatgacaaagtgtattctgcgaatggcttcacaacccaaactgtgggcgcttctgctcagggagtttgtggcaccgtgggatcaggaatcaaaaacggaggtcaggagaccatcgaaatggtgaaaggaggacaccagacctcggaatcctgccggggggctggccaccatcacaccctggactcctgcaggggaggacacacggaggtggacaactgcagatacacttactcggagtggcacagttttactcagccccgtcttggtgaagaatccattagaggacacactctgattaaaaattaaacaatgaaagaaagtgtatctgtgtaatcaagatgaaaatcacaagcatgcccaagactatgtcctgacatataactatgaaggaagaggatcggtggctgggtctgtaggttgttgcagtgaacgacaagaagaagatgggcttgaatttttggataatttggagcccaaatttaggacactagcagaagcatgcatgaagagatgagtgtgttctaataagtctctgaaagccagtggctttatgacttttaaaaaaaattacaaaccaagaattttttaaagcagaagatgctatttgtgggggtttttctctcattatttggatggaatctctttggtcaaatgcacatttacagagagacactataaacaagtacacaaatttttcaatttttacatatttttaaattacttatcttctatccaaggaggtctacagagaaattaaagtctgccttatttgttacatttgggtataatgacaacagccaatttatagtgcaataaaatgtaattaattcaagtccttattatagactatttgaagcacaacctaatggaaaattgtagagaccttgctttaacattatctccagttaattaagtgttcatgtggtgcttggaaactgttgttttcctgaacatctaaagtgtgtagactgcattcttgctattattttattcttgtaatgtgaccttttcactgtgcaaagggagatttctagccaggcattgactattacaatttcattttggtggagtttagttttaggttttattgtatataaaatcctgcactgaatctgtgtctcctctgttacctacttttgccagtgaaatttaagttttaaaatactttcagaatgtatttttactactgcaagtttttggtctttaaaatgtcaagtagcatctctctctttctctctgtctctttctgtttctctctccagttttttttttttttttaatttccatatgggctaaagaatccaaatattttaaaaatctgtctctcttttcttctctcataaagtgaattattccttttttttgttttatgtaagtgtatatattcttagtttttcttgaaatcattgtaatgttaactttgttgtttcaaatatcttggtgattgcttcattatctcttcaacaaaaaaaacctttaattttgccattgaaactgtagaactatgccatgcttttattagaagcagtgctctgtgttaacaacaagaatggtgtaattagaattgggatgtggatatttactgtatgacaacacatttacagttctgtaatgcaaggatgcagtttaaaaatgtgaagtagtgatggtttttgaaataagctttaaaatatagggatcttgaaggctccctggggtaactattttataacttagataaaatggctagtcatatctgtgtgtttgtaaagttatttttttaatattttaagattacaattttaacaaatgtagaaatgagccaaactatttaaattttaaaacagtaaaacaaaatgaaacttaatagctcacaaaattccagtccatgtttcatgacttattttagtcaatgaattttctatttatactaaacatatggacattttaaatgtgtttctaatatttttgattatctataatgtgcctgtcttcaattcacaagattgggttataacaattatttgccagattaacactagggaattatttgataaccagcttatcttatcagtagttttattgctgatcaggcaaaaatagttttccaaagttatttttaataaagtatatacaaaattcttatatattactagtcatgataaagtaaattaagcagtttttaaaacttagtgtgagtttgttcatcacaggtctgatatgagtttaagggatttcgcactccctgaatcagagaagtaagaccccttccttagattcctgttatacattttttaaaatgtagagtttgttttggagacattttcagtgcattgttattgccatatttatataatatgactattctaaaggctgtgaggccatggggtattggttaagttgcttgcttttgctttgtccattttcatcattttaaaatgggggataataacagaacttgtttcctagggccattgtaagtcacttgaataaaaaatagttttgaagcatgagagtcatacagagcggtccacctaaaaggcactcctgataataataaatgattttaaacaagt

SEQ ID NO: 126526 - DNA, 12325 bp, Homo sapiens
  Payload ID: 4803
  Gene Symbol: DSC2
  Gene Name: desmocollin 2
  Uniprot ID: Q02487
  ENST ID: ENST00000280904
  CDS Start-End: 445-3150
ggcttctgctgggcagggccggctgttaatctcgcctggcggagcggacaccggggcgtggtgggggagatgggccttataggtggcgtccgctggtgagaaacaccttgcgcaggtaaaagggtggcggcgagagggagttcccacccgtggctttcttagagaaatgaagtcttaagtcttaaatagacaacaaggaggggccgatcggtgtcttttggacgcgtctggagcccctccctccgccaaaggaaaagccccttggatgagaggcaggcgcttcagagaagctaagaaaagcacctctccgcgcgccccacctcctccgcctcgcgctcctcctgagcagcgggcccagactgcgctccggccgcggccctcgccccgcggagccctcctaccccggcccgacgctcggcccgcgacctgccccgagccctctccatggaggcagcccgcccctccggctcctggaacggagccctctgccggctgctcctgctgaccctcgcgatcttaatatttgccagtgatgcctgcaaaaatgtgacattacatgttccctccaaactagatgccgagaaacttgttggtagagttaacctgaaagagtgctttacagctgcaaatctaattcattcaagtgatcctgacttccaaattttggaggatggttcagtctatacaacaaatactattctattgtcctcggagaagagaagttttaccatattactttccaacactgagaaccaagaaaagaagaaaatatttgtctttttggagcatcaaacaaaggtcctaaagaaaagacatactaaagaaaaagttctaaggcgcgccaagagaagatgggctccaattccttgttcgatgctagaaaactccttgggtccttttccacttttccttcaacaggttcaatctgacacggcccaaaactataccatatactattccataagaggtcctggagttgaccaagaacctcggaatttattttatgtggagagagacactggaaacttgtattgtactcgtcctgtagatcgtgagcagtatgaatcttttgagataattgcctttgcaacaactccagatgggtatactccagaacttccactgcccctaataatcaaaatagaggatgaaaatgataactacccaatttttacagaagaaacttatacttttacaatttttgaaaattgcagagtgggcactactgtgggacaagtgtgtgctactgacaaagatgagcctgacacgatgcacacacgcctgaagtactccatcattgggcaggtgccaccatcacccaccctattttctatgcatccaactacaggcgtgatcaccacaacatcatctcagctagacagagagttaattgacaagtaccagttgaaaataaaagtacaagacatggatggtcagtattttggtctacagacaacttcaacttgtatcattaacattgatgatgtaaatgaccacttgccaacatttactcgtacttcttatgtgacatcagtggaagaaaatacagttgatgtggaaatcttacgagttactgttgaggataaggacttagtgaatactgctaactggagagctaattataccattttaaagggcaatgaaaatggcaattttaaaattgtaacagatgccaaaaccaatgaaggagttctttgtgtagttaagcctttgaattatgaagaaaagcaacagatgatcttgcaaattggtgtagttaatgaagctccattttccagagaggctagtccaagatcagccatgagcacagcaacagttactgttaatgtagaagatcaggatgagggccctgagtgtaaccctccaatacagactgttcgcatgaaagaaaatgcagaagtgggaacaacaagcaatggatataaagcatatgacccagaaacaagaagtagcagtggcataaggtataagaaattaactgatccaacagggtgggtcaccattgatgaaaatacaggatcaatcaaagttttcagaagcctggatagagaggcagagaccatcaaaaatggcatatataatattacagtccttgcatcagaccaaggagggagaacatgtacggggacactgggcattatacttcaagacgtgaatgataacagcccattcatacctaaaaagacagtgatcatctgcaaacccaccatgtcatctgcggagattgttgcggttgatcctgatgagcctatccatggcccaccctttgactttagtctggagagttctacttcagaagtacagagaatgtggagactgaaagcaattaatgatacagcagcacgtctttcctatcagaatgatcctccatttggctcatatgtagtacctataacagtgagagatagacttggcatgtctagtgtcacttcattggatgttacactgtgtgactgcattaccgaaaatgactgcacacatcgtgtagatccaaggattggcggtggaggagtacaacttggaaagtgggccatccttgcaatattgttgggcatagcattgctcttttgcatcctgtttacgctggtctgtggggcttctgggacgtctaaacaaccaaaagtaattcctgatgatttagcccagcagaacctaattgtatcaaacacagaagctcctggagatgacaaagtgtattctgcgaatggcttcacaacccaaactgtgggcgcttctgctcagggagtttgtggcaccgtgggatcaggaatcaaaaacggaggtcaggagaccatcgaaatggtgaaaggaggacaccagacctcggaatcctgccggggggctggccaccatcacaccctggactcctgcaggggaggacacacggaggtggacaactgcagatacacttactcggagtggcacagttttactcagccccgtcttggtgaaaaagtgtatctgtgtaatcaagatgaaaatcacaagcatgcccaagactatgtcctgacatataactatgaaggaagaggatcggtggctgggtctgtaggttgttgcagtgaacgacaagaagaagatgggcttgaatttttggataatttggagcccaaatttaggacactagcagaagcatgcatgaagagatgagtgtgttctaataagtctctgaaagccagtggctttatgacttttaaaaaaaattacaaaccaagaattttttaaagcagaagatgctatttgtgggggtttttctctcattatttggatggaatctctttggtcaaatgcacatttacagagagacactataaacaagtacacaaatttttcaatttttacatatttttaaattacttatcttctatccaaggaggtctacagagaaattaaagtctgccttatttgttacatttgggtataatgacaacagccaatttatagtgcaataaaatgtaattaattcaagtccttattatagactatttgaagcacaacctaatggaaaattgtagagaccttgctttaacattatctccagttaattaagtgttcatgtggtgcttggaaactgttgttttcctgaacatctaaagtgtgtagactgcattcttgctattattttattcttgtaatgtgaccttttcactgtgcaaagggagatttctagccaggcattgactattacaatttcattttggtggagtttagttttaggttttattgtatataaaatcctgcactgaatctgtgtctcctctgttacctacttttgccagtgaaatttaagttttaaaatactttcagaatgtatttttactactgcaagtttttggtctttaaaatgtcaagtagcatctctctctttctctctgtctctttctgtttctctctccagttttttttttttttttaatttccatatgggctaaagaatccaaatattttaaaaatctgtctctcttttcttctctcataaagtgaattattccttttttttgttttatgtaagtgtatatattcttagtttttcttgaaatcattgtaatgttaactttgttgtttcaaatatcttggtgattgcttcattatctcttcaacaaaaaaaacctttaattttgccattgaaactgtagaactatgccatgcttttattagaagcagtgctctgtgttaacaacaagaatggtgtaattagaattgggatgtggatatttactgtatgacaacacatttacagttctgtaatgcaaggatgcagtttaaaaatgtgaagtagtgatggtttttgaaataagctttaaaatatagggatcttgaaggctccctggggtaactattttataacttagataaaatggctagtcatatctgtgtgtttgtaaagttatttttttaatattttaagattacaattttaacaaatgtagaaatgagccaaactatttaaattttaaaacagtaaaacaaaatgaaacttaatagctcacaaaattccagtccatgtttcatgacttattttagtcaatgaattttctatttatactaaacatatggacattttaaatgtgtttctaatatttttgattatctataatgtgcctgtcttcaattcacaagattgggttataacaattatttgccagattaacactagggaattatttgataaccagcttatcttatcagtagttttattgctgatcaggcaaaaatagttttccaaagttatttttaataaagtatatacaaaattcttatatattactagtcatgataaagtaaattaagcagtttttaaaacttagtgtgagtttgttcatcacaggtctgatatgagtttaagggatttcgcactccctgaatcagagaagtaagaccccttccttagattcctgttatacattttttaaaatgtagagtttgttttggagacattttcagtgcattgttattgccatatttatataatatgactattctaaaggctgtgaggccatggggtattggttaagttgcttgcttttgctttgtccattttcatcattttaaaatgggggataataacagaacttgtttcctagggccattgtaagtcacttgaataaaaaatagttttgaagcatgagagtcatacagagcggtccacctaaaaggcactcctgataataataaatgattttaaacaagtcacatgtacaattcatttcatgttaacaaaaggtcaattaagacaataagatactgaaaagatttttcttttcactgtagaacatgtctcttcataatgatcacctgatgactgggtcttgtatgttcagtttttcagaatacgtagtgcaaagattgctgaggcattcgtatgggattgcctggtttgaaacactgtgaaactgtaaggttcaaattggatgaaaagcagaacatctgcttcttaaaatgggcactaattctaacaccctatgaaaattatgtgtattttagattctccctgtcaatcccttccttggcttcttccctagctgtccagctagacattagcagtcacttgcctgggaggtcatggctgtttggcagtcgtcatagtaaccccaagtgctaagacttccaagtaagagtgtcttgatgcaaattccggctctatccttactagctgtgggatttgagaagtcacttaagctttctgtgcttagtttccttacttataggacctgtactgaggagggtagaggagtctacttgacagggctttgtcagagttaattcatgaaaagagttggcatagagttagcactcaatcatgtaccttagccactgctattgttctatgagcagagaacgcctgagttgggaacaatttagcttcagtctccactctgctttactgctgacatcttgccatgatgctcttattcacctttcccagaagcccgaccagtatttcaccagtgatggcctttgggaatttcatggctcatagtagcttccaggtctctcatttgtggtattcagcaagttacatcttattcatccctagccagaagtcagtgtgataaatcttgatgcttaactgaaaaggcaggtaaaattctcgaggaggcaaaatcataaagagtttcccgaagaaatggctggtgcttcttcagcaaatgaaaagcagcaagatcttctgttccatgcagtgtgtgtctgggggctcctggtaatcattactttttctttattcccatcttaagactgtttttatcttggatcccaattctgttttgccaaatctgactttgactacgggcttcccttttgtctccatctccattcctggactccagattgaagtcttgacaactgactttgctctgatcagcccctttagtatcatctccaaaataaaatgctttcccttctttgtgcctagaatcatcttgtttttcacctccttaaatattcaaagccctaagaagttacctgatatccgtataaacctacagctcttatatcagctcccctgcgagccccctgttaacctagcacttcaaactcatgcaaaaagacaaacacatactaccacatcaaatcaggttctcctgagttatttacacaatggtgcccttcttccacttacttaggcttgaaacagagaatccttgattcctctctcttctttccatagcatcctctattttttgccaaaaactgccaaacttttgagaattgtagacacaatttcattcattaaatactttgtttgtactgtagtcatttgatgccttcccagtgcagtcatatgtagccttttaaaacagagactagaaggactgtgcttctatgagaaagtgcaagatgaatcagccactctccccacccacacacttgaatgcaagtcaagacacggtggatgtaaggagtgggctaatgcctgtaaaacacatcacacaatgcctggcacatagtaagtgcataatgcatgtttttaaaaagcttcagatgatgtgaaagaacttcaggacactagtgagtgaacttctgcttctgctactcccaatccaagcattcatgaggttgaggtgtaccctatgtcagctgttcccactcttcacttcattcctgatcaatattcccccccgccagtaccccagattaaatcttcagcatcactcagctccaatggtgtttatgcttccaatttcttccctcttctcttttttcaagggccatcaaagagcagatatgatcatgccattctgcctaagagctttctatagggttttagaggataaattctaaacacaaaatcacttttaaatacagatgcttcttgacttatgatggggttacatcctgataaacccatggtaaattgaaaatattacaaatcaaaacagcattttccatttaccatatgttcaacttaaaataagcttattgggatgtagtctcataagtgtaggagaatgctgaatgcatatttctttgacaccatcataaagttgaaatatcagatcgagccatcttaagttgaggaccttctgtactaatttccccaatctccttgtatccttcatttttcaatttgtgccttgctcatgattagttctctttttacaatgtctttactcattgtctctttctttgtaaaaatattactttttgaggatctagtaaaaatactaccgcctagacatttgtgtgtctagagcacatggctgtaaagttttcatctacaggtttgtgtgtgtgtttcttttctttcatgtaggacactaaggaccaagaaaggtgttcacaattgcatgcctatacaactctggccattaatttttttttttttttttttgagacggaatctcactctgtcacctaggctggagtgcagtggcatgatcatggctcactgcaacctctgcctcccaggttcaagcaattcttctgcctcagcctcctgagtagctgggattacaggcacctaccaccacgcctggttaatttttgtatttttagcagagaaagggtttcaccatgttggccaggctggtcttgaactcctgacctcaagtgatctgtcagcacttggcctcccaaagtgctgggattacaggcataagccactgtgcctggccaaattttgattcatcaaattatattgcccaggtcataaaggaaaaaagagaaataataaaagttaggttttttattctcagcacatactaattttctgtggcataaattttacatgatagacatggtgtatgttagattctgcactgaattgtttttcctcagaagacattgaatgactagaacaattgtttgcattcacagcttaatacaggaaagtgaagtgttgagattttggaatcccttctcccttgggatagtgagaggggcagacagaaggggtagtgtctgaatattgtggttcaggccagctcaaatcctaccaccaataattgcacgaacctacttgtagccaccaataattgccccatattgaaatgtaacccccaagggttctcctctgtcttcttgaccactgtatgcctaacatgtagagcagtagacactgaatatatttggtgtgtgatgaataaatggatgaatgaataaatgcacatgtgtgttaggtacctggctaagatcagactgcatattgcctaaagaattctttttctcaacttgaaaatttttagccaatgtgaaaattatgtttgcgactgtcacttcatcattgccaggttcaaacactgcagtgaattttttttttttaaccaaaaggccactctctaaccacctgaggaaaagcaactaaaaaccacttatgtttagaaattcaagaaatgattcttatgagtttgccaaaattcccattagttatttataaaatgttgtaagtcaggccttgcttcaaaaaatatcttgagaaaccacaaagcaaagaaagtggcatacatctacgagctttttccatgttaggctgggagaacattctgtaacaggaaaccaccgtgctcatgtgtgccctgagagaagaaaatcttcacacaagaagtagagaatagggaaagaaatgcatagcaatgagcctcagaggcaatgcctatattgtgctgtgaactgataatgtcacttggaagataacacgtaagaggtagttcccagccctgctcttctcacgtaggacatgtaggacagacctatgtgttttgctttctggggagaggggatcagttgtatgaccccctttattatttcctcttcaccagttctggttttctaggtttgaggactgaaatcttgagaagtaggatctgatctttcttccaagaagctcttctctccccacctgtccttgtgttctttatcccatcaatagctaagaagcagaacctattacttttgcttaaatgttttaaattaagcaaatagatacattatgaggctgcattttaaactttagatatttcaaataagacatgcaatatagagtcttaaggtaaaacaaaagagcataatgctaaaaaacaggcaacaaaaagaagctagagctttgaaatagctagtcaggtaaacagagcactttaatttaaaagaacacaccctaaatcttgttttatagaggaattttactgtgtcatggatttggagcatattcttctcaagccatttggtatatcctaaattctaggtatacgtgagattaaagaagagatactcactgatgtgcctccgtatggagtgatagttggtgcatgggaaatggcaagggctgttttgtttcattctctcttccctttgtgactgtacctttgtatccctacagaaaatctgggcatagctgagaggttagaattgtggagtttctgctagccacatcttttctgtttacttattttgttaggattcaagggagaggacagagcagaacactcactgcttttcagttaacaaatatgaaggcaaacttgctgatatattcgcttgtataatttttagagtgtgtttcactgaccatcagcatcagaatcaccctggtgttgctgaaaatagagatccctcatgaatcagtcacaggagtaacaggctagtaggggaaaagtatagaagccttcacttttcaatacattttctaggtcattttttcttactctaaagtttgacaatcgttagggttttagtaactgggtttattgattatttggtggtttatgaaacttaagtatttaaaatttgccttttcatataaaacatattaagcaaaatgctagaaatgtaccaaagagttgaaacacattgatgagtaaaatttcacaatgtctgcaaattaagcatttcagaatgtacattgttccctgtggtttctactttctacatgcatgtgaacgagagaaatagtcttaaggtaggaatgcagaacaaagccacacagaaaacatttaataaaaattaacaagttttgccacataaatgctgctagtcaagaagatgtatgcaaagtaagttgcatatatttttaaaaatcagaattgccaaatctccagagataaatagaactagaaaggtcaacagcaggtggaacaagtgactgtccagaaggcagcaactgtttggcatcactgtgctgttgtgtggggacctgtgtcaggtggggtaacaggtaatgctcactgactgtggcggccaggagcttcagaggggcctgtgaatcagggatgggagatgagggtagagacgagacttttcagcttaaggagtgttcccctgggaacagggccaattggaaaactcccaggcaccaaggacatgagttaaccaatagggaatgagaggctcagaaagccagaggtgaaaggagcagagggtgtcaatatacacaagatgtgatgcagaattaccaatgaaatcaagtaaaagggatttatccaaaagaagtaagagaatagtgtaaagattctactcacatgcaaggatgtttgtctcagtggcattaaatatatgaataactgaaaataaactaaatgttccatgacagggaagtaattaaatgatgtatgatccattactgtgatacaatgtaccataattgaggacaatggaaacaatgatcacacacagacttcgcagtcagaaagacgtggatccaaatctcagctttgttcttgctgtgttaccttgggaaatcacagaaacctcaaatttctagcatatcaaataaggacaaattaggaataaattatataattcacataaagatcctagcttactgcttggctcatcagtatatcaataaccagcagctatcactattgtgatatgatgatggaatatcatgcaatcattttattttgaaaactttaattaaatgggaaaagacataaactatagtagtattttaaaactaggataggtttccaaattattataatctcacatttaaataaatatgagactatctgtaatacactaagatattgagtgataaatcctcggtaaatgaaatatttattcattgtgtgtttccatgttttcattttaccacaagcatttataatttataacattgagggaaaagttcatgtaaatgaaatacagagcaagaaaaactcacaggctttagaatttggggagcttacaggcctgtgaagaaaagccttttcatcttagctttaataaataaagttttcactgaacatattatatttacagtaaatgattaaattgaaagcaaaaagaaaatactgtatcatctcacattatcataactgagtgcattcatgtgcttttggtcttaaaattttactttaacgcacttaggatttgtcgtcagtaatttgttatgcactatctagactaagaataggtattaatttactagaattgtcaaatgaaatatttcaagcaaagtttgcataatgaatgcaagtttaaaccaattaaatgtgttcactttttagcaagctaagctgctccttatttctcctgtagtagacacaatcacagttaatctttgcacaatgcatcgcattctccatgcaacctaacagagcggtctgggatagagcctgaactttgggtcccttggggcccaacaggcaaggttcagatctgggctctaccacaaaccatctgtgtaacctgaacctccctagtcttcagtttcctcatctgctttaaaaaattgctagaacatagttctatgtaaatgttcggtgttaaaatttatttggtatctactgtatgtaagatatggcctctgctctcaaaaatatgtagtcccagaagtgatataatatgttcacggagacgtactattaaaaagtgccacaaaaaa

SEQ ID NO: 126527 - DNA, 6939 bp, Homo sapiens
  Payload ID: 4804
  Gene Symbol: DSC3
  Gene Name: desmocollin 3
  Uniprot ID: Q14574
  ENST ID: ENST00000360428
  CDS Start-End: 82-2772
tcccgcgccctgcacctcggcaggtctcgctctcggcaccctcccggcgcccgcgttctcctggccctgcccggcatcccgatggccgccgctgggccccggcgctccgtgcgcggagccgtctgcctgcatctgctgctgaccctcgtgatcttcagtcgtgctggtgaagcctgcaaaaaggtgatacttaatgtaccttctaaactagaggcagacaaaataattggcagagttaatttggaagagtgcttcaggtctgcagacctcatccggtcaagtgatcctgatttcagagttctaaatgatgggtcagtgtacacagccagggctgttgcgctgtctgataagaaaagatcatttaccatatggctttctgacaaaaggaaacagacacagaaagaggttactgtgctgctagaacatcagaagaaggtatcgaagacaagacacactagagaaactgttctcaggcgtgccaagaggagatgggcacctattccttgctctatgcaagagaattccttgggccctttcccattgtttcttcaacaagttgaatctgatgcagcacagaactatactgtcttctactcaataagtggacgtggagttgataaagaacctttaaatttgttttatatagaaagagacactggaaatctattttgcactcggcctgtggatcgtgaagaatatgatgtttttgatttgattgcttatgcgtcaactgcagatggatattcagcagatctgcccctcccactacccatcagggtagaggatgaaaatgacaaccaccctgttttcacagaagcaatttataattttgaagttttggaaagtagtagacctggtactacagtgggggtggtttgtgccacagacagagatgaaccggacacaatgcatacgcgcctgaaatacagcattttgcagcagacaccaaggtcacctgggctcttttctgtgcatcccagcacaggcgtaatcaccacagtctctcattatttggacagagaggttgtagacaagtactcattgataatgaaagtacaagacatggatggccagttttttggattgataggcacatcaacttgtatcataacagtaacagattcaaatgataatgcacccactttcagacaaaatgcttatgaagcatttgtagaggaaaatgcattcaatgtggaaatcttacgaatacctatagaagataaggatttaattaacactgccaattggagagtcaattttaccattttaaagggaaatgaaaatggacatttcaaaatcagcacagacaaagaaactaatgaaggtgttctttctgttgtaaagccactgaattatgaagaaaaccgtcaagtgaacctggaaattggagtaaacaatgaagcgccatttgctagagatattcccagagtgacagccttgaacagagccttggttacagttcatgtgagggatctggatgaggggcctgaatgcactcctgcagcccaatatgtgcggattaaagaaaacttagcagtggggtcaaagatcaacggctataaggcatatgaccccgaaaatagaaatggcaatggtttaaggtacaaaaaattgcatgatcctaaaggttggatcaccattgatgaaatttcagggtcaatcataacttccaaaatcctggatagggaggttgaaactcccaaaaatgagttgtataatattacagtcctggcaatagacaaagatgatagatcatgtactggaacacttgctgtgaacattgaagatgtaaatgataatccaccagaaatacttcaagaatatgtagtcatttgcaaaccaaaaatggggtataccgacattttagctgttgatcctgatgaacctgtccatggagctccattttatttcagtttgcccaatacttctccagaaatcagtagactgtggagcctcaccaaagttaatgatacagctgcccgtctttcatatcagaaaaatgctggatttcaagaatataccattcctattactgtaaaagacagggccggccaagctgcaacaaaattattgagagttaatctgtgtgaatgtactcatccaactcagtgtcgtgcgacttcaaggagtacaggagtaatacttggaaaatgggcaatccttgcaatattactgggtatagcactgctcttttctgtattgctaactttagtatgtggagtttttggtgcaactaaagggaaacgttttcctgaagatttagcacagcaaaacttaattatatcaaacacagaagcacctggagacgatagagtgtgctctgccaatggatttatgacccaaactaccaacaactctagccaaggtttttgtggtactatgggatcaggaatgaaaaatggagggcaggaaaccattgaaatgatgaaaggaggaaaccagaccttggaatcctgccggggggctgggcatcatcataccctggactcctgcaggggaggacacacggaggtggacaactgcagatacacttactcggagtggcacagttttactcaaccccgtctcggtgaaaaattgcatcgatgtaatcagaatgaagaccgcatgccatcccaagattatgtcctcacttataactatgagggaagaggatctccagctggttctgtgggctgctgcagtgaaaagcaggaagaagatggccttgactttttaaataatttggaacccaaatttattacattagcagaagcatgcacaaagagataatgtcacagtgctacaattaggtctttgtcagacattctggaggtttccaaaaataatattgtaaagttcaatttcaacatgtatgtatatgatgatttttttctcaattttgaattatgctactcaccaatttatatttttaaagcaagttgttgcttatcttttccaaaaagtgaaaaatgttaaaacagacaactggtaaatctcaaactccagcactggaattaaggtctctaaagcatctgctcttttttttttttacggatattttagtaataaatatgctggataaatattagtccaacaatagctaagttatgctaatatcacattattatgtattcactttaagtgatagtttaaaaaataaacaagaaatattgagtatcactatgtgaagaaagttttggaaaagaaacaatgaagactgaattaaattaaaaatgttgcagctcataaagaattgggactcacccctactgcactaccaaattcatttgactttggaggcaaaatgtgttgaagtgccctatgaagtagcaattttctataggaatatagttggaaataaatgtgtgtgtgtatattattattaatcaatgcaatatttaaaatgaaatgagaacaaagaggaaaatggtaaaaacttgaaatgaggctggggtatagtttgtcctacaatagaaaaaagagagagcttcctaggcctgggctcttaaatgctgcattataactgagtctatgaggaaatagttcctgtccaatttgtgtaatttgtttaaaattgtaaataaattaaacttttctggtttctgtgggaaggaaatagggaatccaatggaacagtagctttgctttgcagtctgtttcaagatttctgcatccacaagttagtagcaaactggggaatactcgctgcagctggggttccctgctttttggtagcaagggtccagagatgaggtgtttttttcggggagctaataacaaaaacattttaaaacttacctttactgaagttaaatcctctattgctgtttctattctctcttatagtgaccaacatctttttaatttagatccaaataaccatgtcctcctagagtttagaggctagagggagctgaggggaggatcttactgaaagcaccctggggagattgattgtccttaaacctaagccccacaaacttgacacctgatcaggtctgggagctacaaaatttcatttttctcctcactgcccttcttctgagtggcattggcctgaatcaaggaaagccaggccttgtgggcccccttctttcggctttctgctaaagcaacacctccagcagagattcccttaagtgactccaggttttccaccatccttcagcgtgaattaatttttaatcagtttgctttctccagagaaattttaaaataatagaagaaatagaaattttgaatgtataaaagaaaaagatcaagttgtcattttagaacagagggaactttgggagaaagcagcccaagtaggttatttgtacagtcagagggcaacaggaagatgcaggccttcaagggcaaggagaggccacaaggaatatgggtgggagtaaaagcaacatcgtctgcttcatactttttcctaggcttggcactgccttttcctttctcaggccaatggcaactgccatttgagtccggtgagggatcagccaacctcttctctatggctcaccttatttggagtgagaaatcaaggagacagagctgactgcatgatgagtctgaaggcatttgcaggatgagcctgaactggttgtgcagaacaaacaaggcattcatgggaattgttgtattccttctgcagccctccttctgggcactaagaaggtctatgaattaaatgcctatctaaaattctgatttattcctacattttctgttttctaatttgaccctaaaatctatgtgttttagacttagactttttattgccccccccccccccttttttttttgagacggagtctcgctctgacgcacaggctggagtgcagtggctccgatctctgctcactgaaagctccgcctcccgggttcacgccattctcctgcctcagcctcctgagtagctgggactacaggcgcccaccaccacgcccggctaattttttgtatttttaatagagacggggtttcactgtgttagccaggatggtctcgatctcctgacctcgtgatccgcctgcctcggcctcccaaagtgctgggattacaggcatgacccaccgctcccggccttgttttccgtttaaagtcgtcttcttttaatgtaatcattttgaacatgtgtgaaagttgatcatacgaattggatcaatcttgaaatactcaaccaaaagacagtcgagaagccagggggagaaagaactcagggcacaaaatattggtctgagaatggaattctctgtaagcctagttgctgaaatttcctgctgtatccagaagccagttttatctaacggctactgaaacacccactgtgttttgctcactccctcactcaccgatcaaaacctgctacctccccaagactttactagtgccgataaactttctcaaagagcaaccagtatcacttccctgtttataaaacctctaaccatctctttgttctttgaacatgctgaaaaccacctggtctgcatgtatgcccgaatttgtaattcttttctctcaaatgaaaatttaattttagggattcatttctatattttcacatatgtagtattattatttccttatatgtgtaaggtgaaatttatggtatttgagtgtgcaagaaaatatatttttaaagctttcatttttcccccagtgaatgatttagaattttttatgtaaatatacagaatgttttttcttacttttataaggaagcagctgtctaaaatgcagtggggtttgttttgcaatgttttaaacagagttttagtattgctattaaaagaagttactttgcttttaaagaaacttggctgcttaaaataagcaaaaattggatgcgtaaagtaatatttacagatgtggggagatgtaataaaacaatattaacttggtttcttgtttttgctgtatttagagattaaataattctaagatgatcactttgcaaaattatgcttatggctggcatggaaatagaaataattatgtctttgttgtattaatggggaatattttggacaatgtttcattatcaaattgtcgacatcattaatatatattgtaatgttgggaagagatcactattttgaagcacagctttacagatgagtatctatgatacatatgtataataaattttgattgggtattaaaagtattagaaggtggttataattgcagagtattccatgaatagtacactgacacaggggttttactttgaggaccagtgtagtcaagggaaaacatgagttaaaaagaaaagcaggcgatattgcagtcttgattctgccacttacaggatagataacgcctgaactttaatgacaagatgatccaaccataaaggtgctctgtgcttcacagtgaatcttttccccatgcaggagtgtgctcccctacaaacgttaagactgatcatttcaaaaatctattagctatatcaaaagccttacattttaatataggttgaaccaaaatttcaattccagtaacttctattgtaaccattatttttgtgtatgtcttcaagaatgttcattggatttttgtttgtaatagtaaaataccggatacatttcacgtgtccttcagtattgatttggttgaatattgggtcataatggttgagaagcatggacactagagccagaatgcttggatatgaatcctggatctgtcacttacttctgtgtgacctttgaaaggctacttatttcctctcttagctttctcattaaaatcaatgaacaatgccagcctcatggggttgttgaatgattaaatgagttactatacctaaagtacatagaacactgcctgcacatagtaaaagaattataagtgtgaggtagttggtaaaattatgtagttggatatactaccgaacaatatctcatctctttttagggaaataaagtttgtgcatatatataatcccgaaacatg

SEQ ID NO: 126528 - DNA, 6978 bp, Homo sapiens
  Payload ID: 4804
  Gene Symbol: DSC3
  Gene Name: desmocollin 3
  Uniprot ID: Q14574
  ENST ID: ENST00000434452
  CDS Start-End: 156-2675
gaagttgctcccgggcaggcaagcctgagagaggccaaatacacttaaaaacaagcagcggcgagaaaagcacctcccgcgccctgcacctcggcaggtctcgctctcggcaccctcccggcgcccgcgttctcctggccctgcccggcatcccgatggccgccgctgggccccggcgctccgtgcgcggagccgtctgcctgcatctgctgctgaccctcgtgatcttcagtcgtgctggtgaagcctgcaaaaaggtgatacttaatgtaccttctaaactagaggcagacaaaataattggcagagttaatttggaagagtgcttcaggtctgcagacctcatccggtcaagtgatcctgatttcagagttctaaatgatgggtcagtgtacacagccagggctgttgcgctgtctgataagaaaagatcatttaccatatggctttctgacaaaaggaaacagacacagaaagaggttactgtgctgctagaacatcagaagaaggtatcgaagacaagacacactagagaaactgttctcaggcgtgccaagaggagatgggcacctattccttgctctatgcaagagaattccttgggccctttcccattgtttcttcaacaagttgaatctgatgcagcacagaactatactgtcttctactcaataagtggacgtggagttgataaagaacctttaaatttgttttatatagaaagagacactggaaatctattttgcactcggcctgtggatcgtgaagaatatgatgtttttgatttgattgcttatgcgtcaactgcagatggatattcagcagatctgcccctcccactacccatcagggtagaggatgaaaatgacaaccaccctgttttcacagaagcaatttataattttgaagttttggaaagtagtagacctggtactacagtgggggtggtttgtgccacagacagagatgaaccggacacaatgcatacgcgcctgaaatacagcattttgcagcagacaccaaggtcacctgggctcttttctgtgcatcccagcacaggcgtaatcaccacagtctctcattatttggacagagaggttgtagacaagtactcattgataatgaaagtacaagacatggatggccagttttttggattgataggcacatcaacttgtatcataacagtaacagattcaaatgataatgcacccactttcagacaaaatgcttatgaagcatttgtagaggaaaatgcattcaatgtggaaatcttacgaatacctatagaagataaggatttaattaacactgccaattggagagtcaattttaccattttaaagggaaatgaaaatggacatttcaaaatcagcacagacaaagaaactaatgaaggtgttctttctgttgtaaagccactgaattatgaagaaaaccgtcaagtgaacctggaaattggagtaaacaatgaagcgccatttgctagagatattcccagagtgacagccttgaacagagccttggttacagttcatgtgagggatctggatgaggggcctgaatgcactcctgcagcccaatatgtgcggattaaagaaaacttagcagtggggtcaaagatcaacggctataaggcatatgaccccgaaaatagaaatggcaatggtttaaggtacaaaaaattgcatgatcctaaaggttggatcaccattgatgaaatttcagggtcaatcataacttccaaaatcctggatagggaggttgaaactcccaaaaatgagttgtataatattacagtcctggcaatagacaaagatgatagatcatgtactggaacacttgctgtgaacattgaagatgtaaatgataatccaccagaaatacttcaagaatatgtagtcatttgcaaaccaaaaatggggtataccgacattttagctgttgatcctgatgaacctgtccatggagctccattttatttcagtttgcccaatacttctccagaaatcagtagactgtggagcctcaccaaagttaatgatacagctgcccgtctttcatatcagaaaaatgctggatttcaagaatataccattcctattactgtaaaagacagggccggccaagctgcaacaaaattattgagagttaatctgtgtgaatgtactcatccaactcagtgtcgtgcgacttcaaggagtacaggagtaatacttggaaaatgggcaatccttgcaatattactgggtatagcactgctcttttctgtattgctaactttagtatgtggagtttttggtgcaactaaagggaaacgttttcctgaagatttagcacagcaaaacttaattatatcaaacacagaagcacctggagacgatagagtgtgctctgccaatggatttatgacccaaactaccaacaactctagccaaggtttttgtggtactatgggatcaggaatgaaaaatggagggcaggaaaccattgaaatgatgaaaggaggaaaccagaccttggaatcctgccggggggctgggcatcatcataccctggactcctgcaggggaggacacacggaggtggacaactgcagatacacttactcggagtggcacagttttactcaaccccgtctcggtgaagaatccattagaggacacactggttaaaaattaaacataaaagaaattgcatcgatgtaatcagaatgaagaccgcatgccatcccaagattatgtcctcacttataactatgagggaagaggatctccagctggttctgtgggctgctgcagtgaaaagcaggaagaagatggccttgactttttaaataatttggaacccaaatttattacattagcagaagcatgcacaaagagataatgtcacagtgctacaattaggtctttgtcagacattctggaggtttccaaaaataatattgtaaagttcaatttcaacatgtatgtatatgatgatttttttctcaattttgaattatgctactcaccaatttatatttttaaagcaagttgttgcttatcttttccaaaaagtgaaaaatgttaaaacagacaactggtaaatctcaaactccagcactggaattaaggtctctaaagcatctgctcttttttttttttacggatattttagtaataaatatgctggataaatattagtccaacaatagctaagttatgctaatatcacattattatgtattcactttaagtgatagtttaaaaaataaacaagaaatattgagtatcactatgtgaagaaagttttggaaaagaaacaatgaagactgaattaaattaaaaatgttgcagctcataaagaattgggactcacccctactgcactaccaaattcatttgactttggaggcaaaatgtgttgaagtgccctatgaagtagcaattttctataggaatatagttggaaataaatgtgtgtgtgtatattattattaatcaatgcaatatttaaaatgaaatgagaacaaagaggaaaatggtaaaaacttgaaatgaggctggggtatagtttgtcctacaatagaaaaaagagagagcttcctaggcctgggctcttaaatgctgcattataactgagtctatgaggaaatagttcctgtccaatttgtgtaatttgtttaaaattgtaaataaattaaacttttctggtttctgtgggaaggaaatagggaatccaatggaacagtagctttgctttgcagtctgtttcaagatttctgcatccacaagttagtagcaaactggggaatactcgctgcagctggggttccctgctttttggtagcaagggtccagagatgaggtgtttttttcggggagctaataacaaaaacattttaaaacttacctttactgaagttaaatcctctattgctgtttctattctctcttatagtgaccaacatctttttaatttagatccaaataaccatgtcctcctagagtttagaggctagagggagctgaggggaggatcttactgaaagcaccctggggagattgattgtccttaaacctaagccccacaaacttgacacctgatcaggtctgggagctacaaaatttcatttttctcctcactgcccttcttctgagtggcattggcctgaatcaaggaaagccaggccttgtgggcccccttctttcggctttctgctaaagcaacacctccagcagagattcccttaagtgactccaggttttccaccatccttcagcgtgaattaatttttaatcagtttgctttctccagagaaattttaaaataatagaagaaatagaaattttgaatgtataaaagaaaaagatcaagttgtcattttagaacagagggaactttgggagaaagcagcccaagtaggttatttgtacagtcagagggcaacaggaagatgcaggccttcaagggcaaggagaggccacaaggaatatgggtgggagtaaaagcaacatcgtctgcttcatactttttcctaggcttggcactgccttttcctttctcaggccaatggcaactgccatttgagtccggtgagggatcagccaacctcttctctatggctcaccttatttggagtgagaaatcaaggagacagagctgactgcatgatgagtctgaaggcatttgcaggatgagcctgaactggttgtgcagaacaaacaaggcattcatgggaattgttgtattccttctgcagccctccttctgggcactaagaaggtctatgaattaaatgcctatctaaaattctgatttattcctacattttctgttttctaatttgaccctaaaatctatgtgttttagacttagactttttattgccccccccccccccttttttttttgagacggagtctcgctctgacgcacaggctggagtgcagtggctccgatctctgctcactgaaagctccgcctcccgggttcacgccattctcctgcctcagcctcctgagtagctgggactacaggcgcccaccaccacgcccggctaattttttgtatttttaatagagacggggtttcactgtgttagccaggatggtctcgatctcctgacctcgtgatccgcctgcctcggcctcccaaagtgctgggattacaggcatgacccaccgctcccggccttgttttccgtttaaagtcgtcttcttttaatgtaatcattttgaacatgtgtgaaagttgatcatacgaattggatcaatcttgaaatactcaaccaaaagacagtcgagaagccagggggagaaagaactcagggcacaaaatattggtctgagaatggaattctctgtaagcctagttgctgaaatttcctgctgtatccagaagccagttttatctaacggctactgaaacacccactgtgttttgctcactccctcactcaccgatcaaaacctgctacctccccaagactttactagtgccgataaactttctcaaagagcaaccagtatcacttccctgtttataaaacctctaaccatctctttgttctttgaacatgctgaaaaccacctggtctgcatgtatgcccgaatttgtaattcttttctctcaaatgaaaatttaattttagggattcatttctatattttcacatatgtagtattattatttccttatatgtgtaaggtgaaatttatggtatttgagtgtgcaagaaaatatatttttaaagctttcatttttcccccagtgaatgatttagaattttttatgtaaatatacagaatgttttttcttacttttataaggaagcagctgtctaaaatgcagtggggtttgttttgcaatgttttaaacagagttttagtattgctattaaaagaagttactttgcttttaaagaaacttggctgcttaaaataagcaaaaattggatgcgtaaagtaatatttacagatgtggggagatgtaataaaacaatattaacttggtttcttgtttttgctgtatttagagattaaataattctaagatgatcactttgcaaaattatgcttatggctggcatggaaatagaaataattatgtctttgttgtattaatggggaatattttggacaatgtttcattatcaaattgtcgacatcattaatatatattgtaatgttgggaagagatcactattttgaagcacagctttacagatgagtatctatgatacatatgtataataaattttgattgggtattaaaagtattagaaggtggttataattgcagagtattccatgaatagtacactgacacaggggttttactttgaggaccagtgtagtcaagggaaaacatgagttaaaaagaaaagcaggcgatattgcagtcttgattctgccacttacaggatagataacgcctgaactttaatgacaagatgatccaaccataaaggtgctctgtgcttcacagtgaatcttttccccatgcaggagtgtgctcccctacaaacgttaagactgatcatttcaaaaatctattagctatatcaaaagccttacattttaatataggttgaaccaaaatttcaattccagtaacttctattgtaaccattatttttgtgtatgtcttcaagaatgttcattggatttttgtttgtaatagtaaaataccggatacatttcacgtgtccttcagtattgatttggttgaatattgggtcataatggttgagaagcatggacactagagccagaatgcttggatatgaatcctggatctgtcacttacttctgtgtgacctttgaaaggctacttatttcctctcttagctttctcattaaaatcaatgaacaatgccagcctcatggggttgttgaatgattaaatgagttactatacctaaagtacatagaacactgcctgcacatagtaaaagaattataagtgtgaggtagttggtaaaattatgta

SEQ ID NO: 126529 - DNA, 907 bp, Homo sapiens
  Payload ID: 4804
  Gene Symbol: DSC3
  Gene Name: desmocollin 3
  ENST ID: ENST00000584980
  CDS Start-End: 1-644
ccaaagttaatgatacagctgcccgtctttcatatcagaaaaatgctggatttcaagaatataccattcctattactgtaaaagacagggccggccaagctgcaacaaaattattgagagttaatctgtgtgaatgtactcatccaactcagtgtcgtgcgacttcaaggagtacaggagtaatacttggaaaatgggcaatccttgcaatattactgggtatagcactgctcttttctgtattgctaactttagtatgtggagtttttggtgcaactaaagggaaacgttttcctgaagatttagcacagcaaaacttaattatatcaaacacagaagcacctggagacgatagagtgtgctctgccaatggatttatgacccaaactaccaacaactctagccaaggtttttgtggtactatgggatcaggaatgaaaaatggagggcaggaaaccattgaaatgatgaaaggaggaaaccagaccttggaatcctgccggggggctgggcatcatcataccctggactcctgcaggggaggacacacggaggtggacaactgcagatacacttactcggagtggcacagttttactcaaccccgtctcggtgaagaatccattagaggacacactggttaaaaattaaacataaaagaaattgcatcgatgtaatcagaatgaagaccgcatgccatcccaagattatgtcctcacttataactatgagggaagaggatctccagctggttctgtgggctgctgcagtgaaaagcaggaagaagatggccttgactttttaaataatttggaacccaaatttattacattagcagaagcatgcacaaagagataatgtcacagtgctacaattaggtctttgtcagacattctggaggtttcca

SEQ ID NO: 126530 - DNA, 5045 bp, Homo sapiens
  Payload ID: 4805
  Gene Symbol: DSG1
  Gene Name: desmoglein 1
  Uniprot ID: Q02413
  ENST ID: ENST00000257192
  CDS Start-End: 213-3362
ccagcccaagtttttagggtggggatccagactggttatacgtaccttcagtccttctcccagaggaaggcagaaacacctcaaagcctgcatgtaagaacatctactgagaaattattttaatcagacaccagctgagtgggagaaagaaaaagaacagagaagaacaaacaaaactcccttggtcttggatgtaagagaatccagcagagatggactggagtttcttcagagtagttgcaatgctgttcatttttctggtggtggtagaagttaacagtgaattccgaatccaggtaagagattataacactaaaaatggcaccatcaaatggcattcaatccgaaggcagaaacgtgaatggatcaagttcgcagcagcctgtcgtgaaggtgaagacaactcaaagaggaacccaatcgccaaaattcactcagattgtgctgcaaaccagcaagttacataccgcatctctggagtaggaattgatcagccaccatatgggatctttgtcattaatcagaaaactggtgaaattaatataacatccatagttgatcgagaggtcactcctttcttcattatctactgccgagctctgaactcaatgggccaagatttagagaggcctctagagctcagagtcagggttttggatataaatgacaaccctccagtgttttcaatggctacatttgcaggacaaatagaagaaaattctaatgcaaatacactggtgatgatactcaatgctactgacgcagatgaaccgaacaatttgaactcaaaaatagccttcaagattataagacaagaaccttcagattcaccaatgtttattatcaacagaaatactggagaaattcgaacgatgaataattttctagacagagagcaatacggccagtatgctcttgctgtaagaggctctgaccgagatggcggggcagatggcatgtcagcggaatgtgagtgcaacattaaaatcctcgatgtcaatgataatatcccttacatggaacagtcttcatataccatagaaattcaagaaaatactctaaattcaaatttgctcgagattagagtaattgatttggatgaagagttctcagctaactggatggcagtaattttctttatctctggaaatgaaggaaattggtttgagatagaaatgaatgaaagaacaaatgtgggaattttaaaggttgttaagcccttagattatgaagctatgcagagtctgcaactcagtattggtgtcagaaataaagctgaatttcatcattcaattatgtctcaatataaactgaaagcatctgcaatttctgtgactgtgttaaatgtaattgaaggcccagtgtttcgtccaggttcaaagacatatgttgtaactggtaatatgggatcaaatgataaagtgggagactttgtagctactgacctggacacaggtagaccttcaacgactgttaggtatgtaatgggaaataatccagctgacctgctagctgttgattcaagaacaggcaaactcactttgaaaaataaagttaccaaggaacagtacaatatgctcggaggaaaataccaaggaacgattctctctatagatgataatcttcaaagaacttgcactggtacaattaatattaacattcaaagttttggtaatgacgacaggactaatacagagccgaacactaaaattactaccaatactggcagacaagaaagtacttcttccactaactatgataccagcacaacttctactgactctagccaagtatattcttctgaacccggaaacggagccaaagatttgttatcagacaatgtacattttggtcctgctggcattggactcctcatcatgggattcttggtcttaggattggtcccatttttgatgatctgttgtgattgtggaggtgctcctcgtagtgcagctggctttgagcctgttcccgaatgttcagatggagcaattcattcatgggcagtagaaggaccacagcctgaacccagggatataaccactgtcataccacaaataccacctgataacgcaaatataattgaatgcattgacaactcaggagtttatacaaatgagtatggtggcagagaaatgcaagatctgggaggaggagagagaatgacaggatttgaactaacagagggagttaaaacttcaggaatgcctgagatatgtcaagaatactctggaacattaagaagaaattctatgagggaatgtagagaaggaggtctgaatatgaatttcatggaaagctacttctgtcagaaagcatatgcttacgcagatgaagatgaaggacgcccatctaatgactgtttgctcatatatgacatcgaaggtgtaggttcccctgctggctctgtgggttgttgtagcttcattggagaagacctggatgacagcttcttggataccctgggacctaaatttaagaagttggcagacatcagcctaggaaaagaatcatatccagaccttgatccttcttggccaccacaaagcactgaaccagtttgccttcctcaggaaacagagcccgttgttagtggacacccaccaatctccccacatttcggcactaccacagtaatttctgagagcacctatccctcgggacctggtgtactgcatcctaagcctattctcgatcctctgggctatggtaatgtcactgtgaccgagtcttacaccacctctgacactctgaagccctctgtgcacgttcacgataaccgaccagcatcaaacgtggtagtgacagagagagtggtcggcccaatctctggcgctgatttgcatggaatgttagagatgcctgacttgcgagatgggtcgaatgttatagtgacagaaagggtaatagcaccaagctctagtctacccacctctctgactatccatcatcctagagagtcttcaaatgtggtagtgacagaaagagtaatccaaccaacttccggcatgataggtagtctgagtatgcaccccgagttagccaatgcccacaatgtcattgtgacagagagggttgtttctggtgctggcgtaactggaattagtggcaccactgggatcagcggtggcataggcagcagtggcctggttggcaccagcatgggtgctgggagcggtgccctgagtggagctggcataagtggtggtggcattggcctgagcagcttgggagggacagccagcattggccacatgaggagttcctctgaccatcactttaaccaaaccattgggtccgcctcccctagcacagctcgaagtcgaatcacaaagtatagtaccgtgcaatatagcaagtagtcaggaccccagctcactttttcatagtcattgtggtttagatccaattcccaccactaaaaaaccaacaatgtgatttataacgcacaacttcgtgctcaggtcatctaggagcaaggtgagaaatcacaatgagaaaaataaatggaaacaccactgctaggggagagctctccttagcattcataaacttttctcttatattaggactaaggaactaaaacttgaggcagagtcttctttgtgcctgagtggcctgtagtccatctccagcatgtaactggccttacgatggcaattggcatcattctccttgctctgttttgcttttccatatagctcgagcaaaattcaaaaagaactaaatatgcaatatatgttcatatctatgggaaaaatctaaaatgtgtgccagatgccctgttggtttcacagataacataaataaaaattcaaccacagatttatacaagggttaaccattttttttaagtttgactacatagtcaagtccacaagccatcaagcactcctaccttaattattgcactagagaaaataaattccaaattaggaagtgtttcctaggaggaaaattccattagagagtggcaataggatgaggtttcttcagggtaaactagcaatgcctgagcctgaaccttaatgtggggcctcagttaaatctcctgtggagtcaaggattcttctgattctagtgtgtgtttagtgatagatgtagtcttgacgaatattgcttactggtgaggttgaggaatatcacactcgtctttccctttaccactgtggttttgacttaagaaagcaaaactcactaagtttacttctcgaattgaagcaagtgaggcctgacatggttgtcatcactagtggcaaatgaccttccaagtaagcagatgggaactgaattgtgttttcaggttttgtttttagtaggtgatattcattcgtatccagctctttattacatagctctgaagttaaaatgatttacataggccgagctgtggacaaaaaaaaaagaagcagcagcttgtagtatgcttaagctttggggaatttttttttaaggggatctaaaaaaatgtttttagaacatgtaaaatgtttaatggtgaaagttggaaaagaattcttctgtaaagtaataccatgctaattattcgcttttagtaagtaaagtagtggttgctttagcaaacctctgctgccattttgcaggaatcaaccaggaacctttagcagaattgacaatatggtgttgataagcatgaaataataatagaaacctattctgctagtttatctcaccctctaatttttctcactagcataaattttaaattcctgatttgatttgtcaataagatcttggcttatatatgctgatttataggtagtgtccaaattatatagtataacatatttttctagtttcaaaatttagtaatgtcctatttatgatatatcatttctgtgtgtttgctatgtagtattacccaattaaaaatctctaaaaagaattaaagcattctaagaaaaaggtaaatttactattgcatggtacagaaattttttctttcttaaatacaatgttactataagctcactaaaatgaaactctatatgacaaaataaaattagaaaaaaatttgccctgga

SEQ ID NO: 126531 - DNA, 1857 bp, Homo sapiens
  Payload ID: 4805
  Gene Symbol: DSG1
  Gene Name: desmoglein 1
  Uniprot ID: Q02413
  ENST ID: ENST00000462981
  CDS Start-End: 310-1536
agtctttacacatgaaccaagatggccgccatcactcacagtctatgctgttttttgtgctgagaaagctaatggagaaaatgaagaggaatcagaaacacaacaaaattagatggaagtaaccagggaagattttctaagtgaagttcaaattttaaatggatttcagaatttcctaaatagtattttttttttaggaaatctgaggatataaccactgtcataccacaaataccacctgataacgcaaatataattgaatgcattgacaactcaggagtttatacaaatgagtatggtggcagagaaatgcaagatctgggaggaggagagagaatgacaggatttgaactaacagagggagttaaaacttcaggaatgcctgagatatgtcaagaatactctggaacattaagaagaaattctatgagggaatgtagagaaggaggtctgaatatgaatttcatggaaagctacttctgtcagaaagcatatgcttacgcagatgaagatgaaggacgcccatctaatgactgtttgctcatatatgacatcgaaggtgtaggttcccctgctggctctgtgggttgttgtagcttcattggagaagacctggatgacagcttcttggataccctgggacctaaatttaagaagttggcagacatcagcctaggaaaagaatcatatccagaccttgatccttcttggccaccacaaagcactgaaccagtttgccttcctcaggaaacagagcccgttgttagtggacacccaccaatctccccacatttcggcactaccacagtaatttctgagagcacctatccctcgggacctggtgtactgcatcctaagcctattctcgatcctctgggctatggtaatgtcactgtgaccgagtcttacaccacctctgacactctgaagccctctgtgcacgttcacgataaccgaccagcatcaaacgtggtagtgacagagagagtggtcggcccaatctctggcgctgatttgcatggaatgttagagatgcctgacttgcgagatgggtcgaatgttatagtgacagaaagggtaatagcaccaagctctagtctacccacctctctgactatccatcatcctagagagtcttcaaatgtggtagtgacagaaagagtaatccaaccaacttccggcatgataggtagtctgagtatgcaccccgagttagccaatgcccacaatgtcattgtgacagagagggttgtttctggtgctggcgtaactggaattagtggcaccactgggatcagcggtggcataggcagcagtggcctggttggcaccagcatgggtgctgggagcggtgccctgagtggagctggcataagtggtggtggcattggcctgagcagcttgggagggacagccagcattggccacatgaggagttcctctgaccatcactttaaccaaaccattgggtccgcctcccctagcacagctcgaagtcgaatcacaaagtatagtaccgtgcaatatagcaagtagtcaggaccccagctcactttttcatagtcattgtggtttagatccaattcccaccactaaaaaaccaacaatgtgatttataacgcacaacttcgtgctcaggtcatctaggagcaaggtgagaaatcacaatgagaaaaataaatggaaacaccactgctaggggagagctctccttagcattcataaacttttctcttatattaggactaaggaactaaaacttgaggcagagtcttctttgtgcctgagtggcctgtagtccatctccagcatgtaactggccttacgatggcaattggcatcattctccttgctctg

SEQ ID NO: 126532 - DNA, 5831 bp, Homo sapiens
  Payload ID: 4806
  Gene Symbol: DSG2
  Gene Name: desmoglein 2
  Uniprot ID: Q14126
  ENST ID: ENST00000261590
  CDS Start-End: 210-3566
attttctcgcggcggccacacctggagccgcgcctttgggttgggctgggctgggccgcgcaaccgccacgggaagacagccctcggggcggggagggagagggtggccgggccggggggaggccggggccagggaggagccgagtgcgcgctcggggcaggcggcggcgcggagcggtgcggcggcgggaggcggaggcgagggtgcgatggcgcggagcccgggacgcgcgtacgccctgctgcttctcctgatctgctttaacgttggaagtggacttcacttacaggtcttaagcacaagaaatgaaaataagctgcttcctaaacatcctcatttagtgcggcaaaagcgcgcctggatcaccgcccccgtggctcttcgggagggagaggatctgtccaagaagaatccaattgccaagatacattctgatcttgcagaagaaagaggactcaaaattacttacaaatacactggaaaagggattacagagccaccttttggtatatttgtctttaacaaagatactggagaactgaatgttaccagcattcttgatcgagaagaaacaccattttttctgctaacaggttacgctttggatgcaagaggaaacaatgtagagaaacccttagagctacgcattaaggttcttgatatcaatgacaacgaaccagtgttcacacaggatgtctttgttgggtctgttgaagagttgagtgcagcacatactcttgtgatgaaaatcaatgcaacagatgcagatgagcccaataccctgaattcgaaaatttcctatagaatcgtatctctggagcctgcttatcctccagtgttctacctaaataaagatacaggagagatttatacaaccagtgttaccttggacagagaggaacacagcagctacactttgacagtagaagcaagagatggcaatggagaagttacagacaaacctgtaaaacaagctcaagttcagattcgtattttggatgtcaatgacaatatacctgtagtagaaaataaagtgcttgaagggatggttgaagaaaatcaagtcaacgtagaagttacgcgcataaaagtgttcgatgcagatgaaataggttctgataattggctggcaaattttacatttgcatcaggaaatgaaggaggttatttccacatagaaacagatgctcaaactaacgaaggaattgtgacccttattaaggaagtagattatgaagaaatgaagaatcttgacttcagtgttattgtcgctaataaagcagcttttcacaagtcgattaggagtaaatacaagcctacacccattcccatcaaggtcaaagtgaaaaatgtgaaagaaggcattcattttaaaagcagcgtcatctcaatttatgttagcgagagcatggatagatcaagcaaaggccaaataattggaaattttcaagcttttgatgaggacactggactaccagcccatgcaagatatgtaaaattagaagatagagataattggatctctgtggattctgtcacatctgaaattaaacttgcaaaacttcctgattttgaatctagatatgttcaaaatggcacatacactgtaaagattgtggccatatcagaagattatcctagaaaaaccatcactggcacagtccttatcaatgttgaagacatcaacgacaactgtcccacactgatagagcctgtgcagacaatctgtcacgatgcagagtatgtgaatgttactgcagaggacctggatggacacccaaacagtggccctttcagtttctccgtcattgacaaaccacctggcatggcagaaaaatggaaaatagcacgccaagaaagtaccagtgtgctgctgcaacaaagtgagaaaaagcttgggagaagtgaaattcagttcctgatttcagacaatcagggttttagttgtcctgaaaagcaggtccttacactcacagtttgtgagtgtctgcatggcagcggctgcagggaagcacagcatgactcctatgtgggcctgggacccgcagcaattgcgctcatgattttggcctttctgctcctgctattggtaccacttttactgctgatgtgccattgcggaaagggcgccaaaggctttacccccatacctggcaccatagagatgctgcatccttggaataatgaaggagcaccacctgaagacaaggtggtgccatcatttctgccagtggatcaagggggcagtctagtaggaagaaatggagtaggaggtatggccaaggaagccacgatgaaaggaagtagctctgcttccattgtcaaagggcaacatgagatgtccgagatggatggaaggtgggaagaacacagaagcctgctttctggtagagctacccagtttacaggggccacaggcgctatcatgaccactgaaaccacgaagaccgcaagggccacaggggcttccagagacatggccggagctcaggcagctgctgttgcactgaacgaagaattcttaagaaattatttcactgataaagcggcctcttacactgaggaagatgaaaatcacacagccaaagattgccttctggtttattctcaggaagaaactgaatcgctgaatgcttctattggttgttgcagttttattgaaggagagctagatgaccgcttcttagatgatttgggacttaaattcaagacactagctgaagtttgcctgggtcaaaaaatagatataaataaggaaattgagcagagacaaaaacctgccacagaaacaagtatgaacacagcttcacattcactctgtgagcaaactatggttaattcagagaatacctactcctctggcagtagcttcccagttccaaaatctttgcaagaagccaatgcagagaaagtaactcaggaaatagtcactgaaagatctgtgtcttctaggcaggcgcaaaaggtagctacacctcttcctgacccaatggcttctagaaatgtgatagcaacagaaacttcctatgtcacagggtccactatgccaccaaccactgtgatcctgggtcctagccagccacagagccttattgtgacagagagggtgtatgctccagcttctaccttggtagatcagccttatgctaatgaaggtacagttgtggtcactgaaagagtaatacagcctcatgggggtggatcgaatcctctggaaggcactcagcatcttcaagatgtaccttacgtcatggtgagggaaagagagagcttccttgcccccagctcaggtgtgcagcctactctggccatgcctaatatagcagtaggacagaatgtgacagtgacagaaagagttctagcacctgcttccactctgcaatccagttaccagattcccactgaaaattctatgacggctaggaacaccacggtgtctggagctggagtccctggccctctgccagattttggtttagaggaatctggtcattctaattctaccataaccacatcttccaccagagttaccaagcatagcactgtacagcattcttactcctaaacagcagtcagccacaaactgacccagagtttaattagcagtgactaatttcatgtttccaatgtacctgatttttcatgagccttacagacacacagagacacatacacattgatcttaaaatttttctcagtcactgatatgcaaaggaccacactgtctctgcttccaggagtattttagaaatgttccacaatttactgaagacatagagatgatgctgctgcttaggtgccttttagcaagctatgcaaacaatcctgataaaacaagatacatagagagtcaatctggcttctgagaatttaccaagtgaacagagtacctagttcatcagccgtccagtaaagcaacccaggaaactgactgggtctctttgcctaccgtattaacattaaacattgatgttctgtattctgtactttactgcacccagcagactttcaacaactcattgatccaaagatacatgcacagtctgagcaccagctatggtgctcataacttctttaagacttgaaccctttcaatctgtgtgattcattaaattggaccattgatgataagaatacacattgtatgtttctgtgcacatgacagtgtgtgtgtgtgcacgtacatactgtatagtcttaaaaatagcattatactggccaggggtggtggctaacgcctgtaatcccagcactttgggaggccgaggcgggtggatcaactgtggtcaggagtttgagatcagccaggccaacctggtgaaaccccgtctctactaaaaatacaaaaattagctgggcgtgatggtgggcgcctgtaatcccagctacttgggaggctgaggcaggagaatcacttgaacccgggaggcggaggttgcagtgagccgagatcgcaccattgcactccagtctgggcaacagagtgagattccgtctcaaaaaaaaaaagaaaaggaaaaaaaaatagcattatacctcttccttgtctcaaccgccatgaaaattctgaacactccaaattcagttgaataatccaaaacaaaatttataagtataaaataattttacttcttatagtaatagtatactttaaaaagcctcagggtatattatcttctaaacagctacaattcagtgcagctacattaaccaactatgttctctagttgagaacaactaggcctatttcactgctgtgtagcctcagtgcctaacatgggtgccaaataaatattcgtagaattacactgaattgtaaaaaccattcgtttttgtttacaattgccaaaaatctcaaaaggccctgtatttatgtaattctttgaaattattattttattttgatttctcagttattgactggctgggtgtgacttagtacataagtactcaatattataaaaacctcaaataattgacttgattttacacaacatccttcccttttctacaagttaatttttttacaaatcatttgggttatctcctaaataggttatattttattgcttctagaaacaatgtttcaaaatatatgtgcattatcagtaataatttgtataaatatttcccacaacaattttcataattttcaaagactaatttcttgactgaagatattttgctagggaagtgaaactttaaaattttgtagattttaaaaaatattgttgaatggtgtcatgcaaaggatttatatagtgtgctcccactaactgtacagatcaggacacatatttttagacatctaagtctgtagcttaaatggaggttactcttccatcatctagaattgtttacttagtaattgttgtttcttttattattatagacttactatcagttttattttgccaagtatgcaacaggtatatcactagtatatgaaaatgtaaatatcacttgtgtactcaaacaaaagttggtcttaagcttccaccttgagcagccttggaaacctaacctgcctcttttagcataatcacattttctaaatgattttctttgttcctgaaaaagtgatttgtattagttttacatttgttttttggaagattatatttgtatatgtatcatcataaaatatttaaataaaaagtatctttagagtgaccctttccccatagatttttatttctctattatattttacaaggaatataactcagtttgttagggagagtgccttaaaggcaggtgtttcttggactttgttatttaattagatctgcttgcaataaaaaaagttgtcggttatctaaaattcaaa

SEQ ID NO: 126533 - DNA, 1081 bp, Homo sapiens
  Payload ID: 4806
  Gene Symbol: DSG2
  Gene Name: desmoglein 2
  ENST ID: ENST00000585206
  CDS Start-End: 33-731
gtgcggcggcgggaggcggaggcgagggtgcgatggcgcggagcccgggacgcgcgtacgccctgctgcttctcctgatctgctttaacgttggaagtggacttcacttacaggtcttaagcacaagaaatgaaaataagctgcttcctaaacatcctcatttagtgcggcaaaagcgcgcctggatcaccgcccccgtggctcttcgggagggagaggatctgtccaagaagaatccaattgccaagatacattctgatcttgcagaagaaagaggactcaaaattacttacaaatacactggaaaagggattacagagccaccttttggtatatttgtctttaacaaagatactggagaactgaatgttaccagcattcttgatcgagaagaaacaccattttttctgctaacaggttacgctttggatgcaagaggaaacaatgtagagaaacccttagagctacgcattaaggttcttgatatcaatgacaacgaaccagtgttcacacaggatgtctttgttgggtctgttgaagagttgagtgcagcacatactcttgtgatgaaaatcaatgcaacagatgcagatgagcccaataccctgaattcgaaaatttcctatagaatcgtatctctggagcctgcttatcctccagtgttctacctaaataaagatacaggagagatttatacaaccagtgttaccttggacagagaggtaagttaatatgttatgttgcccatctttaaactctctatcctttccagtttctcctctctttttcttttctaattttcttattttgttctgtattccttatccataggataactcttggaattactctcttttagggatgtgctgtccaatatgggccatgtgactattgagcacttaaaatgtgactggcccaaattgtaatgtgctgtatgcacgttgaatgtgtaatatatgcaccagatttgaaaaacttaatatgaaaaatgcaaaatatgaccttaatgttttttgtgatcattgcatgttaaaataatattttagatatcatagattaaataaaatatacttgtttaaaa

SEQ ID NO: 126534 - DNA, 5525 bp, Homo sapiens
  Payload ID: 4807
  Gene Symbol: DSG3
  Gene Name: desmoglein 3
  Uniprot ID: P32926
  ENST ID: ENST00000257189
  CDS Start-End: 84-3083
ttttcttagacatcaactgcagacggctggcaggatagaagcagcggctcacttggactttttcaccagggaaatcagagacaatgatggggctcttccccagaactacaggggctctggccatcttcgtggtggtcatattggttcatggagaattgcgaatagagactaaaggtcaatatgatgaagaagagatgactatgcaacaagctaaaagaaggcaaaaacgtgaatgggtgaaatttgccaaaccctgcagagaaggagaagataactcaaaaagaaacccaattgccaagattacttcagattaccaagcaacccagaaaatcacctaccgaatctctggagtgggaatcgatcagccgccttttggaatctttgttgttgacaaaaacactggagatattaacataacagctatagtcgaccgggaggaaactccaagcttcctgatcacatgtcgggctctaaatgcccaaggactagatgtagagaaaccacttatactaacggttaaaattttggatattaatgataatcctccagtattttcacaacaaattttcatgggtgaaattgaagaaaatagtgcctcaaactcactggtgatgatactaaatgccacagatgcagatgaaccaaaccacttgaattctaaaattgccttcaaaattgtctctcaggaaccagcaggcacacccatgttcctcctaagcagaaacactggggaagtccgtactttgaccaattctcttgaccgagagcaagctagcagctatcgtctggttgtgagtggtgcagacaaagatggagaaggactatcaactcaatgtgaatgtaatattaaagtgaaagatgtcaacgataacttcccaatgtttagagactctcagtattcagcacgtattgaagaaaatattttaagttctgaattacttcgatttcaagtaacagatttggatgaagagtacacagataattggcttgcagtatatttctttacctctgggaatgaaggaaattggtttgaaatacaaactgatcctagaactaatgaaggcatcctgaaagtggtgaaggctctagattatgaacaactacaaagcgtgaaacttagtattgctgtcaaaaacaaagctgaatttcaccaatcagttatctctcgataccgagttcagtcaaccccagtcacaattcaggtaataaatgtaagagaaggaattgcattccgtcctgcttccaagacatttactgtgcaaaaaggcataagtagcaaaaaattggtggattatatcctgggaacatatcaagccatcgatgaggacactaacaaagctgcctcaaatgtcaaatatgtcatgggacgtaacgatggtggatacctaatgattgattcaaaaactgctgaaatcaaatttgtcaaaaatatgaaccgagattctactttcatagttaacaaaacaatcacagctgaggttctggccatagatgaatacacgggtaaaacttctacaggcacggtatatgttagagtacccgatttcaatgacaattgtccaacagctgtcctcgaaaaagatgcagtttgcagttcttcaccttccgtggttgtctccgctagaacactgaataatagatacactggcccctatacatttgcactggaagatcaacctgtaaagttgcctgccgtatggagtatcacaaccctcaatgctacctcggccctcctcagagcccaggaacagatacctcctggagtataccacatctccctggtacttacagacagtcagaacaatcggtgtgagatgccacgcagcttgacactggaagtctgtcagtgtgacaacaggggcatctgtggaacttcttacccaaccacaagccctgggaccaggtatggcaggccgcactcagggaggctggggcctgccgccatcggcctgctgctccttggtctcctgctgctgctgttggccccccttctgctgttgacctgtgactgtggggcaggttctactgggggagtgacaggtggttttatcccagttcctgatggctcagaaggaacaattcatcagtggggaattgaaggagcccatcctgaagacaaggaaatcacaaatatttgtgtgcctcctgtaacagccaatggagccgatttcatggaaagttctgaagtttgtacaaatacgtatgccagaggcacagcggtggaaggcacttcaggaatggaaatgaccactaagcttggagcagccactgaatctggaggtgctgcaggctttgcaacagggacagtgtcaggagctgcttcaggattcggagcagccactggagttggcatctgttcctcagggcagtctggaaccatgagaacaaggcattccactggaggaaccaataaggactacgctgatggggcgataagcatgaattttctggactcctacttttctcagaaagcatttgcctgtgcggaggaagacgatggccaggaagcaaatgactgcttgttgatctatgataatgaaggcgcagatgccactggttctcctgtgggctccgtgggttgttgcagttttattgctgatgacctggatgacagcttcttggactcacttggacccaaatttaaaaaacttgcagagataagccttggtgttgatggtgaaggcaaagaagttcagccaccctctaaagacagcggttatgggattgaatcctgtggccatcccatagaagtccagcagacaggatttgttaagtgccagactttgtcaggaagtcaaggagcttctgctttgtccacctctgggtctgtccagccagctgtttccatccctgaccctctgcagcatggtaactatttagtaacggagacttactcggcttctggttccctcgtgcaaccttccactgcaggctttgatccacttctcacacaaaatgtgatagtgacagaaagggtgatctgtcccatttccagtgttcctggcaacctagctggcccaacgcagctacgagggtcacatactatgctctgtacagaggatccttgctcccgtctaatatgaccagaatgagctggaataccacactgaccaaatctggatctttggactaaagtattcaaaatagcatagcaaagctcactgtattgggctaataatttggcacttattagcttctctcataaactgatcacgattataaattaaatgtttgggttcataccccaaaagcaatatgttgtcactcctaattctcaagtactattcaaattgtagtaaatcttaaagtttttcaaaaccctaaaatcatattcgccaggaaattttcctaaacattcttaagcttctatttttcccctgccaaaggaaggtgtttatcattttaaaatgcaatgtgatttagtggattaagcaggagcgctggttcttgtctccattgccttttcttatatcattgataatgatgtaagaatcacaaggggccgggcgcggtggctcacgcctgtaatcccagcactttgggaggccgaggcaggtggatcatgaggtcaggagatcgagaccatcctggctaacaaggtgaaaccccgtctctactaaaaatacaaaaaattagccgggcgcagtggcgggcgcctgtagtcccagctactcgggaggctgaggcaggagaatggcatgaacccgggaagcggagcttgcagtgagccgagattgcgccactgcagtccgcagtccggcctgggcgacagagcgagactccgtctcaaaaaaaaaaaaaaaaaaagaatcacaaggtatttgctaaagcattttgagctgcttggaaaaagggaagtagttgcagtagagtttcttccatcttcttggtgctgggaagccatatatgtgtcttttactcaagctaaggggtataagcttatgtgttgaatttgctacatctatatttcacatattctcacaataagagaattttgaaatagaaatatcatagaacatttaagaaagtttagtataaataatattttgtgtgttttaatccctttgaagggatctatccaaagaaaatattttacactgagctccttcctacacgtctcagtaacagatcctgtgttagtctttgaaaatagctcattttttaaatgtcagtgagtagatgtagcatacatatgatgtataatgacgtgtattatgttaacaatgtctgcagattttgtaggaatacaaaacatggccttttttataagcaaaacgggccaatgactagaataacacatagggcaatctgtgaatatgtattataagcagcattccagaaaagtagttggtgaaataattttcaagtcaaaaagggatatggaaagggaattatgagtaacctctattttttaagccttgcttttaaattaaacagctacagccatttaagccttgaggataataaagcttgagagtaataatgttaggttagcaaaggtttagatgtatcacttcatgcatgctaccatgatagtaatgcagctcttcgagtcatttctggtcattcaagatattcacccttttgcccatagaaagcaccctacctcacctgcttactgacattgtcttagctgatcacaagatcattatcagcctccattattccttactgtatataaaatacagagttttatattttcctttcttcgtttttcaccatattcaaaacctaaatttgtttttgcagatggaatgcaaagtaatcaagtgtttgtgctttcacctagaagggtgtggtcctgaaggaaagaggtcccctaaatatcccccaccctggtgctcctccctctccctggtaccctgactaccaggaagtcaggtgctagagcagctggagaagtgcaggcagcctgtgcttccacagatgggggtgctgctgcaacaaggctttcaatgtgcccatcttaggtgggagaagctagatcctgtgcagcagcctggtaagtcctgaggaggttccattgctcttcctgctgctgtcctttgcttctcaacggtggctcgctctacagtctagagcacatgcagctaacttgtgcctctgcttatgcatgagggttaaattaacaaccataaccttcatttgaagttcaaaggtgtattcaggatcctcaaagcattttaaccttgccgcttaaaacccaatttaccgtgaaatgggaattttgctgcattgttaaactgtagtggaaaccatgctatagtaataaaggttatataagagagaaattgaaattaaatgtgtttttaaatttcaaaaaaaaatcaatctttaggatgacttaaaaattgatttgccatgtaaaatgtatctgcattttttacacaaaacttgttttaagcataaaattttaaaactgtactacttgatgtattatacattttgaaccatatgtattaaaccataaacagtataatgttgttataataaaacaggcaataaatttataaataaaagctgaa

SEQ ID NO: 126535 - DNA, 3579 bp, Homo sapiens
  Payload ID: 4808
  Gene Symbol: DSG4
  Gene Name: desmoglein 4
  Uniprot ID: Q86SJ6
  ENST ID: ENST00000308128
  CDS Start-End: 136-3258
caccacagttatcacccatgccctcctaaaagggtgtctcaaagcatatctttctgtagagcagaattcggaactgagaagacgagggctcaaattgaatctcacaggatttgcgtgcaagagaaacccaaaggaatggattggctcttcttcagaaacatttgccttttgatcattctaatggtggtgatggaagtaaacagtgaatttattgttgaggtgaaggaatttgacattgaaaatggcactacaaaatggcaaacagtcagaagacaaaagcgggagtggatcaagtttgccgcagcctgtcgagaaggagaggacaactcgaagaggaaccccattgccaaaattcgatcagactgcgaatcgaaccagaagataacataccggatttctggagtagggattgatcgaccaccatatggggtattcaccattaatcctcgcactggggaaattaacatcacttcagtggtagacagagaaataactccacttttcttgatctattgccgggctctgaattcacggggtgaagatttagaaaggcctcttgagcttagagtcaaagttatggacataaatgataacgctccagtcttttcgcaaagtgtatacacagccagcattgaagaaaatagtgatgccaatacattggtagtaaagttatgtgccacagatgcagatgaagaaaatcatctgaattctaaaattgcctacaagatcgtctctcaggagccatcaggtgcacccatgttcattctgaataggtacactggagaagtctgcaccatgtccagtttcttggacagagagcaacacagtatgtacaacctggttgtgagaggctcagatcgggatggagctgcagatggactgtcttctgagtgtgactgtagaatcaaggttttagacgtcaacgataatttccccaccttagagaaaacttcatactcagccagtattgaagagaattgtttaagttcggaactgatacgattacaagcaattgatcttgatgaagaaggcactgataactggttggctcaatatttaattctctctggaaatgatgggaattggttcgatattcaaacagatccacaaaccaatgaaggcattttgaaagttgtcaagatgctggattatgaacaagcacctaacattcagcttagtatcggagttaaaaaccaagctgattttcactactccgttgcttctcaattccaaatgcacccaacccctgtgagaattcaagttgttgatgtgagagaaggacctgcatttcatccaagtactatggcttttagtgtgcgggaaggaataaaaggaagttccttattgaattatgtgcttggcacatatacagccatagatttggacacaggaaaccctgcaacagatgtcagatatatcatagggcatgatgcaggcagctggttaaaaattgattcaagaactggtgagatacaattttctagagaatttgataagaagtcaaaatatattatcaatgggatatacacagcagagatcctggctatagatgatggctctggaaaaacagctacaggaaccatatgtattgaggttcctgatatcaatgattattgtccaaacatttttcctgaaagaagaaccatctgcattgactctccatcagtccttatctctgttaatgaacattcttatgggtctccgtttactttctgtgttgttgatgagccaccaggaatagctgacatgtgggatgtcagatcaacaaatgctacctcggcaatccttacggctaagcaggttttatctccaggattttatgaaatcccaatcctggtgaaggacagctataacagagcatgtgaattggcacaaatggtgcagttatatgcctgtgattgcgatgacaaccacatgtgcctggactctggtgccgcgggcatctacacagaggacataactggtgacacgtatgggcctgtcactgaagaccaagctggagtttcaaatgttggtcttggaccagcagggattggcatgatggttctgggcatcctgctactgattttggctccactcttgctgctcctgtgttgctgcaaacagagacagccagaaggcctgggaacaagatttgctcctgtgcctgagggcggagaaggagtgatgcagtcttggagaattgaaggggcccatcccgaggacagggatgtgtcaaatatatgtgcacccatgacagcctcaaatacccaggatcggatggattcctctgaaatctacaccaacacctatgcagccgggggcacggtggaaggaggtgtatcgggagtggagctcaacacaggtatggggacagccgttggcctcatggccgcaggggccgcaggagcctcaggggccgcaaggaagaggagctctaccatgggaaccctgcgggactacgctgacgcagacatcaacatggctttcttggacagctacttctcggagaaagcgtatgcttatgcagatgaagatgaaggtcgaccagccaatgactgcttgctcatttatgaccacgagggagtcgggtctcccgtaggctctattggttgttgcagttggattgtggatgacttagatgaaagctgcatggaaactttagatccaaaatttaggactcttgctgagatctgcttaaacacagaaattgaaccatttccttcacaccaggcttgtataccaatcagtactgacctccctttgctcggacctaattactttgttaatgaatcttcaggattgactccctcagaagttgaattccaagaagaaatggcagcatctgaacccgtggtccatggggatattattgtgactgagacttacggtaatgctgatccatgtgtgcaacccactacaattatttttgatcctcagcttgcacccaatgttgtagtaaccgaagcagtaatggcacctgtctatgatattcaagggaatatttgtgtacctgctgagttagcagattacaacaatgtaatctatgctgagagagtactggctagtcctggtgtgcctgacatgagcaatagtagcacgactgagggttgtatgggacctgtgatgagcggcaatattttagtagggccagaaattcaagtgatgcaaatgatgagtccagaccttcccataggccaaaccgttggctccacatcccccatgacatctcgacacagagtaacacgatacagtaacatacattacacccaacagtaagtgctttatggtcagtattctatgtggagaccttgcaccttgtaatcatcaatacatccaccaaaaatatataatgtaccatatatattaatagtcaacaaatactcagatattctaaggtcaatgccattatttgattataccattttgagggtgaatatggctaggcactttagataagcctttttaaaattctttctgattttaaataatgcgtcaaaaaatgtgcagaaaatgtattgcatcccttgatactgtctaacgaatagcacataactcatattgtgaatcctatgggtcttgaggcctgtagaaccaatc

SEQ ID NO: 126536 - DNA, 4526 bp, Homo sapiens
  Payload ID: 4808
  Gene Symbol: DSG4
  Gene Name: desmoglein 4
  Uniprot ID: Q86SJ6
  ENST ID: ENST00000359747
  CDS Start-End: 30-3209
ggatttgcgtgcaagagaaacccaaaggaatggattggctcttcttcagaaacatttgccttttgatcattctaatggtggtgatggaagtaaacagtgaatttattgttgaggtgaaggaatttgacattgaaaatggcactacaaaatggcaaacagtcagaagacaaaagcgggagtggatcaagtttgccgcagcctgtcgagaaggagaggacaactcgaagaggaaccccattgccaaaattcgatcagactgcgaatcgaaccagaagataacataccggatttctggagtagggattgatcgaccaccatatggggtattcaccattaatcctcgcactggggaaattaacatcacttcagtggtagacagagaaataactccacttttcttgatctattgccgggctctgaattcacggggtgaagatttagaaaggcctcttgagcttagagtcaaagttatggacataaatgataacgctccagtcttttcgcaaagtgtatacacagccagcattgaagaaaatagtgatgccaatacattggtagtaaagttatgtgccacagatgcagatgaagaaaatcatctgaattctaaaattgcctacaagatcgtctctcaggagccatcaggtgcacccatgttcattctgaataggtacactggagaagtctgcaccatgtccagtttcttggacagagagcaacacagtatgtacaacctggttgtgagaggctcagatcgggatggagctgcagatggactgtcttctgagtgtgactgtagaatcaaggttttagacgtcaacgataatttccccaccttagagaaaacttcatactcagccagtattgaagagaattgtttaagttcggaactgatacgattacaagcaattgatcttgatgaagaaggcactgataactggttggctcaatatttaattctctctggaaatgatgggaattggttcgatattcaaacagatccacaaaccaatgaaggcattttgaaagttgtcaagatgctggattatgaacaagcacctaacattcagcttagtatcggagttaaaaaccaagctgattttcactactccgttgcttctcaattccaaatgcacccaacccctgtgagaattcaagttgttgatgtgagagaaggacctgcatttcatccaagtactatggcttttagtgtgcgggaaggaataaaaggaagttccttattgaattatgtgcttggcacatatacagccatagatttggacacaggaaaccctgcaacagatgtcagatatatcatagggcatgatgcaggcagctggttaaaaattgattcaagaactggtgagatacaattttctagagaatttgataagaagtcaaaatatattatcaatgggatatacacagcagagatcctggctatagatgatggctctggaaaaacagctacaggaaccatatgtattgaggttcctgatatcaatgattattgtccaaacatttttcctgaaagaagaaccatctgcattgactctccatcagtccttatctctgttaatgaacattcttatgggtctccgtttactttctgtgttgttgatgagccaccaggaatagctgacatgtgggatgtcagatcaacaaatgctacctcggcaatccttacggctaagcaggttttatctccaggattttatgaaatcccaatcctggtgaaggacagctataacagagcatgtgaattggcacaaatggtgcagttatatgcctgtgattgcgatgacaaccacatgtgcctggactctggtgccgcgggcatctacacagaggacataactggtgacacgtatgggcctgtcactgaagaccaagctggagtttcaaatgttggtcttggaccagcagggattggcatgatggttctgggcatcctgctactgattttggctccactcttgctgctcctgtgttgctgcaaacagagacagccagaaggcctgggaacaagatttgctcctgtgcctgagggcggagaaggagtgatgcagtcttggagaattgaaggggcccatcccgaggacaggctttttagcgcctacgccttgccgggtggtggtggcaccgcagacggcggcggcagcgttttaggcagatgcgcgctgcaggcaactccagcgctgttaaaccaacatcctcccttttcagaaatctacaccaacacctatgcagccgggggcacggtggaaggaggtgtatcgggagtggagctcaacacaggtatggggacagccgttggcctcatggccgcaggggccgcaggagcctcaggggccgcaaggaagaggagctctaccatgggaaccctgcgggactacgctgacgcagacatcaacatggctttcttggacagctacttctcggagaaagcgtatgcttatgcagatgaagatgaaggtcgaccagccaatgactgcttgctcatttatgaccacgagggagtcgggtctcccgtaggctctattggttgttgcagttggattgtggatgacttagatgaaagctgcatggaaactttagatccaaaatttaggactcttgctgagatctgcttaaacacagaaattgaaccatttccttcacaccaggcttgtataccaatcagtactgacctccctttgctcggacctaattactttgttaatgaatcttcaggattgactccctcagaagttgaattccaagaagaaatggcagcatctgaacccgtggtccatggggatattattgtgactgagacttacggtaatgctgatccatgtgtgcaacccactacaattatttttgatcctcagcttgcacccaatgttgtagtaaccgaagcagtaatggcacctgtctatgatattcaagggaatatttgtgtacctgctgagttagcagattacaacaatgtaatctatgctgagagagtactggctagtcctggtgtgcctgacatgagcaatagtagcacgactgagggttgtatgggacctgtgatgagcggcaatattttagtagggccagaaattcaagtgatgcaaatgatgagtccagaccttcccataggccaaaccgttggctccacatcccccatgacatctcgacacagagtaacacgatacagtaacatacattacacccaacagtaagtgctttatggtcagtattctatgtggagaccttgcaccttgtaatcatcaatacatccaccaaaaatatataatgtaccatatatattaatagtcaacaaatactcagatattctaaggtcaatgccattatttgattataccattttgagggtgaatatggctaggcactttagataagcctttttaaaattctttctgattttaaataatgcgtcaaaaaatgtgcagaaaatgtattgcatcccttgatactgtctaacgaatagcacataactcatattgtgaatcctatgggtcttgaggcctgtagaaccaatcttgtaaaccaagatgccttgttcttggaagttacaaaagaagccctgtctacatccaccagccatatttttcgttagggaaatatttatattaaaatttttaattgaaaagttgaatgaaatgtacattctgaaaggaaattgaaaaggaacgtagagtatctgtcaatatctttagatatctgaagtcatttgtctcttcaaaagatttttcaatattatgcgctattaagcaataggagatgcttaatataataagaaaagagtttgccaactgaaagcatggctggaaatggttcatcaaagaaaaatatatatttttattgaactttattgatttatatgattaactgtaaattaatctagaatagcaaaaaaaaatgacaatcctaaagtagaaagagttattggggaaatattagagttttccccacttacagggaattttttccctactgttgccaattatgtcagaaaaatacatgaaatatggcttaaccaatttcattgacctgaatcgtagagctttcaattggcaaccagatattctccaaaagcactctgtagttattcatatattctacaatatttacttagaagcaactaggtgttgggtgctagtcttggctctgtgaatatacaggtaaagaagacagacatggtttctgccttcatagagcttctattcatttctagacttaaaataaaactctgggatatggctttaagttcctaacaacaataattaaccaactacttaagtccattaccaagttgtgtttctctttgcaacactactgtttatgttgaataaataaaatggaaacacattgcttacttttcgtaggcataaagctgacttgagaaaaagaatctctagccaggtaattttacttaattctgtaaaatatgtatacagtagcagcaataatgtgactgagataatgtaaatgaaataaacttattttcaaggcttaatccttttgaaaggaaataa

SEQ ID NO: 126537 - DNA, 9796 bp, Homo sapiens
  Payload ID: 4809
  Gene Symbol: DSP
  Gene Name: desmoplakin
  Uniprot ID: P15924
  ENST ID: ENST00000379802
  CDS Start-End: 342-8957
aagaaaccggccaggtgtggcctaggcgcccagtgccagcggggaggagactcgctccgccgccgaccaacaccaacacccagctccgacgcagctcctctgcgcccttgccgccctccgagccacagctttcctcccgctcctgcccccggcccgtcgccgtctccgcgctcgcagcggcctcgggagggcccaggtagcgagcagcgacctcgcgagccttccgcactcccgcccggttccccggccgtccgcctatccttggccccctccgctttctccgcgccggcccgcctcgcttatgcctcggcgctgagccgctctcccgattgcccgccgacatgagctgcaacggaggctcccacccgcggatcaacactctgggccgcatgatccgcgccgagtctggcccggacctgcgctacgaggtgaccagcggcggcgggggcaccagcaggatgtactattctcggcgcggcgtgatcaccgaccagaactcggacggctactgtcaaaccggcacgatgtccaggcaccagaaccagaacaccatccaggagctgctgcagaactgctccgactgcttgatgcgagcagagctcatcgtgcagcctgaattgaagtatggagatggaatacaactgactcggagtcgagaattggatgagtgttttgcccaggccaatgaccaaatggaaatcctcgacagcttgatcagagagatgcggcagatgggccagccctgtgatgcttaccagaaaaggcttcttcagctccaagagcaaatgcgagccctttataaagccatcagtgtccctcgagtccgcagggccagctccaagggtggtggaggctacacttgtcagagtggctctggctgggatgagttcaccaaacatgtcaccagtgaatgtttggggtggatgaggcagcaaagggcggagatggacatggtggcctggggtgtggacctggcctcagtggagcagcacattaacagccaccggggcatccacaactccatcggcgactatcgctggcagctggacaaaatcaaagccgacctgcgcgagaaatctgcgatctaccagttggaggaggagtatgaaaacctgctgaaagcgtcctttgagaggatggatcacctgcgacagctgcagaacatcattcaggccacgtccagggagatcatgtggatcaatgactgcgaggaggaggagctgctgtacgactggagcgacaagaacaccaacatcgctcagaaacaggaggccttctccatacgcatgagtcaactggaagttaaagaaaaagagctcaataagctgaaacaagaaagtgaccaacttgtcctcaatcagcatccagcttcagacaaaattgaggcctatatggacactctgcagacgcagtggagttggattcttcagatcaccaagtgcattgatgttcatctgaaagaaaatgctgcctactttcagttttttgaagaggcgcagtctactgaagcatacctgaaggggctccaggactccatcaggaagaagtacccctgcgacaagaacatgcccctgcagcacctgctggaacagatcaaggagctggagaaagaacgagagaaaatccttgaatacaagcgtcaggtgcagaacttggtaaacaagtctaagaagattgtacagctgaagcctcgtaacccagactacagaagcaataaacccattattctcagagctctctgtgactacaaacaagatcagaaaatcgtgcataagggggatgagtgtatcctgaaggacaacaacgagcgcagcaagtggtacgtgacgggcccgggaggcgttgacatgcttgttccctctgtggggctgatcatccctcctccgaacccactggccgtggacctctcttgcaagattgagcagtactacgaagccatcttggctctgtggaaccagctctacatcaacatgaagagcctggtgtcctggcactactgcatgattgacatagagaagatcagggccatgacaatcgccaagctgaaaacaatgcggcaggaagattacatgaagacgatagccgaccttgagttacattaccaagagttcatcagaaatagccaaggctcagagatgtttggagatgatgacaagcggaaaatacagtctcagttcaccgatgcccagaagcattaccagaccctggtcattcagctccctggctatccccagcaccagacagtgaccacaactgaaatcactcatcatggaacctgccaagatgtcaaccataataaagtaattgaaaccaacagagaaaatgacaagcaagaaacatggatgctgatggagctgcagaagattcgcaggcagatagagcactgcgagggcaggatgactctcaaaaacctccctctagcagaccagggatcttctcaccacatcacagtgaaaattaacgagcttaagagtgtgcagaatgattcacaagcaattgctgaggttctcaaccagcttaaagatatgcttgccaacttcagaggttctgaaaagtactgctatttacagaatgaagtatttggactatttcagaaactggaaaatatcaatggtgttacagatggctacttaaatagcttatgcacagtaagggcactgctccaggctattctccaaacagaagacatgttaaaggtttatgaagccaggctcactgaggaggaaactgtctgcctggacctggataaagtggaagcttaccgctgtggactgaagaaaataaaaaatgacttgaacttgaagaagtcgttgttggccactatgaagacagaactacagaaagcccagcagatccactctcagacttcacagcagtatccactttatgatctggacttgggcaagttcggtgaaaaagtcacacagctgacagaccgctggcaaaggatagataaacagatcgactttaggttatgggacctggagaaacaaatcaagcaattgaggaattatcgtgataactatcaggctttctgcaagtggctctatgatgctaaacgccgccaggattccttagaatccatgaaatttggagattccaacacagtcatgcggtttttgaatgagcagaagaacttgcacagtgaaatatctggcaaacgagacaaatcagaggaagtacaaaaaattgctgaactttgcgccaattcaattaaggattatgagctccagctggcctcatacacctcaggactggaaactctgctgaacatacctatcaagaggaccatgattcagtccccttctggggtgattctgcaagaggctgcagatgttcatgctcggtacattgaactacttacaagatctggagactattacaggttcttaagtgagatgctgaagagtttggaagatctgaagctgaaaaataccaagatcgaagttttggaagaggagctcagactggcccgagatgccaactcggaaaactgtaataagaacaaattcctggatcagaacctgcagaaataccaggcagagtgttcccagttcaaagcgaagcttgcgagcctggaggagctgaagagacaggctgagctggatgggaagtcggctaagcaaaatctagacaagtgctacggccaaataaaagaactcaatgagaagatcacccgactgacttatgagattgaagatgaaaagagaagaagaaaatctgtggaagacagatttgaccaacagaagaatgactatgaccaactgcagaaagcaaggcaatgtgaaaaggagaaccttggttggcagaaattagagtctgagaaagccatcaaggagaaggagtacgagattgaaaggttgagggttctactgcaggaagaaggcacccggaagagagaatatgaaaatgagctggcaaaggtaagaaaccactataatgaggagatgagtaatttaaggaacaagtatgaaacagagattaacattacgaagaccaccatcaaggagatatccatgcaaaaagaggatgattccaaaaatcttagaaaccagcttgatagactttcaagggaaaatcgagatctgaaggatgaaattgtcaggctcaatgacagcatcttgcaggccactgagcagcgaaggcgagctgaagaaaacgcccttcagcaaaaggcctgtggctctgagataatgcagaagaagcagcatctggagatagaactgaagcaggtcatgcagcagcgctctgaggacaatgcccggcacaagcagtccctggaggaggctgccaagaccattcaggacaaaaataaggagatcgagagactcaaagctgagtttcaggaggaggccaagcgccgctgggaatatgaaaatgaactgagtaaggtaagaaacaattatgatgaggagatcattagcttaaaaaatcagtttgagaccgagatcaacatcaccaagaccaccatccaccagctcaccatgcagaaggaagaggataccagtggctaccgggctcagatagacaatctcacccgagaaaacaggagcttatctgaagaaataaagaggctgaagaacactctaacccagaccacagagaatctcaggagggtggaagaagacatccaacagcaaaaggccactggctctgaggtgtctcagaggaaacagcagctggaggttgagctgagacaagtcactcagatgcgaacagaggagagcgtaagatataagcaatctcttgatgatgctgccaaaaccatccaggataaaaacaaggagatagaaaggttaaaacaactgatcgacaaagaaacaaatgaccggaaatgcctggaagatgaaaacgcgagattacaaagggtccagtatgacctgcagaaagcaaacagtagtgcgacggagacaataaacaaactgaaggttcaggagcaagaactgacacgcctgaggatcgactatgaaagggtttcccaggagaggactgtgaaggaccaggatatcacgcggttccagaactctctgaaagagctgcagctgcagaagcagaaggtggaagaggagctgaatcggctgaagaggaccgcgtcagaagactcctgcaagaggaagaagctggaggaagagctggaaggcatgaggaggtcgctgaaggagcaagccatcaaaatcaccaacctgacccagcagctggagcaggcatccattgttaagaagaggagtgaggatgacctccggcagcagagggacgtgctggatggccacctgagggaaaagcagaggacccaggaagagctgaggaggctctcttctgaggtcgaggccctgaggcggcagttactccaggaacaggaaagtgtcaaacaagctcacttgaggaatgagcatttccagaaggcgatagaagataaaagcagaagcttaaatgaaagcaaaatagaaattgagaggctgcagtctctcacagagaacctgaccaaggagcacttgatgttagaagaagaactgcggaacctgaggctggagtacgatgacctgaggagaggacgaagcgaagcggacagtgataaaaatgcaaccatcttggaactaaggagccagctgcagatcagcaacaaccggaccctggaactgcaggggctgattaatgatttacagagagagagggaaaatttgagacaggaaattgagaaattccaaaagcaggctttagaggcatctaataggattcaggaatcaaagaatcagtgtactcaggtggtacaggaaagagagagccttctggtgaaaatcaaagtcctggagcaagacaaggcaaggctgcagaggctggaggatgagctgaatcgtgcaaaatcaactctagaggcagaaaccagggtgaaacagcgcctggagtgtgagaaacagcaaattcagaatgacctgaatcagtggaagactcaatattcccgcaaggaggaggctattaggaagatagaatcggaaagagaaaagagtgagagagagaagaacagtcttaggagtgagatcgaaagactccaagcagagatcaagagaattgaagagaggtgcaggcgtaagctggaggattctaccagggagacacagtcacagttagaaacagaacgctcccgatatcagagggagattgataaactcagacagcgcccatatgggtcccatcgagagacccagactgagtgtgagtggaccgttgacacctccaagctggtgtttgatgggctgaggaagaaggtgacagcaatgcagctctatgagtgtcagctgatcgacaaaacaaccttggacaaactattgaaggggaagaagtcagtggaagaagttgcttctgaaatccagccattccttcggggtgcaggatctatcgctggagcatctgcttctcctaaggaaaaatactctttggtagaggccaagagaaagaaattaatcagcccagaatccacagtcatgcttctggaggcccaggcagctacaggtggtataattgatccccatcggaatgagaagctgactgtcgacagtgccatagctcgggacctcattgacttcgatgaccgtcagcagatatatgcagcagaaaaagctatcactggttttgatgatccattttcaggcaagacagtatctgtttcagaagccatcaagaaaaatttgattgatagagaaaccggaatgcgcctgctggaagcccagattgcttcagggggtgtagtagaccctgtgaacagtgtctttttgccaaaagatgtcgccttggcccgggggctgattgatagagatttgtatcgatccctgaatgatccccgagatagtcagaaaaactttgtggatccagtcaccaaaaagaaggtcagttacgtgcagctgaaggaacggtgcagaatcgaaccacatactggtctgctcttgctttcagtacagaagagaagcatgtccttccaaggaatcagacaacctgtgaccgtcactgagctagtagattctggtatattgagaccgtccactgtcaatgaactggaatctggtcagatttcttatgacgaggttggtgagagaattaaggacttcctccagggttcaagctgcatagcaggcatatacaatgagaccacaaaacagaagcttggcatttatgaggccatgaaaattggcttagtccgacctggtactgctctggagttgctggaagcccaagcagctactggctttatagtggatcctgttagcaacttgaggttaccagtggaggaagcctacaagagaggtctggtgggcattgagttcaaagagaagctcctgtctgcagaacgagctgtcactgggtataatgatcctgaaacaggaaacatcatctctttgttccaagccatgaataaggaactcatcgaaaagggccacggtattcgcttattagaagcacagatcgcaaccggggggatcattgacccaaaggagagccatcgtttaccagttgacatagcatataagaggggctatttcaatgaggaactcagtgagattctctcagatccaagtgatgataccaaaggattttttgaccccaacactgaagaaaatcttacctatctgcaactaaaagaaagatgcattaaggatgaggaaacagggctctgtcttctgcctctgaaagaaaagaagaaacaggtgcagacatcacaaaagaataccctcaggaagcgtagagtggtcatagttgacccagaaaccaataaagaaatgtctgttcaggaggcctacaagaagggcctaattgattatgaaaccttcaaagaactgtgtgagcaggaatgtgaatgggaagaaataaccatcacgggatcagatggctccaccagggtggtcctggtagatagaaagacaggcagtcagtatgatattcaagatgctattgacaagggccttgttgacaggaagttctttgatcagtaccgatccggcagcctcagcctcactcaatttgctgacatgatctccttgaaaaatggtgtcggcaccagcagcagcatgggcagtggtgtcagcgatgatgtttttagcagctcccgacatgaatcagtaagtaagatttccaccatatccagcgtcaggaatttaaccataaggagcagctctttttcagacaccctggaagaatcgagccccattgcagccatctttgacacagaaaacctggagaaaatctccattacagaaggtatagagcggggcatcgttgacagcatcacgggtcagaggcttctggaggctcaggcctgcacaggtggcatcatccacccaaccacgggccagaagctgtcacttcaggacgcagtctcccagggtgtgattgaccaagacatggccaccaggctgaagcctgctcagaaagccttcataggcttcgagggtgtgaagggaaagaagaagatgtcagcagcagaggcagtgaaagaaaaatggctcccgtatgaggctggccagcgcttcctggagttccagtacctcacgggaggtcttgttgacccggaagtgcatgggaggataagcaccgaagaagccatccggaaggggttcatagatggccgcgccgcacagaggctgcaagacaccagcagctatgccaaaatcctgacctgccccaaaaccaaattaaaaatatcctataaggatgccataaatcgctccatggtagaagatatcactgggctgcgccttctggaagccgcctccgtgtcgtccaagggcttacccagcccttacaacatgtcttcggctccggggtcccgctccggctcccgctcgggatctcgctccggatctcgctccgggtcccgcagtgggtcccggagaggaagctttgacgccacagggaattcttcctactcttattcctactcatttagcagtagttctattgggcactagtagtcagttgggagtggttgctataccttgacttcatttatatgaatttccactttattaaataatagaaaagaaaatcccggtgcttgcagtagagtgataggacattctatgcttacagaaaatatagccatgattgaaatcaaatagtaaaggctgttctggctttttatcttcttagctcatcttaaataagcagtacacttggatgcagtgcgtctgaagtgctaatcagttgtaacaatagcacaaatcgaacttaggatttgtttcttctcttctgtgtttcgatttttgatcaattctttaattttggaagcctataatacagttttctattcttggagataaaaattaaatggatcactgatattttagtcattctgcttctcatctaaatatttccatattctgtattaggagaaaattaccctcccagcaccagcccccctctcaaacccccaacccaaaaccaagcattttggaatgagtctcctttagtttcagagtgtggattgtataacccatatactcttcgatgtacttgtttggtttggtattaatttgactgtgcatgacagcggcaatcttttctttggtcaaagttttctgtttattttgcttgtcatattcgatgtactttaaggtgtctttatgaagtttgctattctggcaataaacttttagacttttgaagtgtttgtgttttaatttaatatgtttataagcatgtataaacatttagcatatttttatcataggtctaaaaatatttgtttactaaatacctgtgaagaaataccattaaaaaactatttggttctgaattcttactagaa

SEQ ID NO: 126538 - DNA, 7812 bp, Homo sapiens
  Payload ID: 4809
  Gene Symbol: DSP
  Gene Name: desmoplakin
  Uniprot ID: P15924
  ENST ID: ENST00000418664
  CDS Start-End: 300-7118
ggaggagactcgctccgccgccgaccaacaccaacacccagctccgacgcagctcctctgcgcccttgccgccctccgagccacagctttcctcccgctcctgcccccggcccgtcgccgtctccgcgctcgcagcggcctcgggagggcccaggtagcgagcagcgacctcgcgagccttccgcactcccgcccggttccccggccgtccgcctatccttggccccctccgctttctccgcgccggcccgcctcgcttatgcctcggcgctgagccgctctcccgattgcccgccgacatgagctgcaacggaggctcccacccgcggatcaacactctgggccgcatgatccgcgccgagtctggcccggacctgcgctacgaggtgaccagcggcggcgggggcaccagcaggatgtactattctcggcgcggcgtgatcaccgaccagaactcggacggctactgtcaaaccggcacgatgtccaggcaccagaaccagaacaccatccaggagctgctgcagaactgctccgactgcttgatgcgagcagagctcatcgtgcagcctgaattgaagtatggagatggaatacaactgactcggagtcgagaattggatgagtgttttgcccaggccaatgaccaaatggaaatcctcgacagcttgatcagagagatgcggcagatgggccagccctgtgatgcttaccagaaaaggcttcttcagctccaagagcaaatgcgagccctttataaagccatcagtgtccctcgagtccgcagggccagctccaagggtggtggaggctacacttgtcagagtggctctggctgggatgagttcaccaaacatgtcaccagtgaatgtttggggtggatgaggcagcaaagggcggagatggacatggtggcctggggtgtggacctggcctcagtggagcagcacattaacagccaccggggcatccacaactccatcggcgactatcgctggcagctggacaaaatcaaagccgacctgcgcgagaaatctgcgatctaccagttggaggaggagtatgaaaacctgctgaaagcgtcctttgagaggatggatcacctgcgacagctgcagaacatcattcaggccacgtccagggagatcatgtggatcaatgactgcgaggaggaggagctgctgtacgactggagcgacaagaacaccaacatcgctcagaaacaggaggccttctccatacgcatgagtcaactggaagttaaagaaaaagagctcaataagctgaaacaagaaagtgaccaacttgtcctcaatcagcatccagcttcagacaaaattgaggcctatatggacactctgcagacgcagtggagttggattcttcagatcaccaagtgcattgatgttcatctgaaagaaaatgctgcctactttcagttttttgaagaggcgcagtctactgaagcatacctgaaggggctccaggactccatcaggaagaagtacccctgcgacaagaacatgcccctgcagcacctgctggaacagatcaaggagctggagaaagaacgagagaaaatccttgaatacaagcgtcaggtgcagaacttggtaaacaagtctaagaagattgtacagctgaagcctcgtaacccagactacagaagcaataaacccattattctcagagctctctgtgactacaaacaagatcagaaaatcgtgcataagggggatgagtgtatcctgaaggacaacaacgagcgcagcaagtggtacgtgacgggcccgggaggcgttgacatgcttgttccctctgtggggctgatcatccctcctccgaacccactggccgtggacctctcttgcaagattgagcagtactacgaagccatcttggctctgtggaaccagctctacatcaacatgaagagcctggtgtcctggcactactgcatgattgacatagagaagatcagggccatgacaatcgccaagctgaaaacaatgcggcaggaagattacatgaagacgatagccgaccttgagttacattaccaagagttcatcagaaatagccaaggctcagagatgtttggagatgatgacaagcggaaaatacagtctcagttcaccgatgcccagaagcattaccagaccctggtcattcagctccctggctatccccagcaccagacagtgaccacaactgaaatcactcatcatggaacctgccaagatgtcaaccataataaagtaattgaaaccaacagagaaaatgacaagcaagaaacatggatgctgatggagctgcagaagattcgcaggcagatagagcactgcgagggcaggatgactctcaaaaacctccctctagcagaccagggatcttctcaccacatcacagtgaaaattaacgagcttaagagtgtgcagaatgattcacaagcaattgctgaggttctcaaccagcttaaagatatgcttgccaacttcagaggttctgaaaagtactgctatttacagaatgaagtatttggactatttcagaaactggaaaatatcaatggtgttacagatggctacttaaatagcttatgcacagtaagggcactgctccaggctattctccaaacagaagacatgttaaaggtttatgaagccaggctcactgaggaggaaactgtctgcctggacctggataaagtggaagcttaccgctgtggactgaagaaaataaaaaatgacttgaacttgaagaagtcgttgttggccactatgaagacagaactacagaaagcccagcagatccactctcagacttcacagcagtatccactttatgatctggacttgggcaagttcggtgaaaaagtcacacagctgacagaccgctggcaaaggatagataaacagatcgactttaggttatgggacctggagaaacaaatcaagcaattgaggaattatcgtgataactatcaggctttctgcaagtggctctatgatgctaaacgccgccaggattccttagaatccatgaaatttggagattccaacacagtcatgcggtttttgaatgagcagaagaacttgcacagtgaaatatctggcaaacgagacaaatcagaggaagtacaaaaaattgctgaactttgcgccaattcaattaaggattatgagctccagctggcctcatacacctcaggactggaaactctgctgaacatacctatcaagaggaccatgattcagtccccttctggggtgattctgcaagaggctgcagatgttcatgctcggtacattgaactacttacaagatctggagactattacaggttcttaagtgagatgctgaagagtttggaagatctgaagctgaaaaataccaagatcgaagttttggaagaggagctcagactggcccgagatgccaactcggaaaactgtaataagaacaaattcctggatcagaacctgcagaaataccaggcagagtgttcccagttcaaagcgaagcttgcgagcctggaggagctgaagagacaggctgagctggatgggaagtcggctaagcaaaatctagacaagtgctacggccaaataaaagaactcaatgagaagatcacccgactgacttatgagattgaagatgaaaagagaagaagaaaatctgtggaagacagatttgaccaacagaagaatgactatgaccaactgcagaaagcaaggcaatgtgaaaaggagaaccttggttggcagaaattagagtctgagaaagccatcaaggagaaggagtacgagattgaaaggttgagggttctactgcaggaagaaggcacccggaagagagaatatgaaaatgagctggcaaaggcatctaataggattcaggaatcaaagaatcagtgtactcaggtggtacaggaaagagagagccttctggtgaaaatcaaagtcctggagcaagacaaggcaaggctgcagaggctggaggatgagctgaatcgtgcaaaatcaactctagaggcagaaaccagggtgaaacagcgcctggagtgtgagaaacagcaaattcagaatgacctgaatcagtggaagactcaatattcccgcaaggaggaggctattaggaagatagaatcggaaagagaaaagagtgagagagagaagaacagtcttaggagtgagatcgaaagactccaagcagagatcaagagaattgaagagaggtgcaggcgtaagctggaggattctaccagggagacacagtcacagttagaaacagaacgctcccgatatcagagggagattgataaactcagacagcgcccatatgggtcccatcgagagacccagactgagtgtgagtggaccgttgacacctccaagctggtgtttgatgggctgaggaagaaggtgacagcaatgcagctctatgagtgtcagctgatcgacaaaacaaccttggacaaactattgaaggggaagaagtcagtggaagaagttgcttctgaaatccagccattccttcggggtgcaggatctatcgctggagcatctgcttctcctaaggaaaaatactctttggtagaggccaagagaaagaaattaatcagcccagaatccacagtcatgcttctggaggcccaggcagctacaggtggtataattgatccccatcggaatgagaagctgactgtcgacagtgccatagctcgggacctcattgacttcgatgaccgtcagcagatatatgcagcagaaaaagctatcactggttttgatgatccattttcaggcaagacagtatctgtttcagaagccatcaagaaaaatttgattgatagagaaaccggaatgcgcctgctggaagcccagattgcttcagggggtgtagtagaccctgtgaacagtgtctttttgccaaaagatgtcgccttggcccgggggctgattgatagagatttgtatcgatccctgaatgatccccgagatagtcagaaaaactttgtggatccagtcaccaaaaagaaggtcagttacgtgcagctgaaggaacggtgcagaatcgaaccacatactggtctgctcttgctttcagtacagaagagaagcatgtccttccaaggaatcagacaacctgtgaccgtcactgagctagtagattctggtatattgagaccgtccactgtcaatgaactggaatctggtcagatttcttatgacgaggttggtgagagaattaaggacttcctccagggttcaagctgcatagcaggcatatacaatgagaccacaaaacagaagcttggcatttatgaggccatgaaaattggcttagtccgacctggtactgctctggagttgctggaagcccaagcagctactggctttatagtggatcctgttagcaacttgaggttaccagtggaggaagcctacaagagaggtctggtgggcattgagttcaaagagaagctcctgtctgcagaacgagctgtcactgggtataatgatcctgaaacaggaaacatcatctctttgttccaagccatgaataaggaactcatcgaaaagggccacggtattcgcttattagaagcacagatcgcaaccggggggatcattgacccaaaggagagccatcgtttaccagttgacatagcatataagaggggctatttcaatgaggaactcagtgagattctctcagatccaagtgatgataccaaaggattttttgaccccaacactgaagaaaatcttacctatctgcaactaaaagaaagatgcattaaggatgaggaaacagggctctgtcttctgcctctgaaagaaaagaagaaacaggtgcagacatcacaaaagaataccctcaggaagcgtagagtggtcatagttgacccagaaaccaataaagaaatgtctgttcaggaggcctacaagaagggcctaattgattatgaaaccttcaaagaactgtgtgagcaggaatgtgaatgggaagaaataaccatcacgggatcagatggctccaccagggtggtcctggtagatagaaagacaggcagtcagtatgatattcaagatgctattgacaagggccttgttgacaggaagttctttgatcagtaccgatccggcagcctcagcctcactcaatttgctgacatgatctccttgaaaaatggtgtcggcaccagcagcagcatgggcagtggtgtcagcgatgatgtttttagcagctcccgacatgaatcagtaagtaagatttccaccatatccagcgtcaggaatttaaccataaggagcagctctttttcagacaccctggaagaatcgagccccattgcagccatctttgacacagaaaacctggagaaaatctccattacagaaggtatagagcggggcatcgttgacagcatcacgggtcagaggcttctggaggctcaggcctgcacaggtggcatcatccacccaaccacgggccagaagctgtcacttcaggacgcagtctcccagggtgtgattgaccaagacatggccaccaggctgaagcctgctcagaaagccttcataggcttcgagggtgtgaagggaaagaagaagatgtcagcagcagaggcagtgaaagaaaaatggctcccgtatgaggctggccagcgcttcctggagttccagtacctcacgggaggtcttgttgacccggaagtgcatgggaggataagcaccgaagaagccatccggaaggggttcatagatggccgcgccgcacagaggctgcaagacaccagcagctatgccaaaatcctgacctgccccaaaaccaaattaaaaatatcctataaggatgccataaatcgctccatggtagaagatatcactgggctgcgccttctggaagccgcctccgtgtcgtccaagggcttacccagcccttacaacatgtcttcggctccggggtcccgctccggctcccgctcgggatctcgctccggatctcgctccgggtcccgcagtgggtcccggagaggaagctttgacgccacagggaattcttcctactcttattcctactcatttagcagtagttctattgggcactagtagtcagttgggagtggttgctataccttgacttcatttatatgaatttccactttattaaataatagaaaagaaaatcccggtgcttgcagtagagtgataggacattctatgcttacagaaaatatagccatgattgaaatcaaatagtaaaggctgttctggctttttatcttcttagctcatcttaaataagcagtacacttggatgcagtgcgtctgaagtgctaatcagttgtaacaatagcacaaatcgaacttaggatttgtttcttctcttctgtgtttcgatttttgatcaattctttaattttggaagcctataatacagttttctattcttggagataaaaattaaatggatcactgatattttagtcattctgcttctcatctaaatatttccatattctgtattaggagaaaattaccctcccagcaccagcccccctctcaaacccccaacccaaaaccaagcattttggaatgagtctcctttagtttcagagtgtggattgtataacccatatactcttcgatgtacttgtttggtttggtattaatttgactgtgcatgacagcggcaatcttttctttggtcaaagttttctgtttattttgcttgtcatattcgatgtactttaaggtgtctttatgaagtttgctattctggcaataaacttttagacttttg

SEQ ID NO: 126539 - DNA, 3617 bp, Homo sapiens
  Payload ID: 4810
  Gene Symbol: DSTN
  Gene Name: destrin (actin depolymerizing factor)
  Uniprot ID: P60981
  ENST ID: ENST00000246069
  CDS Start-End: 347-844
ttctagcctcctgcagaccagagaggacgcacccccacccctaaacactttctggtgaggcggaccctgccccgcagccttcagcagatgagggaagctcccctccgagactctggatagccgccgggggggcgttgcctggccggctggttgcgtagcaacggcaggcggtgcgtgacgtgcgcagccgcgttccgtcctgaggcgcgcccgccccggggtaagctcgcgccgccgcgtcagctcagcgctgggtctctcggtcccgcagccgtgaggaggacggtctgcatactcgctgcccgccggctccctcccccgcgtccctgcgaccgccgcggcgaagatggcctcaggagtgcaagtagctgatgaagtatgtcgcattttttatgacatgaaagttcgtaaatgctccacaccagaagaaatcaagaaaagaaagaaggctgtcattttttgtctcagtgcagacaaaaagtgcatcattgtagaagaaggcaaagagatcttggttggagatgttggtgtaaccataactgatcctttcaagcattttgtgggaatgcttcctgaaaaagattgtcgctatgctttgtatgatgcaagctttgaaacaaaagaatccagaaaagaagagttgatgttttttttgtgggcaccagaactagcacctctgaaaagtaaaatgatctatgcaagctccaaggatgcaattaaaaagaaatttcaaggcataaaacatgaatgtcaagcaaatggaccagaagatctcaatcgggcttgtattgctgaaaagttaggtggatccttaattgtagcctttgaaggatgccctgtgtagattattcagtgccacaaattgaaagcttccatgtttaatgttatcctcttgctatataaataaagcaaatatatttaggccagggtctcactgagggggagctgtcttgtcatcttttagagtaaactattctataaacatatgcaaacagccctaaataaatctaaagtctaaagttttattgatgtgaaattaaattcttattggccaaatgcctgttttgatgagttgatttataaagatttttgttaagctcaggattttaaattacacagttcacaaacagtaaaggccatgtgaagagaattattacatctttattaacctcagcatttactttgtttcttttgcttaggaaattgctcataatctggttataattttggtccaaattctttattcttccttgagctaagcagaataatggaatataatatgtcttcataatataacaacactaatacactaatagtaagattaagttaggcagtcttctaccaaatgtgtaatggagattgcctcaaaattgtgtccacataatccacgctcatcttgcaaagcgctatttcaggcacatcattggaatacaggaagtagccctgcacctgccagtgagctcgccattcactgattggaagagtgacctggcatcttggaaatcattgtgtgtcttcaggagaatgtgcagtgtcttgtaacaactaattataatgcaaattagggctacattgtaatctgctttgttaatgaaaatgataaaacagaatattgacaagctaggacacctgtggtatctttaattgtatctccttcagaagtttgcttcttatggtataataaagtatggaagaatattgagtatatgtttactctgggcctgggagaacttaactttctagagcagtttgttgacttgtgtgcaatggggagaggtaccatgatgacactcacagggagccactgttcactgacacttggaagcggtcattgttaatatcacgggcgtaacactttgaacgatatagagatgcacaaacagttgaacttagaagtagcagtattggctttatgtaataaaggaagcatttttgacttacctctcgtgtaattttcatgtgtgaattgggaatacaggattttgccttccatatggggtaaggcattgaggtttgggtatttccaataattaagagttaaggttggctgagtgtggtggctcactcctgtaatcccagcattttgggaggccgaggcaagaggatagtttgaggccaggagtttgacaatcagcgtgggcaacatagtgggatctcatctactaaaaataaacaaaattagccgggtgtggtggtgcacgtcagtagtcccagctactttggatgctgaggtgggaggatcacttgagcccaggaggtgagctgagatcgtgccactgtactccagcctggatgacagagcaagaccttgtctcaaaaaaaaaaaaaaaagtcacaactccctctggtgaataagaaagttggtgtaaaagttgggaacgttttcaatgtttattacactataagtgtaataaatattatacaaaattataaattcacatttaaaatttagaaaatagagaaaagggaaattatacattgtcctaccacatgccatcacatggttagcattttgatacacagctgtgcattattacatgtcaaagactgcatatactatggtggtcccatacaattataatgtattttctactgtaattagatacacaaataccattgtgttacagttgccgacagtattcagtatagtaacgtgctgtccaggtttgtggtctaggagtaataggctctaccatacagcctaggtgtgtagtaggctatgccactaggtttaagtgcagtctagggtggggaacattttaatgttgatccacatgccaggtgtttgtgagacaagattatgctttaatcaaaatattttggaattgtctagaaaatagtgctggctgcttgtcattcatcctgaattgcttgtttctttactttgtagcaatgcttttagtgtgggttttgttttttgagacagggtctcactctttcccccaggctagagtgcagtggtgcaatcataactcactgcatccttgaactcttgggctccagcaagcctcctgccttggcctcctaaagtgctgtgattacaggtgtgagccactgtgtcctgctagtgattgtgattaacaggcctccagggaagtgccataagcccaagactgccgtactcaaaagtcagccatgtaggtaaagcaagatatttggtcaaggagttttagaaggagatttttcctgtggtgttggcttaagtgtggcactgttgtgcgtgtgtgaggtgtcttctgtgggaaggatttcaaacagtacaaagggatgtgatgtaagcatccagaactcactccagaaattgaataaaatgctagtagttagtctctaggggaacttttgagaaagtctcagtggattcctgaggcccaagaattgtgctaacaagcactcaaggcgattctggtacataattagggttcagacctcagctgattggtctactgttggtcaggaacaaaactgcaagtatactctgtttccagaaaatacgtttacctcttcacaaatgctaacacactgcaaaaatatgtttgtggaaagctgacttagtctcatctagcggttactctcttgccctgacaaagcagcaaataaagccattgctaacaattcaa

SEQ ID NO: 126540 - DNA, 795 bp, Homo sapiens
  Payload ID: 4810
  Gene Symbol: DSTN
  Gene Name: destrin (actin depolymerizing factor)
  ENST ID: ENST00000449141
  CDS Start-End: 120-527
cgcgccgccgcgtcagctcagcgctgggtctctcggtcccgcagccgtgaggaggacggtctgcatactcgctgcccgccggctccctcccccgcgtccctgcgaccgccgcggcgaagatggcctcaggagtgcaagtagctgatgaagtatgtcgcattttttatgacatgaaagttcgtaaatgctccacaccagaagaaatcaagaaaagaaagaaggctgtcattttttgtctcagtgcagacaaaaagtgcatcattgtagaagaaggcaaagagatcttggttggagatgttggtgtaaccataactgatcctttcaagcattttgtgggaatgcttcctgaaaaagattgtcgctatgctttgtatgatgcaagctttgaaacaaaagaatccagaaaagaagagttgatgttttttttgtgggcaccagaactagcacctctgaaaagtaaaatgatctatgcaagctccaaggatgcaattaaaaagaaatttcaaggaaagtgcacccactcctgagctggtcagttgtatttgacttgccactgggtgattgggatcctgatgagatggcctggccagacttcagccaggagaaaatgcataaaacatgaatgtcaagcaaatggaccagaagatctcaatcgggcttgtattgctgaaaagttaggtggatccttaattgtagcctttgaaggatgccctgtgtagattattcagtgccacaaattgaaagcttccatgtttaatgttatcctcttgctatataaataaagcaaatatattt

SEQ ID NO: 126541 - DNA, 1853 bp, Homo sapiens
  Payload ID: 4810
  Gene Symbol: DSTN
  Gene Name: destrin (actin depolymerizing factor)
  Uniprot ID: P60981
  ENST ID: ENST00000474024
  CDS Start-End: 311-757
ggtaagctcgcgccgccgcgtcagctcagcgctgggtctctcggtcccgcagccgtgaggaggacggtctgcatactcgctgcccgccggctccctcccccgcgtccctgcgaccgccgcggcgaagatgattttcagttcacccactagaggcaaagacgtaagagagctaccagcgtattgagaggagatacacaggcactacgagaatggagtttagaagaaggtcagagccctgggcagtgttgggccaggctttagggcctcaggagtgcaagtagctgatgaagtatgtcgcattttttatgacatgaaagttcgtaaatgctccacaccagaagaaatcaagaaaagaaagaaggctgtcattttttgtctcagtgcagacaaaaagtgcatcattgtagaagaaggcaaagagatcttggttggagatgttggtgtaaccataactgatcctttcaagcattttgtgggaatgcttcctgaaaaagattgtcgctatgctttgtatgatgcaagctttgaaacaaaagaatccagaaaagaagagttgatgttttttttgtgggcaccagaactagcacctctgaaaagtaaaatgatctatgcaagctccaaggatgcaattaaaaagaaatttcaaggcataaaacatgaatgtcaagcaaatggaccagaagatctcaatcgggcttgtattgctgaaaagttaggtggatccttaattgtagcctttgaaggatgccctgtgtagattattcagtgccacaaattgaaagcttccatgtttaatgttatcctcttgctatataaataaagcaaatatatttaggccagggtctcactgagggggagctgtcttgtcatcttttagagtaaactattctataaacatatgcaaacagccctaaataaatctaaagtctaaagttttattgatgtgaaattaaattcttattggccaaatgcctgttttgatgagttgatttataaagatttttgttaagctcaggattttaaattacacagttcacaaacagtaaaggccatgtgaagagaattattacatctttattaacctcagcatttactttgtttcttttgcttaggaaattgctcataatctggttataattttggtccaaattctttattcttccttgagctaagcagaataatggaatataatatgtcttcataatataacaacactaatacactaatagtaagattaagttaggcagtcttctaccaaatgtgtaatggagattgcctcaaaattgtgtccacataatccacgctcatcttgcaaagcgctatttcaggcacatcattggaatacaggaagtagccctgcacctgccagtgagctcgccattcactgattggaagagtgacctggcatcttggaaatcattgtgtgtcttcaggagaatgtgcagtgtcttgtaacaactaattataatgcaaattagggctacattgtaatctgctttgttaatgaaaatgataaaacagaatattgacaagctaggacacctgtggtatctttaattgtatctccttcagaagtttgcttcttatggtataataaagtatggaagaatattgagtatatgtttactctgggcctgggagaacttaactttctagagcagtttgttgacttgtgtgcaatggggagaggtaccatgatgacactcacagggagccactgttcactgacacttggaagcggtcattgttaatatcacgggcgtaacactttgaacgatatagagatgcacaaacagttgaacttagaagtagcagtattggctttatgtaataaaggaagcatttttgactta

SEQ ID NO: 126542 - DNA, 3833 bp, Homo sapiens
  Payload ID: 4811
  Gene Symbol: DESI1
  Gene Name: desumoylating isopeptidase 1
  Uniprot ID: Q6ICB0
  ENST ID: ENST00000263256
  CDS Start-End: 258-764
caaaagtgcatccctgcccccgccccctcttccgtgtgggccctccctgtcccctctctgtcacctcacagtagtcgttgccggtagcgggtgtgggggcgcgagcagcgcagggcggcctctcccccacccctcagcccgggcccgggctcggtccccccctctccctccgcttcgcactcccgtcgggtacgggaaggtccaagccgctgccgggtgcccgagggccgtcgtggccgccgtcgccacgggtcccaatggagccgccgaatctctatccggtgaagctctacgtgtacgacctgtccaaaggcctggcccggcggctcagccccatcatgctggggaaacaactggaaggcatctggcacacatccatagttgtgcacaaggatgagttcttcttcggcagtggtggtatctccagctgccccccgggagggacattgcttgggcctccagactctgtggttgatgtggggagtacagaagtcacagaagaaatctttctggagtacctctcctccctgggggagtccctgttccgaggtgaggcctacaacctctttgaacacaattgtaacaccttcagcaacgaagtggcacagttcctgactgggcggaagattccttcttacatcacagacctgccctctgaagttctctccacgccctttggacaggcacttcggcccctcctggactccattcagatccagcctccaggagggagctccgtgggcagacccaacggccagagctaacaggactgcctgggaccgccctgcctcaccagggcttttcctttttaaacaaaacaaaccctaccagatttctattttataattttacatcagagctaacaaccaggggacggctttttaaatttcccagggaaggagaccgtcaggccgcatgtagacaatgctgctaagaaacagaacaaaatgccaccccttctaatagtattatactaatttattaaggctgtcttgtctgtgcgttcacttcggatgctgtttcctaagcgtcctccacactggagaaagggaggggctttgtttaaacagaaagcgagtcacagtttgcgggagccccaacctagaactctttccagagaacactcacgctctacccaagttgccaacacctgtgggacccaggtgagttttagaacatccgtgacccagaaagttactctagtgttaaatgaaccaaaggatttggtgtacatgggaccggtttcaggatgactaacctaacctaagtgaactctttagccacaaccctcaccttccctcccttaccccaagcaaggccagtgctggagcagccattgcctccggatcaagggagtaacagcaagtatcaggccggagaaaacaggataaagccattcctccttccacctagatggattgccaatcttctgccatcaattttgggaaacctgcctttgtgcccccgaggctgcctttcctcagcatagctgacttgtcatagtggatgaggtctgggctggagcagtagaagccaaggccttttttctgcaagtaatgatgtaggttatttgcagtctctgtaaccaccatccaggccagtacgcagtatttagctggggaccaagggatgggattccctactctaagaaaatacctttattttaattattattattttttgagacggagtctcgctctaccacccaggctggtgtgcagtggcatgatctcggctcacagaaacctctgcctcccgggttcaagtggttctcctgcctcagcctcctgagtagctgggattacaggtgcgtgccaccacgccaggctaatttttgtattttcagtagagacagggttttgccatgttggccaggctggtctggaactcctgacctcgggtgatccacctcccttggcctcccaaagtgctgggattacaggcgtgagccaccgctgcctggccagaaaatacctttgatatggaaagaataatgatgtgaggcctggcgcggtggctcacgcctgtaatcccagcactttgggaggccgaggcaggcagatcacttgaggtcaggacttcaagaccagcctggccaacatggtgaaaccccgtctctactaaaaatacaaaattagccgggcatggtggcgcatgcctgtagtcccagctactcgggaggctgaggcaggagaatcgcttgaacccgggaggcagagattgcgatgagccgagatcgtaccagtgcactccagcctgggcgacagagtgagactccatctcaaaaaaataaaataatgaagtggaatcaaggtggcaagaaaatttagaatcgtttctgatagggactttcccttatcctaaatgtgttttgaaggcacacgttatttccattgtcattctgactttagaaaggcaggttggggcatgagtgggcattttcctaatgacttgctgctaggaggttataggcagggaacagtctgggagtctctaatccagagagactttcagattccctctcttcacatgaacctccattagttagattttgggaaagtgagcatgaagaagggactcagagctgccaggtacccgagtctcaggtctgacatccttgggccccttctgccacaacttcttgccacttcacggacttgaattatgttgcttcttcctggaagtctggcctgcagcacaggcctttcctctccaaaaagctgctgctcatttctggccccatctgctgctatctttgccatcagccatcacagtttggcatcatcagagtctcagctagaggagctgtcattctgccttagtgtttgcctgcgacctgaccaggggcatgaccagctgggatgtcaagtgacatttgggaacttgtagaggccaaatgattgaaagtttaattcttctcaagacccactgatttgccagtgtgcatggaaataatagattagagcagaaactagcagggactgttgtataatcgtgatctactagcagaattgggcccaaagagaaagaatttctgaggctgggtttcttctgggagggtagcaggttggtcttggccagtgctctgtttcccaccagtgttgttcccttttccagcttgcctggcccggctctgtcttccagggtcctgctccagacccctctgcctggggtctcccctccatccagggggttctgggcatcacagctcctttttttcctttctcctcttccagatccagtttcagctggtttgcttcttccagcaggcacccttaggcccaggagcagctcccctgagagaatttgagtcactcatttccttgaacagcacccccctttatactagcagccatttgtgccattgcctgtgccctagggtttgtggggagagagcgagggatcactgagcagttttcccagagctccatgggaaggcaagctctccctcccaatgggagccccactgtcactaactgtaaactcaggctcaggcttcaactgcctacccccatcctcatatttctgtctgtcccagcacctcaggagcattctcattgtggccggctaactccgcctggatgtgaacaggcaagcacagtgggaaatgagtcacgtacttgtattgcacagtggacacctctagaggtccattggtttaaagggatagggaaggaggagggatgagaccatcaccccctcccagaagtaaatctagtatctgagttttctttatgcccttgagtcaaactaataactgtctagtacggaggtgtttgctggttttcttcggtgttttttctaatgcaataaactcatttctgcctgctgca

SEQ ID NO: 126543 - DNA, 859 bp, Homo sapiens
  Payload ID: 4812
  Gene Symbol: DESI2
  Gene Name: desumoylating isopeptidase 2
  Uniprot ID: Q9BSY9
  ENST ID: ENST00000263831
  CDS Start-End: 212-697
caacggtccggccccgtccgcacagacgctcctgtcggcggcgcccgggagcggctcggctgcccgatgcttccgccccggctgccgcgggccgggctgtacgcttagtgcccggctcaggccccctgaagcgcccgcgggggtgagagcggcctccggccccgcggagacggagcggcttgaggacgaggcggcggccgcggggaggaggatgggggctaaccagttagtggtgctcaacgtgtacgacatgtattggatgaacgaatatacctcatccattggaattggagtttttcattcaggaattgaagtctatggcagagctgttgttttagggagcacggacttcctagaagatgatatagaaaaaattgtagaagaactgggaaaagaatacaaaggcaatgcttatcatttaatgcataaaaactgcaatcatttttcttcagctttatcagagattctttgtgggaaagagattcctcgctggatcaatcgacttgcctacttcagctcctgtataccctttctacagagttgcctcccgaaggagtggctcacgcccgcagccctgcagtctagtgtcagccaagaactccaggatgaactggaggaagcagaggatgctgccgcatccgcttccgtggcaagcactgcagcaggctccagacccgggcgccacactaaactataaatgtctccaaagtcacacattcagaactgtctctggcagtcgaatatcactagagaaaagtaaacagagaagcatcctttagatattttgtatgcaaagatggctctcccccaaatcccagtttttcagctcaggattatatttgtaatcaaaaaaaaaaaa

SEQ ID NO: 126544 - DNA, 4208 bp, Homo sapiens
  Payload ID: 4812
  Gene Symbol: DESI2
  Gene Name: desumoylating isopeptidase 2
  Uniprot ID: Q9BSY9
  ENST ID: ENST00000302550
  CDS Start-End: 380-964
attttaggtcccgaggtgcgccggccgagaaccagagcgcaggcgggctcagtcctggcgccgggccggccccgcccccggggcgcctggcgcccgccccttgctcaagccccgcctttccccacgtgtctgccgcctaggggaggtgcctcatccggagcgggccgccaacggtccggccccgtccgcacagacgctcctgtcggcggcgcccgggagcggctcggctgcccgatgcttccgccccggctgccgcgggccgggctgtacgcttagtgcccggctcaggccccctgaagcgcccgcgggggtgagagcggcctccggccccgcggagacggagcggcttgaggacgaggcggcggccgcggggaggaggatgggggctaaccagttagtggtgctcaacgtgtacgacatgtattggatgaacgaatatacctcatccattggaattggagtttttcattcaggaattgaagtctatggcagagaatttgcttatggtggccatccttaccccttttctggaatatttgaaatttccccaggaaatgcttctgaactaggagaaacatttaaatttaaagaagctgttgttttagggagcacggacttcctagaagatgatatagaaaaaattgtagaagaactgggaaaagaatacaaaggcaatgcttatcatttaatgcataaaaactgcaatcatttttcttcagctttatcagagattctttgtgggaaagagattcctcgctggatcaatcgacttgcctacttcagctcctgtataccctttctacagagttgcctcccgaaggagtggctcacgcccgcagccctgcagtctagtgtcagccaagaactccaggatgaactggaggaagcagaggatgctgccgcatccgcttccgtggcaagcactgcagcaggctccagacccgggcgccacactaaactataaatgtctccaaagtcacacattcagaactgtctctggcagtcgaatatcactagagaaaagtaaacagagaagcatcctttagatattttgtatgcaaagatggctctcccccaaatcccagtttttcagctcaggattatatttgtaatcaaaaaaaaaaaatcacttggcgcaggagggagaactttgtaagaagctgccctctgttttttttatccactcgtaaatctggatttatttcttctgttttatacaagctctgttaagttatgtttacagtatcttgtatcgctgtttacaaatcttgcatggactcctgccacagtgaaagaagaaaatcttcatgtcttcaaaaattaggcaggtaatctttgtatacttctgacaattgccagatctatggcataaataggcacacaaaaaggtacttaaacagttatagtcaccatcacctgcttcagaatggtcttttagatttgtgtttgttttgttaaagttgttggcaccaggatgcagagaatcagactggcctgaggtgaaggagcacacagccctgagggcttggaaccctgggtccagttcctcttcacacccccttccactctgagtagcacatctccccaggtgcccatggaacacctgctttcatcccaaatatccgtccacctaggcggggtggtatgttcttacgtctctctgactttgatgccactcattctatagtttagctggttttcgttcaagatattcttggtagtaactgacaagtatgttgcacatgtattgggggaggcgcttcatttttattttaatacacatgtatttcctccttgcacaggattttgatggtgtgggaatatcctaagtggtagccttccaagtagcagtgagttgacattcagctgcttttaactattcaggctaccttttatactaaaccttgaaaactagaatctaatgtctaccccaaaaaagtagttctttgatattttatactttttatgtaccatgtcagaaagagtatgttggcgtttgtcatgggactcatttcacataatagaatgcctagtctcattgaccaatcgttaaaaaatcatatttgtgtgtcttaagattcatatttatatgttctctcaaatgtatgtctcttacgtaacatactctaagaatgaaactgtcaccacaggtaaatccttgttagcaaggaatctgtctgctccagtctactcctagtttgatccttggatgtaagaaccaagtcattacatgtcaaattcaatttttctgccttaagaatgaatgtccttcataaaatattggatgcagtgtaacactatccaaggcagtgacttcagctttatatacatataaaatatagttagttttaaaattattgacatttatttaaacttttagattggattgtttgctattgctctgtgtgaggatacataatctttcagtaaactgtatttttaacttttccataagctgattttggttcattttatcaacgtaagcacaccctgttcatagggaaaataaaccttgggttataagcattagcctgaggacaatgaagccacttaacctaatttatgctttcgactgttctgtttccagagaggaaagcctttacaaattactctcagttctttaggggcagaaggcttgtttcaagaggtttgacagaagaaaggaatatatgaacttaatgagatgtcgacttggttcaggtctaaaaatgagggcaaaacactaaggctctagcagtgacttgttcactaaaaagagagagtcctgtccccagacggttagtacaaagccttggatacagtttgcttgtaatatttttaataatgtgaggagtacagtgttttctaattcattcaagtatatatgatttaaacctgggctactgacacacacacagtagccattagttagactcttcttagtgaatatcaggaacatcccatctgtgcttaaccagaatccagcaagtcagcacacaagtgattttattgttattttgttgtatttacttgcatttgttgtatttactttcatctgcagcatttggagtttaaaaataatgtaaagggttctagtagaaatagtgtcctaaggccaattacctaccatactaacaatcagcagataaaattctggacgtgagattccttataatctaattatacctgaggttgagcaagaaatgtcttcctttagaaaatctcattcaagtcaggttcttctctacagttcaaaattgagaatggatttaattaactagcatttagccagctttttcttgcccttggagaaaaagaatcattctcaacctgataatctgttaagaaaaatcccatatgaacaatctggtcattaacatacatatgatacggagtctctttgttgtcaccaagtgaacatacttctcatggtgggttggacagtaatacatgttagagggtcagaagcttctggtttctgctgtttgctttaaatacccttggggtttttttttaaacccttacaaggggagcatcagctttggaaagtgtgactctgtaggagtgtagaaggcagtggtgtatgatcttagcctcgtcctgatgcctgaatccagccagctgttgctctgacccacagcaatagagcaagttacccatcaccagcatttgtacagagcagggaattctggttttagtccattggtagcattgtgtgtatgaggagattcaacaccacagacagctgcaggactcgatatccatggcttctttccatcacaaaacgggtagaaacacattcactgcttcagggttctaatctgtgtgtctccttatgactccatttctgtaagctactctgtaactttgatatatgctgtattttctttctttaaaagatttagatgttttttcagcaagctagccatacaaccattgtatctctttctcttcagtatggtttagagcccagatcagttagtaggctttcgttgtcttctctttcaatacatgtacatctttactgtttgaaaagtgttacagctgtcaaagaatcttcatggacctgaagataatttcttgtgaagttgaatgcaagtgtactgtcattcatagtgtttatatcaaaataccaggaatcttcacttttgctaccttgatatagcattgggctatcatgttacaacattgaaatacattgatttattaaaaaatacttttataagaaa

SEQ ID NO: 126545 - DNA, 486 bp, Homo sapiens
  Payload ID: 4812
  Gene Symbol: DESI2
  Gene Name: desumoylating isopeptidase 2
  ENST ID: ENST00000418162
  CDS Start-End: 183-486
agctcctctgcttctgccgaactgtccgtctctctccatggctacgtcttcagaaactcccaagcccctctaagtccagaaggtcacagctttcgggtgcctgtgctagaatctcttcaaaggtgaacaggagccaacacaccctttccttgtgtgttaaaggcaacctcgttaaaatatgaatgaggctaacatttctcaagaaaatagcccagctgaattatttagagatcctggtggtgctcctttcctacactctgaagaccactttccagtattggatgaacgaatatacctcatccattggaattggagtttttcattcaggaattgaagtctatggcagagaatttgcttatggtggccatccttaccccttttctggaatatttgaaatttccccaggaaatgcttctgaactaggagaaacatttaaatttaaagaagctgttgttttagggagcacggacttcctagaagatgata

SEQ ID NO: 126546 - DNA, 4078 bp, Homo sapiens
  Payload ID: 4813
  Gene Symbol: DDA1
  Gene Name: DET1 and DDB1 associated 1
  Uniprot ID: Q9BW61
  ENST ID: ENST00000359866
  CDS Start-End: 125-433
ggcgccatcagtgtgggctgtgccgtggctggaagttactgtgaggcggcggctaagaaggcggctctggtggcggcggtggaggctgaggcggcggccgaggcggcgacggaggaaacagaagatggcagattttttgaaaggactgcctgtctacaacaaaagcaattttagtcgatttcacgcggactccgtgtgcaaagcctcgaaccgacggccctcagtctacctgcctacccgcgagtacccgtctgaacagatcatcgtgacagaaaagacaaacatcctcctgcgctacctgcatcagcaatgggacaaaaagaacgctgccaagaagagagaccaggagcaagtggagctggaaggcgagagctccgcacctccccgcaaggtggcgcggaccgacagcccagacatgcacgaggacacttaagactctcaactccacaggcgcctcctgccaggtctgctcctcggtcgcccacccgcctgcccgccatgtgtaagcaccccgcccgcccgcctccctgccggcccatccacaccctgcgtccacaccacttccaacctcataggagccgatgtatttattttccttgagtttttatttatgctgtaacctgtatcaagcgttggttaaaggggacatcagacccagtagtgtgatgttggtagatgctttttaaaaaaaacaacattgtccccccgacccccgccttccatcgggccagttccccgattcctgcccccagttctccagagaaccagagtgtgtctgtgagagtctctagcgggggctttactgtggccgggcgacaggggcgggcccggggtggcctgacctaccaggacagccgagtggccttctcccccccaacaccggtccaggccattgagactcggtcttgtcccacgcttcgcccggaactttcccatgcccaggcctcactcagcgtgcacgcacgttggggagaagtcggcccttgggatctttctcttgagtcattttatttttatcatggactagtgcgtgctccgtgtccaccccaataaaagggtctttcctacttgacctcgcgtctttgctccacacaccttggctgcagaggacggagcccctgggagtcatccctgttgtcaccaagaggagtgagaagggccccccacgccaggggccccaggaccggctggattctctcgtgggcttgctgaggccaccatgttcaaggccaagacctgcctggaccatcccctctgcctctcctgtcaaggtgaccccaaggacaggtcattcctgagagacggtccatggtgccaaggatggagcggggtcagccccctgcctgggataccgccaagcagggcagcgcacctgtcagacaccgcagagatggccggcctcatccgggggcctggggtctctggcctctgctgctcccctgaggcatggtgacagtacagacggcatctggccggtcttgctgtcctaggtggtggcctcacccttgctgggtcatagaggagctgtacagaaggttggcacctggcagttggcatgtgccatggccgctcatggggacccctcttccgccagctgggctgggtttggggctgagcttgggtatgtaggggtgttcgggctctgggcagaaggtttgtggccctgaccactgagcctggggctgggggaacaccgcttctccccttattgcccccactggtggtggtggggatctcagttttcttttgttttgttttgtttgtttgtttgagttggggtcttgtactctttcccaggctggagtgcagtggcgtaatcacagctcactgcagcctcgacctcaagccttcctcccacctcagccttccaagccgctgggaccacaggcacccaccaccatgcctggctaatttttttttttttttgagatggagtctcgctgtgtctcccaggctggagtgcagtggcaagatctcagctcactacaacctctgcctcccaggttcaagtgattctcctacctcagcctcctgagtagctgggattacacgcgtgcgcccctacacccagctaatttttctatttttagtggagacggcgttttgtcatgttggccaggctggtctcgaactcctgacctcaggtgcttcgcctgcctcggcctcccaaagtgctgtgaccgcacctggctgcctggctaatattttaaaaattttttgtagagacagggtttcaccatgttgcccaggctggtctcaaactcctgggctcaagtcatccaccttcctcagcctcccaaagtgctggggttacagacgtgaaccaccgtgcctggcagaggtctctgttttgagagctgagtctgagggcgttgggatggtgtagggttgggccacagagctagcagacactccgggctatggagggtccgcctgccccagattccactgtggagggccctgcctgtgtcagaccctcgggcctaggcggcccatctctcccaaggacggagagtgccagggtgggctcccgtcctacacaaggagtggctgaccaggcccaggcacagcacagccaccctgctgtacctcccagctcccggcagtgtctacaccacagtgatggtgctacaggggccatgtggtcacaggacaggtggtcaggaaatgcacacttgactgcggtcgatggtgccgggtccggctgaatgccctggaggctcccaggccagctggggagtcccagtccccagggttggtgtgacctgggcaggcctgcggtgtccatctgtgaatgactgagatggtgggacttcagcttccaaggccaggggccagagtgggagcagggggcactcccgcctttcccctcggcctgtctagacctctctggctcccagtttctgctttgagtggctgggggctgtctcctgcctgtgctgtctgcccgtcgctctgcagggctgctgggcgggcacctccttcccctcccctacctcagctccctcctttggggtctgagggctgtgccccagcttgcctccctgtggcctccccctagaacccctgggtctgtcgggacatgccccacctggcacacacaccctgtgtagctcccactgcctgtgggaggacgctgggcccctgagccggcctctgtctacccctcctgcctttggggtcccctttaccccactgttcccccaaactgccttccaccttctccgcctttgcacaggctgttctcctgcctccagtgaactctgacttctccacagcctcccaaagggccccttgctcacactggcccagccctgcagcatggccatgttggtctctgagccttaagcctttggatgtggacacatttgtcctcttcctgaaaaatgtgagggtctgagaggccacgttcctgttcctgagtcatacgacagagtcccagtgacttgggtctgatgtctgtcccacagtgggacatccctgctgcatcccaatgccaccccgtgtcctggggacacccaaatgtgccattctctcagtatcacaagtcggggactgcaggaggctcaggtgccaggtgccttctgatgttcatgccacaagctcttcccactgtctctggctccccagacgatgttccaggaggcgggtgtgccagaaggggccacgtcttgcaaaccaccgcgctgtcctctttgagaaggagtcttactcaggactggggcctgtgcacacattgtcgcctcttttcagcacttagagattccttcctttgtctagtggctgaagccagggctgaagttggcctccaaatctgggccgtctcagaggcggcgcagcctggagttttccatctgtggccaagacccagtttttgggaggaggccctcatgggtcaagccagcctgtaccaggatggggggagggggttcccaacctaggccccagccacccagactcccccacccccactcccttttccactgctctgacctcgggcactgttgaaatatagtttttattgcatttctgccgttttacaaaaatatgacaaaataaattaaaaacaaataaataa

SEQ ID NO: 126547 - DNA, 502 bp, Homo sapiens
  Payload ID: 4813
  Gene Symbol: DDA1
  Gene Name: DET1 and DDB1 associated 1
  Uniprot ID: Q9BW61
  ENST ID: ENST00000596582
  CDS Start-End: 87-395
ctgtgaggcggcggctaagaaggcggctctggtggcggcggtggaggctgaggcggcggccgaggcggcgacggaggaaacagaagatggcagattttttgaaaggactgcctgtctacaacaaaagcaattttagtcgatttcacgcggactccgtgtgcaaagcctcgaaccgacggccctcagtctacctgcctacccgcgagtacccgtctgaacagatcatcgtgacagaaaagacaaacatcctcctgcgctacctgcatcagcaatgggacaaaaagaacgctgccaagaagagagaccaggagcaagtggagctggaaggcgagagctccgcacctccccgcaaggtggcgcggaccgacagcccagacatgcacgaggacacttaagactctcaactccacaggcgcctcctgccaggtctgctcctcggtcgcccacccgcctgcccgccatgtaggacggagcccctgggagtcatccctgttgtcaccaa

SEQ ID NO: 126548 - DNA, 757 bp, Homo sapiens
  Payload ID: 4813
  Gene Symbol: DDA1
  Gene Name: DET1 and DDB1 associated 1
  Uniprot ID: Q9BW61
  ENST ID: ENST00000593466
  CDS Start-End: 138-446
acagggaggtggtggcgccatcagtgtgggctgtgccgtggctggaagttactgtgaggcggcggctaagaaggcggctctggtggcggcggtggaggctgaggcggcggccgaggcggcgacggaggaaacagaagatggcagattttttgaaaggactgcctgtctacaacaaaagcaattttagtcgatttcacgcggactccgtgtgcaaagcctcgaaccgacggccctcagtctacctgcctacccgcgagtacccgtctgaacagatcatcgtgacagaaaagacaaacatcctcctgcgctacctgcatcagcaatgggacaaaaagaacgctgccaagaagagagaccaggagcaagtggagctggaaggcgagagctccgcacctccccgcaaggtggcgcggaccgacagcccagacatgcacgaggacacttaagactctcaactccacaggcgcctcctgccaggtctgctcctcggtcgcccacccgcctgcccgccatgttgcgtgctccgtgtccaccccaataaaagggtctttcctacttgacctcgcgtctttgctccacacaccttggctgcagaggacggagcccctgggagtcatccctgttgtcaccaagaggagtgagaagggccccccacgccaggggccccaggaccggctggattctctcgtgggcttgctgaggccaccatgttcaaggccaagacctgcctggaccatcccctctgcctctcctgtca

SEQ ID NO: 126549 - DNA, 1380 bp, Homo sapiens
  Payload ID: 4814
  Gene Symbol: DBX1
  Gene Name: developing brain homeobox 1
  Uniprot ID: A6NMT0
  ENST ID: ENST00000524983
  CDS Start-End: 290-1321
caatcagagagtccagagcctccggcgaatgaagctcgagtggagaactttgttgaacttcattgtcagagctgtcacttttcaaagtgctttagcgggcgggccactataaaaccatcacctcgacgagaggaccacggaggactcgcagacgcccaagtgggattgttacttggagacgtttgctaagcccaagagagaggacactgtgggggcgggaggggcgggaagcgaggcgtttaccctccggccactgaaagaagggttatttcgcccgcccgcgcctaccatgatgttccccggcctcctcgcgccccccgccgggtaccctagcctcctgcggcccacgcccaccttgacgctgccccagtccttgcagtcggcattttccggccactccagcttcctggtggaggatctgatccgcatcagccgaccccccgcctacctgccccgcagcgtgcccaccgccagcatgtcgccgcccaggcagggggcccccacggccctcaccgacacgggggcctcggacctgggctccccgggtcccggcagccgacggggcggctctccgccgactgccttctcccctgccagcgagacgacgtttctgaagtttggagtgaacgccatcctctcctcggggcccagaacagaaacatccccagccttgctccagagcgtccctcccaagaccttcgcctttccctacttcgaagggtcttttcagcctttcatcagatcttcttatttcccagcttcctccagcgtggtgcccatccccgggaccttctcctggccgctggccgcgcgcgggaagcctcggcggggcatgctgcgtcgagcagtcttctccgacgtgcagcggaaggcgctggagaagatgttccagaagcagaagtacatcagcaagcccgaccgcaagaagctggcggccaagctgggcctgaaagactcgcaggtgaaaatctggttccagaaccgacgcatgaaatggcggaactccaaggagcgcgaactcctgtctagcgggggctgtcgcgagcagaccctgcccaccaagctcaatccgcacccggacctcagcgacgtgggccagaagggccctgggaacgaagaggaggaggagggcccgggcagccccagccaccgcctggcctaccacgcgtcctccgacccccagcacctgcgggacccgcggctgccagggccgctgcccccctcgcccgcgcactcgagcagtcccgggaaaccttcggacttctcagattccgaggaggaagaggagggcgaggaacaggaggaaatcaccgtgtcctagaagccgctcgcacgccagagtactatttttaagtgctttgaaatcgaagaggtggggtc

SEQ ID NO: 126550 - DNA, 2806 bp, Homo sapiens
  Payload ID: 4815
  Gene Symbol: DBX2
  Gene Name: developing brain homeobox 2
  Uniprot ID: Q6ZNG2
  ENST ID: ENST00000332700
  CDS Start-End: 173-1192
atcgttccaagtccgccgccgtcccgggtggcctttcctccctgcctggctccgcgcgctccagccctgcgggaggcggcggcgagaagctgcggctctgggtgcggtgcggggcgcccgggcgacaggcgggcgcaaggcgggcgcgcagcagaccggttggcgccgcactatgctccccagcgcggtcgcagcccacgccggtgcgtactgggacgttgtggcttcctccgcgctcctcaacctccccgctgcgcccggctttggcaacctgggcaagagtttcctgatcgagaatttgctgcgggtcgggggcgccccaacgcccaggctgcagccgcccgcgccccacgacccggcgaccgccctggccaccgcgggcgcgcagctccggcccctgcctgctagcccagttcccctaaagctgtgccccgcagccgaacaagttagccccgccggggcgccctacggaacgcggtgggcttttcaagtgctcagtccctctgcggacagtgcgaggctgccgggccgggctccgggggaccgagactgtaccttccagccttcagcgccagcaccttccaaacctttccttctgagcaccccgccattctactcggcgtgctgcggtgggtcctgtcggcgccctgcatcctccactgcttttccaagagaagagagcatgctgcctctcctgacacaggactctaattccaaagctcggaggggcattttaagaagagctgtcttttctgaggaccagagaaaggctctggagaaaatgtttcagaaacagaaatatatcagcaaaacagaccgaaagaaacttgccatcaacttgggactaaaggaatcacaggtgaaaatttggtttcagaacaggaggatgaaatggcggaattccaaagaaaaggaagtgctttccaacaggtgtatccaagaagtaggtcttcaagaggatcccctctcacggtctgctctgggtttcccttctccatgtccttcaatatgggacgtcccccaacagcactcaagtccaagatggagggagaattctccagaaccttcagaaagactaatccaggagagttcaggggcaccacccccagaagcaaattcactgcaaggtgccttatatttatgttctgaagaagaagctggaagcaagggtgtacttactggggctgtctgaatggaagcattcctccgtgttcatttaaaagaacgcttaatagtaacatctggactctaatgccagctagcttgtacctcatcagtgcttagagcctaacaactttggagcgatgtatgaactaatgctttaggaaacccactctagtgttctcttgtttggccctagactcaggcttaatttgtaagtggaatagaatctcccagcaagtatgacagaactgaaaagaaggagagcaacagctggctcggtccctgctctgagtatgtgtatatatgtgtttgtctctatgtgtgtgtatatacataaatatccattaaaatgtattagtagaaactagtttctctttaactattgcattgagtaaattcacttccttttatgtgaagaaaactaccattgacagaatgttattaactttttgaaaataatgtaaaatttggactttagtgcaaactttcataccccaaaaacatgtttttaaaaattctctattttctgacttcttttggtatccagctgtaagtgaattttaacaccttagctcagcagtcctcaacaaatgagccactgctagatacatacactgagaatatatatttaaaatgaacctaacaagcaaattagaagaatttctgtatataactattagtatccttaatctccaagtctctggaccatcgggccatcatgagggagagacccatttaactaataattattttttgatctcttctctgtaaagatgggcctagaccagggtttgcaaaataaaatgcctttaagagcctgtcaggtaaatagagggtatggcccacccagagatatttgagtcaagtaatttttcaaatactgtattggccaaacaaaatgtctatgccaagaagtttgtgacctctggctaagactaaagaaagccgtggtgtcacagttcttaaaatttttctaactggacttaaaaccacaatactaacagaatcaatgatgatttctgtttgcgcttctagttagggactcaattttccacttaggtggcatacactttatatatcaggttatttttatgtattaacaaacaccacacagatgttttgtgttttttgactaccctgaaattgtatctttctaaaattgcatttctggtaacgatttgctgagttaatccagaagtttttactccaggaccaagaagaaattatgtttcactttgaaggaaatgaaacaaaaataggaaatgatgtggttttgcattaaactcttatcaatctgtggacaagaaacactatcagaagttcattaagtggcattttgttagtgagtaagctgcataatgatggtggcttctaatttgctgaactccactagagtctgagaagttaacgtcttttgagggtttagtgtttagaaaagatatttcaggagataacggttttaatcaacagcaggaaattattttgtacgaatagaattggacttggtatgtcaacctgtgtctttaccacatgatcttttacttaaaagtcattttagaagtgtgtctcagtgcctcattgtggggaatgggagcagggatctgctgacaaaagttaaaatttaaaacctgtcttaaaatga

SEQ ID NO: 126551 - DNA, 1383 bp, Homo sapiens
  Payload ID: 4816
  Gene Symbol: DPPA2
  Gene Name: developmental pluripotency associated 2
  Uniprot ID: Q7Z7J5
  ENST ID: ENST00000478945
  CDS Start-End: 248-1144
agccctttgtttatggcctgatctagctaaggcttctagacttcaggagcttaagaatcgtccggagggctgggcgtggcggtgcaggcctgtagtcccacccactccgaaggctgcggagggaggatcaacttgagtctgggaactcagccaggaattcaagaccagcctgggcaacacagtgaggccccctacccacatcctctccgtccccgcaatctccttccatcccagggtgttgctgaaaatgtcagatgcaaatttggatagcagcaagaagaatttcttggagggggaagtagatgatgaggaaagtgtgattttgacactggtgccagttaaagatgacgcaaatatggaacaaatggaaccaagcgtttcttcaacttctgatgtcaaactggagaagcctaagaaatacaatccaggtcatctacttcaaacaaatgagcaatttacagctccacaaaaagctagatgcaaaataccagcccttcccttgccgaccattttgcctcccattaataaggtgtgtcgggacactttgcgggactggtgtcaacaactcggtttgagtactaatggcaagaaaatcgaagtttatctgaggcttcataggcatgcttaccctgaacaacggcaagatatgcctgaaatgtcacaagagaccagattacagcgatgttcgaggaaacgcaaggcagtgaccaagagagcaaggcttcagagaagttatgagatgaatgagagagcagaagagaccaatacagttgaagtgataacttcagcaccgggagccatgttggcatcatgggcaagaattgctgcaagagctgttcagcctaaggctttgaattcatgttccattcctgtttctgttgaggcctttttgatgcaagcctctggcgtcaggtggtgtgtggtccatggcagacttctctcggcagacacaaagggttgggtacgcctgcagtttcatgcaggtcaggcctgggtgcctaccactcacaggaggatgatttctctcttcttgttacctgcctgcattttcccatccccaggcatagaagataatatgttatgccccgactgtgctaagaggaataagaagatgatgaaaagattaatgacagtagagaagtagcagcaacctgtttgaatacaatgtactaaaggagggatgtactttcagatcatgtaacctattacgaaggagtggaagaggagacaatttgaatgaatcctcatgatctacaaaacaaaatcatagtgactaggactccacagtgaagatggttgactagtgacacagccccatctaaagaatccctttctgtatgtctgaaaacccattaaaataaagtcactgcaattggccttgta

SEQ ID NO: 126552 - DNA, 1079 bp, Homo sapiens
  Payload ID: 4817
  Gene Symbol: DPPA3
  Gene Name: developmental pluripotency associated 3
  Uniprot ID: Q6W0C5
  ENST ID: ENST00000345088
  CDS Start-End: 118-597
tggagctccggttttcagcctctttccgggctacctggtagcaatttgaggctctgtcatcagtttctgctacgtttcaaagatcctggagaagcctagtgttgtgtcaagacgccgatggacccatcacagtttaatccaacctacatcccagggtctccacaaatgctcaccgaagaaaattcccgggacgattcaggggcctctcaaatctcctccgagacgttgataaagaaccttagtaacttgactatcaacgctagtagcgaatctgtttcccctctatcggaagctttactccgtcgagagtctgtaggagcagcagtcctcagggaaatcgaagatgagtggctttacagcaggagaggagtaagaacattgctgtctgtgcagagagaaaagatggcaagattgagatacatgttactcggcggagttcgtacgcatgaaagaagaccaacaaacaaggagcctaagggagttaagaaggaatcaagaccattcaaatgtccctgcagtttctgcgtgtctaatggatgggatccttctgagaatgctagaatagggaatcaagacaccaagccacttcagccataaatcttattcttgcacctttttttcttggtagtaattttatatagcaggttgagaaagctactctatgctagtatagactatacaccaataattttgataatgagttctaggatgtatttttcttgtatctttttcttcctactatgatactagtaattcataagggatctgtgtaatctgaatgtatttgaataactttagctctactgtttgatttgacccaaagaagccaagatgatataagtattcccatgtgtcttagaagcccaaagtcagtgagatgaaacccaacatcaagaaattgaagcaaagttacttatggataaagaaagcattaggtagttgggctatagcataattagattttctggctttcaaaaatttggattgcaatcacagcaaactttgttatttttacagttttcagtacaaaagtgtttatatagaaacaataaagttgacatttgagtaccttttaaaaa

SEQ ID NO: 126553 - DNA, 2817 bp, Homo sapiens
  Payload ID: 4818
  Gene Symbol: DPPA4
  Gene Name: developmental pluripotency associated 4
  Uniprot ID: Q7L190
  ENST ID: ENST00000335658
  CDS Start-End: 56-970
aagtgggaggagactttgcaaatagcaatcttggggcaggggccattttggaagcatgttgcgaggctccgcttcttctacaagtatggagaaggcaaaaggcaaggagtggacctccacagagaagtcgagggaagaggatcagcaggcttctaatcaaccaaattcaattgctttgccaggaacatcagcaaagagaaccaaagaaaaaatgtctatcaaaggcagtaaagtgctctgccctaagaaaaaggcagagcacactgacaaccccagacctcagaagaagataccaatccctccattaccttctaaactgccacctgttaatctgattcaccgggacattctgcgggcctggtgccaacaattgaagctgagctccaaaggccagaaattggatgcatataagcgcctgtgtgcctttgcctacccaaatcaaaaggattttcctagcacagcaaaagaggccaaaatccggaaatcattgcaaaaaaaattaaaggtggaaaagggggaaacgtccctgcaaagttctgagacacatcctcctgaagtggctcttcctcctgtgggggagccgcctgccctggaaaattccactgctctccttgagggagttaatacagttgtggtgacaacttctgccccagaggctttgctggcctcctgggcgagaatttcagccagggcgaggacaccagaggcagtggaatctccacaagaggcctctggtgtcaggtggtgtgtggtccatgggaaaagtctccctgcagacacagatggttgggttcacctgcagtttcatgctggtcaagcctgggttccagaaaagcaagaagggagagtgagtgcactcttcttgcttcctgcctccaattttccacccccgcaccttgaagacaatatgttgtgccccaaatgtgttcacaggaacaaggtcttaataaaaagcctccaatgggaatagaatatcaggaaaaaggccacatctatggtaattaatggcagaaaagctggagagttggattctgcggtgctgctgacaggtgaactctggtcctctgcacctgtttatgggccatgcagactggtggggtggcagatgttagcctaagacccctagcagtgcctgttgctttgtgagtggagatagagactcttacatttaaaaatggaaaaacatttcacaaattaccataaattgtagttaatatgtagaaaaactcattcatactacttttctaaaatagacatgacttcagcagcagcttttttttgttgtattttgagacagtgtctcactgttgcccaggctggagtgcagtggtgcaatctcagttcagtgcaatctccgcctcctgggttcaaatgattctcctgcctcagcctcctgagtagctaggtacaggcacctgccaccacacccagctaattttttgtatttttagtagagatggggtttcaccatgttggccaggttggtctcaaactcctggactcaagtgatcaccctcctcagcctcccaaaatgctgggactatgggcatgagcccctgcgcctgaccttcaacagctcttttaagtgagttcttcagctaagcattgtgatggacttgagtaaaatggtagttggctcttgtgctcaattttctcttcctctgaacactgactactttaggagctgcttcattccaattgcaatttcataaaacgtaaagtattttaaggcaaagaaaggctgttaattccctccctcccccaaacacatgatttttaatattctaaacaatatttttcaaagttctcttaataacctgagatttctatggtttgactccaggatcaaaacacaagggactttgtattatttcacttataattgttttgtatatttctggagtttaaaatgtttaaggttgcttcccgctcataaatacataatatattgaatttaaaatgtgtttattaaccgattctccataaataaaaataagatgtgtatgtaaaataattcatctgttgtatttagagaaccatattcattgcatgcaaattttattgttagtgttcttaactcaagtaggagtaaaccaaaaagtgtgatttttcttttgtatgactcgtttgttctttattagttggtggtatgggttggatcatttgtttttaaaactacttaggtatgattcacatacaaaaagctgcacatatttaatgtatcctattgtgtaattaatttttaatttttttgtgtacttcctaaacttatagtcctgcgagtctgggaacagatctgtttttcacttatcctgatttaatgacagtttccaacattgttttgttattacaagtaggggatctttttttttgcccgtttaatgaagatactaaaaataatgcactggaaggagtggaagagttggaaaatttgtaaccatcataatacaggtgtaataggtttgggaaagaatcctcaaaaatgttaaagcaagggaggaaagtttgttgagaagcaagatgttcttctctcctgcccgcccccgccgttggttgttggtggtcagaattattgtgtaataaataatagacattttttcttatactatgtgtattgttccttttgtttcctttttaaacttctcccctgctttatttggatgggtcaagtttctgttctgtttccttcctttctattaatttggaaatgtccttggctttacgattctgcttgtagatacttcccctgcttctaacacatttcaataaacttaaatttctctatatacaaaataaattaataattggagtctacca

SEQ ID NO: 126554 - DNA, 320 bp, Homo sapiens
  Payload ID: 4818
  Gene Symbol: DPPA4
  Gene Name: developmental pluripotency associated 4
  ENST ID: ENST00000477303
  CDS Start-End: 214-320
taagacgttgcacaggcactgaacggccatatccgagcgctctcaggtcctcttgacttgaactgggtcatttttaactgtctcggttttaagtcttttgtgaggtccaaatggacctccacagagaagtcgagggaagaggatcagcaggcttctaatcaaccaaattcaattgctttgccaggaacatcagcaaagagaaccaaagaaaaaatgtctatcaaaggcagtaaagtgctctgccctaagaaaaaggcagagcacactgacaaccccagacctcagaagaagataccaatccctccattaccttctaaact

SEQ ID NO: 126555 - DNA, 805 bp, Homo sapiens
  Payload ID: 4818
  Gene Symbol: DPPA4
  Gene Name: developmental pluripotency associated 4
  ENST ID: ENST00000495679
  CDS Start-End: 1-207
atgttgcgaggctccgcttcttctacaagtatggagaaggcaaaaggcaaggaggaacatcagcaaagagaaccaaagaaaaaatgtctatcaaaggcagtaaagtgctctgccctaagaaaaaggcagagcacactgacaaccccagacctcagaagaagataccaatccctccattaccttctaaactgccacctgttaatctgattcaccgggacattctgcgggcctggtgccaacaattgaagctgagctccaaaggccagaaattggatgcatataagcgcctgtgtgcctttgcctacccaaatcaaaaggattttcctagcacagcaaaagaggccaaaatccggaaatcattgcaaaaaaaattaaaggtggaaaagggggaaacgtccctgcaaagttctgagacacatcctcctgaagtggctcttcctcctgtgggggagccgcctgccctggaaaattccactgctctccttgagggagttaatacagttgtggtgacaacttctgccccagaggctttgctggcctcctgggcgagaatttcagccagggcgaggacaccagaggcagtggaatctccacaagaggcctctggtgtcaggtggtgtgtggtccatgggaaaagtctccctgcagacacagatggttgggttcacctgcagtttcatgctggtcaagcctgggttccagaaaagcaagaagggagagtgagtgcactcttcttgcttcctgcctccaattttccacccccgcaccttgaagacaatatgttgtgccccaaatgtgttcacag

SEQ ID NO: 126556 - DNA, 679 bp, Homo sapiens
  Payload ID: 4819
  Gene Symbol: DPPA5
  Gene Name: developmental pluripotency associated 5
  Uniprot ID: A6NC42
  ENST ID: ENST00000370370
  CDS Start-End: 71-421
cctgagcctcggccggcgtgattaggcctggtttgcgctggagagtggtcttggttgtgagggtcataagatgggaactctcccggcacgtagacatatcccgccgtgggtgaaagttcccgaagacctgaaagatccagaggtgttccaggtccagacgcggctgctgaaagccattttcggcccggacggatctcgaatcccttacatcgagcaggtgagcaaggccatgctcgagctgaaggctctggagtcttcagacctcaccgaggtcgtggtttacggctcctatttgtacaagctccggaccaagtggatgctccagtccatggctgagtggcaccgccagcgccaggagcgagggatgctcaaacttgccgaagccatgaatgccctcgaactaggcccttggatgaagtgaaccagtttccagccaatgcaatgaagccgggttgcagagattaggttgtggccagagctagagtgattccttaagcttgttttaaaatctgctccagcctaaagagttaagggaaaaccatttgttcccttaaagagttaagggaaaacccttggctctgagtcttgttgtgaatatttctttgatgattgttaataaaaagtgttttttcttttttcccatttttaaaaataacaataaagttttaaataagttgat

SEQ ID NO: 126557 - DNA, 1746 bp, Homo sapiens
  Payload ID: 4820
  Gene Symbol: DRG1
  Gene Name: developmentally regulated GTP binding protein 1
  Uniprot ID: Q9Y295
  ENST ID: ENST00000331457
  CDS Start-End: 162-1265
cagccccacgctttgcgactcgcggtgacccctacgcggaactctctcgcggtaattcgaagtaccgcgcctgcgtgctgcagtagcgcctggtggcggtggcagtttgcccgcgggtgtgtgaagggagacagtgtggaggccacagggtactcgccacgatgagcagcaccttagctaagatcgcggagatagaagcagagatggctcggactcaaaagaacaaggccacagcacaccacttagggctgcttaaggctcgtcttgctaagcttcgtcgagaactcattactccaaagggtggtggtggtggaggtccaggagaaggttttgatgtggccaagacaggtgatgctcgaattggatttgttggttttccatctgtggggaagtcaacactgcttagtaacctggcaggggtatattctgaggtggcagcctatgaattcactactctgaccactgtgcctggtgtcatcagatacaaaggtgccaagatccagctcctggatctcccaggtatcattgaaggtgccaaggatgggaaaggtagaggtcgtcaagtcattgcagtggcccgaacctgtaacttgatcttgattgttctggatgtcctgaaacctttgggacataagaagataattgaaaatgagctggaaggctttggcattcgcttgaacagcaaaccccccaacattggctttaagaagaaggacaagggaggcattaatctcacagccacttgcccccagagtgagctggatgctgaaactgtgaagagcattctggctgaatacaagattcataatgccgatgtgactctacgtagtgatgctacagctgatgacctcattgatgtggtggaaggaaacagagtttatatcccctgtatctatgtgttaaataagattgaccaaatctccattgaggaattggatatcatctataaggtgcctcactgtgtacccatctctgcccatcaccgctggaattttgatgacctattggaaaagatctgggactatctgaaactagtgagaatttacaccaaacccaaaggccagttaccagattacacatccccagtggtgcttccttactccaggaccacagtggaggatttctgcatgaagattcacaaaaatcttatcaaagaatttaaatatgctctggtctggggtctctctgtgaaacacaatcctcagaaagtgggtaaagaccatacgttggaggatgaggatgtcattcaaattgtgaagaagtgaaacctttcccttttcccatctgccggacgaaccacaacagcgttccccatgatcaagcaccctaccccagttctttctggttttggcagtcactggatcaggatccaggggagggagatggaggcacccaaactggaacttcatttgtcttaccttggtgtcaccttgtatgtcgaactgcataaaagatctggtaggctggtcagctacatgcagctcatgtgtcattgtcagaatttgttttgggatgggctgaatgaggaagggtatatacggtgaagcagctacagaagggatccttgggaacttcatcttgagtgtgaaatggataaaaatatgacatgctgcatcttacttgatgtttacttatgggaaccccttccaaactagatatggctttcagtcctttcaagtagtctttcccacatgatactggagagaggaaggactttatgtaagttaattgatcactccccgcaag

SEQ ID NO: 126558 - DNA, 612 bp, Homo sapiens
  Payload ID: 4820
  Gene Symbol: DRG1
  Gene Name: developmentally regulated GTP binding protein 1
  ENST ID: ENST00000416465
  CDS Start-End: 75-266
gcctggtggcggtggcagtttgcccgcgggtgtgtgaagggagacagtgtggaggccacagggtactcgccacgatgagcagcaccttagctaagatcgcggagatagaagcagagatggctcggactcaaaagaacaaggccacagcacaccacttagggctgcttaaggctcgtcttgctaagcttcgtcgagaactcattactccaaagggtggtggtggtggaggtccaggagaagctcctggatctcccaggtatcattgaaggtgccaaggatgggaaaggtagaggtcgtcaagtcattgcagtggcccgaacctgtaacttgatcttgattgttctggatgtcctgaaacctttgggacataagaagataattgaaaatgagctggaaggctttggcattcgcttgaacagcaaaccccccaacattggctttaagaagaaggacaagggaggcattaatctcacagccactaaacggagatttgccatgttgcccaggctggtcttgaacttttggcctcaagctgtctcctgcttcggtctcccaaagtgttgggattacagtgcccccagagtgagctggatgctgaaactgtgaagagca

SEQ ID NO: 126559 - DNA, 338 bp, Homo sapiens
  Payload ID: 4820
  Gene Symbol: DRG1
  Gene Name: developmentally regulated GTP binding protein 1
  ENST ID: ENST00000548143
  CDS Start-End: 1-169
cctattggaaaagatctgggactatctgaaactagtgagaatttacaccaaacccaaaggccagttaccagattacacatccccagtggtgcttccttactccaggaccacagtggaggatttctgcatgaagattcacaaaaatcttatcaaagaatttaaatattagaaggggaagataaaagactttgattcatgaagaatctgctcactgagaagtgtatatcaagccacaatttccatcaaaaagtgattaagcagagaatggagaagaaggttgattccaggtattttaaggatggtgcagttaagaaaccttattctgcaaagacactgtc

SEQ ID NO: 126560 - DNA, 1964 bp, Homo sapiens
  Payload ID: 4821
  Gene Symbol: DRG2
  Gene Name: developmentally regulated GTP binding protein 2
  Uniprot ID: P55039
  ENST ID: ENST00000225729
  CDS Start-End: 139-1233
tgaatcctggagcaccaggcgcccacgagaacgctgttctctttggcttccgggcgcacgctactctgtcgccgccgtcagaccggaattgccggtgccgccgccaccgctgtctgtgcgcccacctctgctgctaccatggggatcttagagaagatctcggagatcgagaaggagatcgctcggacacagaagaacaaggccactgagtatcatctgggcctgctgaaagctaagctcgccaagtatcgggcccagctcctggaaccgtccaaatcggcctcgtccaaaggagagggctttgatgtcatgaagtcgggtgatgcccgtgtggcgctgattggatttccctctgtgggtaagtccacattcttgagtctgatgacctccacggccagcgaggcagcgtcctatgagttcaccactctgacgtgtattcctggggtcattgaatacaaaggtgccaacatccagctcctggaccttcctggaatcattgaaggcgcagcccaaggaaaaggccgtggccggcaggtgatcgctgtggcgcgcacggctgacgtcatcatcatgatgctggatgccaccaagggagaggtgcagaggtctctgctggagaaggagctggagtctgtgggcatccgcctcaacaagcacaagcctaacatctacttcaagcccaagaaaggtggtggcatctcctttaactcgacagtcacgctgacccagtgctcggaaaagctggtgcagctcatcctgcacgaatacaagatcttcaatgcagaagtgcttttccgagaagactgctccccggacgagttcatcgatgtgatcgtgggcaaccgggtgtacatgccctgcctgtatgtttataacaaaatcgaccagatctccatggaagaggtggaccgcctggcccgaaaacccaacagtgtggtcatcagctgcggcatgaagctgaacctggactatctgctggagatgctttgggagtacttggccctgacctgcatctacaccaagaagagaggacagaggccagacttcacagacgccatcattctccggaaaggggcctcagtggagcacgtgtgccaccgcatccaccggtcactcgccagccagttcaagtacgccctggtgtggggcaccagcaccaagtacagtccgcagcgggtgggcctgacccacaccatggagcatgaggacgtcatccagatcgtgaagaagtaacggcgcctgccgggcctcccgcccacctgcctcgtctccctggggaggtggtcccactgggacacacaaacacccaaacagaaaaatacaaatacacgtaccccaggaaggggtccctcaagtctctgctatttacagaagtttcttcagtaggcagacgaagagtgtgttggggcaaaggggctcggttggaggcatttcccataagactgagccctctcatgggggttttgagtttgtagtgctgagcctgcatctgtgcctcccagccccctgcactgagggagcaagttgcccacatgcccgccagccagggcctaaagcagatggcatgctcagtgccaggctggtagctgggcctgtttgggtccctggaggctgtggctgctgtcatggcacctcactccctcagctcttgccagcttctctgacacttgggttgggggcccttccaggaggaaacccccttgggtgccccacacagggctctccatgatgggaaccagtggttagtggcttcaaaggcccagctgacaccctccacagcctaaggggtgtcctaaagtgcctccccctgtattccccctcccagggcagcccctgcccagcacaaaaccccaggaccctggctctgcacgcctggggcagggacttttgagtttaggatctgtattttctaagtccccagttctcctggctctcctttctgaaataaaggattgaaaacggtt

SEQ ID NO: 126561 - DNA, 1897 bp, Homo sapiens
  Payload ID: 4821
  Gene Symbol: DRG2
  Gene Name: developmentally regulated GTP binding protein 2
  ENST ID: ENST00000395726
  CDS Start-End: 100-1131
tctttggcttccgggcgcacgctactctgtcgccgccgtcagaccggaattgccggtgccgccgccaccgctgtctgtgcgcccacctctgctgctaccatggggatcttagagaagatctcggagatcgagaaggagatcgctcggacacagaagaacaaggccactgagtatcatctgggcctgctgaaagctaagctcgccaagtatcgggcccagctcctggaaccgtccaaatcggcctcgtccaaaggagagggctttgatgtcatgaagtcgggtgatgcccgtgtggcgctgattggatttccctctgtgggtaagtccacattcttgagtctgatgacctccacggccagcgaggcagcgtcctatgagttcaccactctgacgtgtattcctggggtcattgaatacaaaggtgccaacatccagctcctggaccttcctggaatcattgaaggcgcagcccaaggaaaaggccgtggccggcaggtgatcgctgtggcgcgcacggctgacgtcatcatcatgatgctggatgccaccaagggagaggtgcagaggtctctgctggagaaggagctggagtctgtgggcatccgcctcaacaagcacaagcctaacatctacttcaagcccaagaaaggtggtggcatctcctttaactcgacagtcacgctgacccagtgctcggaaaagctggtgcagctcatcctgcacgaatacaagatcttcaatgcagaagtgcttttccgagaagactgctccccggacgagttcatcgatgtgatcgtgggcaaccgggtgtacatgccctgcctgtatgtttataacaaaatcgaccagatctccatggaagaggtggaccgcctggcccgaaaacccaacagtgtggtcatcagctgcggcatgaagctgaacctggactatctgctggagatgctttgggagtacttggccctgacctgcatctacaccaagaagagaggacagaggccagacttcacagacgccatcattctccggaaaggggcctcagtggagcacgtgtgccaccgcatccaccggtcactcgccagccagttcaaggcaccagcaccaagtacagtccgcagcgggtgggcctgacccacaccatggagcatgaggacgtcatccagatcgtgaagaagtaacggcgcctgccgggcctcccgcccacctgcctcgtctccctggggaggtggtcccactgggacacacaaacacccaaacagaaaaatacaaatacacgtaccccaggaaggggtccctcaagtctctgctatttacagaagtttcttcagtaggcagacgaagagtgtgttggggcaaaggggctcggttggaggcatttcccataagactgagccctctcatgggggttttgagtttgtagtgctgagcctgcatctgtgcctcccagccccctgcactgagggagcaagttgcccacatgcccgccagccagggcctaaagcagatggcatgctcagtgccaggctggtagctgggcctgtttgggtccctggaggctgtggctgctgtcatggcacctcactccctcagctcttgccagcttctctgacacttgggttgggggcccttccaggaggaaacccccttgggtgccccacacagggctctccatgatgggaaccagtggttagtggcttcaaaggcccagctgacaccctccacagcctaaggggtgtcctaaagtgcctccccctgtattccccctcccagggcagcccctgcccagcacaaaaccccaggaccctggctctgcacgcctggggcagggacttttgagtttaggatctgtattttctaagtccccagttctcctggctctcctttctgaaataaagga

SEQ ID NO: 126562 - DNA, 389 bp, Homo sapiens
  Payload ID: 4821
  Gene Symbol: DRG2
  Gene Name: developmentally regulated GTP binding protein 2
  ENST ID: ENST00000580929
  CDS Start-End: 49-389
gccggtgccgccgccaccgctgtctgtgcgcccacctctgctgctaccatggggatcttagagaagatctcggagatcgagaaggagatcgctcggacacagaagaacaaggccactgagtatcatctgggcctgctgaaagctaagctcgccaagtatcgggcccagctcctggaaccgtccaaatcggcctcgtccaaaggagagggctttgatgtcatgaagtcgggtgatgcccgtgtggcgctgattggatttccctctgtgggtaagcccaagaaaggtggtggcatctcctttaactcgacagtcacgctgacccagtgctcggaaaagctggtgcagctcatcctgcacgaatacaagatcttcaatgcagaagtgctttt

SEQ ID NO: 126563 - DNA, 795 bp, Homo sapiens
  Payload ID: 4821
  Gene Symbol: DRG2
  Gene Name: developmentally regulated GTP binding protein 2
  ENST ID: ENST00000496428
  CDS Start-End: 104-376
gttctctttggcttccgggcgcacgctactctgtcgccgccgtcagaccggaattgccggtgccgccgccaccgctgtctgtgcgcccacctctgctgctaccatggggatcttagagaagatctcggagatcgagaaggagatcgctcggacacagaagaacaaggccactgagtatcatctgggcctgctgaaagctaagctcgccaagtatcgggcccagctcctggaaccgtccaaatcggcctcgtccaaaggagagggctttgatgtcatgaagtcgggtgatgcccgtgtggcgctgattggatttccctctgtggtccacattcttgagtctgatgacctccacggccagcgaggcagcgtcctatgagttcaccactctgacgtgtattcctggggtcattgaatacaaaggtgccaacatccagctcctggaccttcctggaatcattgaaggcgcagcccaaggtgggaggcagggcaggaaaaggccgtggccggcaggtgatcgctgtggcgcgcacggctgacgtcatcatcatgatgctggatgccaccaagggagaggtgcagaggtccgcagggtggggcatggggcaggctcacatgtctggggagggccaatgtgtccctgagctcgtactaggcggcctgtgggtgtttggctctctcacacgtgagagtagtggtaggacttgtcacagactaaacccaacaccacccagcctatggcgtcttctcctcaaggcttgtgtccagccagcacagaggtatcttgggactgggggc

SEQ ID NO: 126564 - DNA, 891 bp, Homo sapiens
  Payload ID: 4821
  Gene Symbol: DRG2
  Gene Name: developmentally regulated GTP binding protein 2
  ENST ID: ENST00000583355
  CDS Start-End: 18-503
ccacctctgctgctaccatggggatcttagagaagatctcggagatcgagaaggagatcgctcggacacagaagaacaaggccactgagtatcatctgggcctgctgaaagctaagctcgccaagtatcgggcccagctcctggaaccgtccaaatcggcctcgtccaaaggagagggctttgatgtcatgaagtcgggtgatgcccgtgtggcgctgattggatttccctctgtgggtaagctgcggcatgaagctgaacctggactatctgctggagatgctttgggagtacttggccctgacctgcatctacaccaagaagagaggacagaggccagacttcacagacgccatcattctccggaaaggggcctcagtggagcacgtgtgccaccgcatccaccggtcactcgccagccagttcaagtacgccctggtgtggggcaccagcaccaagtacagtccgcagcgggtgggcctgacccacaccatggagcatgaggacgtcatccagatcgtgaagaagtaacggcgcctgccgggcctcccgcccacctgcctcgtctccctggggaggtggtcccactgggacacacaaacacccaaacagaaaaatacaaatacacgtaccccaggaaggggtccctcaagtctctgctatttacagaagtttcttcagtaggcagacgaagagtgtgttggggcaaaggggctcggttggaggcatttcccataagactgagccctctcatgggggttttgagtttgtagtgctgagcctgcatctgtgcctcccagccccctgcactgagggagcaagttgcccacatgcccgccagccagggcctaaagcagatggcatgctcagtgccaggctggtagctgggcc

SEQ ID NO: 126565 - DNA, 1838 bp, Homo sapiens
  Payload ID: 4821
  Gene Symbol: DRG2
  Gene Name: developmentally regulated GTP binding protein 2
  ENST ID: ENST00000580055
  CDS Start-End: 59-793
gaccggaattgccggtgccgccgccaccgctgtctgtgcgcccacctctgctgctaccatggggatcttagagaagatctcggagatcgagaaggagatcgctcggacacagaagaacaaggccactgagtatcatctgggcctgctgaaagctaagctcgccaagtatcgggcccagctcctggaaccgtccaaatcggcctcgtccaaaggagagggctttgatgtcatgaagtcgggtgatgcccgtgtggcgctgattggatttccctctgtgggtaagtccacattcttgagtctgatgacctccacggccagcgaggcagcgtcctatgagttcaccactctgacgtgtattcctggggtcattgaatacaaaggtgccaacatccagctcctggaccttcctggaatcattgaaggcgcagcccaaggaaaaggccgtggccggcaggtgatcgctgtggcgcgcacggctgacgtcatcatcatgatgctggatgccaccaagggagaggtgcagaggtctctgctggagaaggagctggagtctgtgggcatccgcctcaacaagcacaagcctaacatctacttcaagcccaagaaaggtggtggcatctcctttaactcgacagtcacgctgacccagtgctcggaaaagctggtgcagctcatcctgcacgaatacaatcttcaatgcagaagtgcttttccgagaagactgctccccggacgagttcatcgatgtgatcgtgggcaaccgggtgtacatgccctgcctgtatgtttataacaaaatcgaccagatctccatggaagaggtggaccgcctggcccgaaaacccaacagtgtggtcatcagctgcggcatgaagctgaacctggactatctgctggagatgctttgggagtacttggccctgacctgcatctacaccaagaagagaggacagaggccagacttcacagacgccatcattctccggaaaggggcctcagtggagcacgtgtgccaccgcatccaccggtcactcgccagccagttcaagtacgccctggtgtggggcaccagcaccaagtacagtccgcagcgggtgggcctgacccacaccatggagcatgaggacgtcatccagatcgtgaagaagtaacggcgcctgccgggcctcccgcccacctgcctcgtctccctggggaggtggtcccactgggacacacaaacacccaaacagaaaaatacaaatacacgtaccccaggaaggggtccctcaagtctctgctatttacagaagtttcttcagtaggcagacgaagagtgtgttggggcaaaggggctcggttggaggcatttcccataagactgagccctctcatgggggttttgagtttgtagtgctgagcctgcatctgtgcctcccagccccctgcactgagggagcaagttgcccacatgcccgccagccagggcctaaagcagatggcatgctcagtgccaggctggtagctgggcctgtttgggtccctggaggctgtggctgctgtcatggcacctcactccctcagctcttgccagcttctctgacacttgggttgggggcccttccaggaggaaacccccttgggtgccccacacagggctctccatgatgggaaccagtggttagtggcttcaaaggcccagctgacaccctccacagcctaaggggtgtcctaaagtgcctccccctgtattccccctcccagggcagcccctgcccagcacaaaaccccaggaccctggctctgcacgcctggggcagggacttttgagtttaggatctgtattttctaagtcccca

SEQ ID NO: 126566 - DNA, 566 bp, Homo sapiens
  Payload ID: 4821
  Gene Symbol: DRG2
  Gene Name: developmentally regulated GTP binding protein 2
  ENST ID: ENST00000577450
  CDS Start-End: 51-389
ttgccggtgccgccgccaccgctgtctgtgcgcccacctctgctgctaccatggggatcttagagaagatctcggagatcgagaaggagatcgctcggacacagaagaacaaggccactgagtatcatctgggcctgctgaaagctaagctcgccaagtatcgggcccagctcctggaaccgtccaaatcggcctcgtccaaaggagagggctttgatgtcatgaagtcgggtgatgcccgtgtggcgctgattggatttccctctgtgggtaagtccacattcttgagtctgatgacctccacggccagcgaggcagcgtcctatgagttcaccactctgacgtgtattcctggggtcattgaagaaaaggccgtggccggcaggtgatcgctgtggcgcgcacggctgacgtcatcatcatgatgctggatgccaccaagggagaggtgcagaggtctctgctggagaaggagctggagtctgtgggcatccgcctcaacaagcacaagcctaacatctacttcaagcccaagaaaggtggtggcatctcctttaactcgacag

SEQ ID NO: 126567 - DNA, 2531 bp, Homo sapiens
  Payload ID: 4821
  Gene Symbol: DRG2
  Gene Name: developmentally regulated GTP binding protein 2
  ENST ID: ENST00000467099
  CDS Start-End: 57-329
ccggaattgccggtgccgccgccaccgctgtctgtgcgcccacctctgctgctaccatggggatcttagagaagatctcggagatcgagaaggagatcgctcggacacagaagaacaaggccactgagtatcatctgggcctgctgaaagctaagctcgccaagtatcgggcccagctcctggaaccgtccaaatcggcctcgtccaaaggagagggctttgatgtcatgaagtcgggtgatgcccgtgtggcgctgattggatttccctctgtggtccacattcttgagtctgatgacctccacggccagcgaggcagcgtcctatgagttcaccactctgacgtgtattcctggggtcattgaatacaaaggtgccaacatccagctcctggaccttcctggaatcattgaaggcgcagcccaaggtgggaggcagggcaggaaaaggccgtggccggcaggtgatcgctgtggcgcgcacggctgacgtcatcatcatgatgctggatgccaccaagggagaggtgcagaggtccgcagggtggggcatggggcaggctcacatgtctggggagggccaatgtgtccctgagctcgtactaggcggcctgtgggtgtttggctctctcacacgtgagagtagtggtaggacttgtcacagactaaacccaacaccacccagcctatggcgtcttctcctcaaggcttgtgtccagccagcacagaggtatcttgggactgggggccgaggggcttggcctggccctgcttcctgttcagaggcacaggtgcctcatcactgcccagaacctgccaggagcccagccccaggcacagaagcattgttcatccacatcctggcagaggggtacaccaggcctgcctcctcgggaccagaaggagtaccctcatgtggtcacctcgcgggggctccaccacttgcctgtgcatgccgaccgtaaaccgggccagtcccctctgggactgtggcagagtttagaagttccctgcagctctagggcattgggaaggagtgttctctgggttgctggggaagggggtggaggagagagtcagtctctgggtgggcagtgacatcctgcgtaacagggaagctgtgcatctggctctgtggacagcctgtgaggggcttaaggggtactcttcctaggtctctgctggagaaggagctggagtctgtgggcatccgcctcaacaagcacaagcctaacatctacttcaagcccaagaaaggtggtggcatctcctttaactcgacagtcacgctgacccagtgctcggaaaagctggtgcagctcatcctgcacgaatacaagatcttcaatgcagaagtgcttttccgagaagactgctccccggacgagttcatcgatgtgatcgtgggcaaccgggtgtacatgccctgcctgtatgtttataacaaaatcgaccagatctccatggaagaggtggaccgcctggcccgaaaacccaacagtgtggtcatcagctgcggcatgaagctgaacctggactatctgctggagatgctttgggagtacttggccctgacctgcatctacaccaagaagagaggacagaggccagacttcacagacgccatcattctccggaaaggggcctcagtggagcacgtgtgccaccgcatccaccggtcactcgccagccagttcaagtacgccctggtgtggggcaccagcaccaagtacagtccgcagcgggtgggcctgacccacaccatggagcatgaggacgtcatccagatcgtgaagaagtaacggcgcctgccgggcctcccgcccacctgcctcgtctccctggggaggtggtcccactgggacacacaaacacccaaacagaaaaatacaaatacacgtaccccaggaaggggtccctcaagtctctgctatttacagaagtttcttcagtaggcagacgaagagtgtgttggggcaaaggggctcggttggaggcatttcccataagactgagccctctcatgggggttttgagtttgtagtgctgagcctgcatctgtgcctcccagccccctgcactgagggagcaagttgcccacatgcccgccagccagggcctaaagcagatggcatgctcagtgccaggctggtagctgggcctgtttgggtccctggaggctgtggctgctgtcatggcacctcactccctcagctcttgccagcttctctgacacttgggttgggggcccttccaggaggaaacccccttgggtgccccacacagggctctccatgatgggaaccagtggttagtggcttcaaaggcccagctgacaccctccacagcctaaggggtgtcctaaagtgcctccccctgtattccccctcccagggcagcccctgcccagcacaaaaccccaggaccctggctctgcacgcctggggcagggacttttgagtttaggatctgtattttctaagtccccagttctcctggctctcctttctgaaataaaggattgaaaacggt

SEQ ID NO: 126568 - DNA, 565 bp, Homo sapiens
  Payload ID: 4821
  Gene Symbol: DRG2
  Gene Name: developmentally regulated GTP binding protein 2
  ENST ID: ENST00000582419
  CDS Start-End: 60-128
agaccggaattgccggtgccgccgccaccgctgtctgtgcgcccacctctgctgctaccatggggatcttagagaagatctcggagatcgagaaggagatcgctcggacacagaagaacaaggattaagaaactgatgcacaagaagactaacttttccaaagtaaaatggccccactaatggcagggtggagttctgacacaagctctcactgccctctgagactgggcaggggaggcctctttgaagaagtgacatttgagctgcacctcaaatgatgccactgagtatcatctgggcctgctgaaagctaagctcgccaagtatcgggcccagctcctggaaccgtccaaatcggcctcgtccaaaggagagggctttgatgtcatgaagtcgggtgatgcccgtgtggcgctgattggatttccctctgtgggtaagtccacattcttgagtctgatgacctccacggccagcgaggcagcgtcctatgagttcaccactctgacgtgtattcctggggtcattgaatacaaaggtgccaacatccagctcctggaccttc

SEQ ID NO: 126569 - DNA, 1530 bp, Homo sapiens
  Payload ID: 4821
  Gene Symbol: DRG2
  Gene Name: developmentally regulated GTP binding protein 2
  ENST ID: ENST00000582314
  CDS Start-End: 84-356
gcacgctactctgtcgccgccgtcagaccggaattgccggtgccgccgccaccgctgtctgtgcgcccacctctgctgctaccatggggatcttagagaagatctcggagatcgagaaggagatcgctcggacacagaagaacaaggccactgagtatcatctgggcctgctgaaagctaagctcgccaagtatcgggcccagctcctggaaccgtccaaatcggcctcgtccaaaggagagggctttgatgtcatgaagtcgggtgatgcccgtgtggcgctgattggatttccctctgtggtccacattcttgagtctgatgacctccacggccagcgaggcagcgtcctatgagttcaccactctgacgtgtattcctggggtcattgaatacaaaggtgccaacatccagctcctggaccttcctggaatcattgaaggcgcagcccaaggaaaaggccgtggccggcaggtgatcgctgtggcgcgcacggctgacgtcatcatcatgatgctggatgccaccaagggagaggtgcagaggtccgcagggtggggcatggggcaggctcacatgtctggggagggccaatgtgtccctgagctcgtactaggcggcctgtgggtgtttggctctctcacacgtgagagtagtggtaggacttgtcacagactaaacccaacaccacccagcctatggcgtcttctcctcaaggcttgtgtccagccagcacagaggtatcttgggactgggggccgaggggcttggcctggccctgcttcctgttcagaggcacaggtgcctcatcactgcccagaacctgccaggagcccagccccaggcacagaagcattgttcatccacatcctggcagaggggtacaccaggcctgcctcctcgggaccagaaggagtaccctcatgtggtcacctcgcgggggctccaccacttgcctgtgcatgccgaccgtaaaccgggccagtcccctctgggactgtggcagagtttagaagttccctgcagctctagggcattgggaaggagtgttctctgggttgctggggaagggggtggaggagagagtcagtctctgggtgggcagtgacatcctgcgtaacagggaagctgtgcatctggctctgtggacagcctgtgaggggcttaaggggtactcttcctaggtctctgctggagaaggagctggagtctgtgggcatccgcctcaacaagcacaagcctaacatctacttcaagcccaagaaaggtggtggcatctcctttaactcgacagtcacgctgacccagtgctcggaaaagctggtgcagctcatcctgcacgaatacaagatcttcaatgcagaagtgcttttccgagaagactgctccccggacgagttcatcgatgtgatcgtgggcaaccgggtgtacatgccctgcctgtatgtttataacaaaatcgaccagatctccatggaagaggtggaccgcctggcccgaaaacccaacagtgtggtcatcagctgcggc

SEQ ID NO: 126570 - DNA, 550 bp, Homo sapiens
  Payload ID: 4821
  Gene Symbol: DRG2
  Gene Name: developmentally regulated GTP binding protein 2
  ENST ID: ENST00000579601
  CDS Start-End: 76-550
ctctgtcgccgccgtcagaccggaattgccggtgccgccgccaccgctgtctgtgcgcccacctctgctgctaccatggggatcttagagaagatctcggagatcgagaaggagatcgctcggacacagaagaacaaggccactgagtatcatctgggcctgctgaaagctaagctcgccaagtatcgggcccagctcctggaaccgtccaaatcggcctcgtccaaaggagagggctttgatgtcatgaagtcgggtgatgcccgtgtggcgctgattggatttccctctgtgggtaagtttcactcttgttgcccaagctggagtacaatggcacgatctcagctcactacaacctccgcctcccagtccacattcttgagtctgatgacctccacggccagcgaggcagcgtcctatgagttcaccactctgacgtgtattcctggggtcattgaatacaaaggtgccaacatccagctcctggaccttcctggaatcattgaaggcgcagcccaaggaaaaggccgtggccggcaggtgatcgctg

SEQ ID NO: 126571 - DNA, 683 bp, Homo sapiens
  Payload ID: 4821
  Gene Symbol: DRG2
  Gene Name: developmentally regulated GTP binding protein 2
  ENST ID: ENST00000579224
  CDS Start-End: 53-571
aattgccggtgccgccgccaccgctgtctgtgcgcccacctctgctgctaccatggggatcttagagaagatctcggagatcgagaaggagatcgctcggacacagaagaacaaggccactgagtatcatctgggcctgctgaaagctaagctcgccaagtatcgggcccagctcctggaaccgtccaaatcggcctcgtccaaaggagagggctttgatgtcatgaagtcgggtgatgcccgtgtggcgctgattggatttccctctgtgggtaagtccacattcttgagtctgatgacctccacggccagcgaggcagcgtcctatgagttcaccactctgacgtgtattcctggggtcattgaatacaaaggtgccaacatccagctcctggaccttcctggaatcattgaaggcgcagcccaaggaaaaggccgtggccggcaggtgatcgctgtggcgcgcacggctgacgtcatcatcatgatgctggatgccaccaagggagaggtctctgctggagaaggagctggagtctgtgggcatccgcctcaacaagcacaagcctaacatctacttcaagcccaagaaaggtggtggcatctcctttaactcgacagtcacgctgacccagtgctcggaaaagctggtgcagctcatcctgcacgaatacaagatcttc

SEQ ID NO: 126572 - DNA, 2617 bp, Homo sapiens
  Payload ID: 4822
  Gene Symbol: DHX58
  Gene Name: DEXH (Asp-Glu-X-His) box polypeptide 58
  Uniprot ID: Q96C10
  ENST ID: ENST00000251642
  CDS Start-End: 224-2260
agtttcagtttccatttctgatttctgctctctgcgctgagcacagcggcaccaggctgagctaagcagggccgccttgggcaggcctacgtggtggtgcaggcgagacccaggctgggcaaggcgcagtttcagtttccatcttgggtctctgagctgagcagagtggcaccaggctgagttaagtgggactgccctgggcagacctacctactagagcagaatggagcttcggtcctaccaatgggaggtgatcatgcctgccctggagggcaagaatatcatcatctggctgcccacgggtgccgggaagacccgggcggctgcttatgtggccaagcggcacctagagactgtggatggagccaaggtggttgtattggtcaacagggtgcacctggtgacccagcatggtgaagagttcaggcgcatgctggatggacgctggaccgtgacaaccctgagtggggacatgggaccacgtgctggctttggccacctggcccggtgccatgacctgctcatctgcacagcagagcttctgcagatggcactgaccagccccgaggaggaggagcacgtggagctcactgtcttctccctgatcgtggtggatgagtgccaccacacgcacaaggacaccgtctacaacgtcatcatgagccagtacctagaacttaaactccagagggcacagccgctaccccaggtgctgggtctcacagcctccccaggcactggcggggcctccaaactcgatggggccatcaaccacgtcctgcagctctgtgccaacttggacacgtggtgcatcatgtcaccccagaactgctgcccccagctgcaggagcacagccaacagccttgcaaacagtacaacctctgccacaggcgcagccaggatccgtttggggacttgctgaagaagctcatggaccaaatccatgaccacctggagatgcctgagttgagccggaaatttgggacgcaaatgtatgagcagcaggtggtgaagctgagtgaggctgcggctttggctgggcttcaggagcaacgggtgtatgcgcttcacctgaggcgctacaatgacgcgctgctcatccatgacaccgtccgcgccgtggatgccttggctgcgctgcaggatttctatcacagggagcacgtcactaaaacccagatcctgtgtgccgagcgccggctgctggccctgttcgatgaccgcaagaatgagctggcccacttggcaactcatggcccagagaatccaaaactggagatgctggaaaagatcctgcaaaggcagttcagtagctctaacagccctcggggtatcatcttcacccgcacccgccaaagcgcacactccctcctgctctggctccagcagcagcagggcctgcagactgtggacatccgggcccagctactgattggggctgggaacagcagccagagcacccacatgacccagagggaccagcaagaagtgatccagaagttccaagatggaaccctgaaccttctggtggccacgagtgtggcggaggaggggctggacatcccacattgcaatgtggtggtgcgttatgggctcttgaccaatgaaatctccatggtccaggccaggggccgtgcccgggccgatcagagtgtatacgcgtttgtagcaactgaaggtagccgggagctgaagcgggagctgatcaacgaggcgctggagacgctgatggagcaggcagtggctgctgtgcagaaaatggaccaggccgagtaccaggccaagatccgggatctgcagcaggcagccttgaccaagcgggcggcccaggcagcccagcgggagaaccagcggcagcagttcccagtggagcacgtgcagctactctgcatcaactgcatggtggctgtgggccatggcagcgacctgcggaaggtggagggcacccaccatgtcaatgtgaaccccaacttctcgaactactataatgtctccagggatcctgtggtcatcaacaaagtcttcaaggactggaagcctgggggtgtcatcagctgcaggaactgtggggaggtctggggtctgcagatgatctacaagtcagtgaagctgccagtgctcaaagtccgcagcatgctgctggagacccctcaggggcggatccaggccaaaaagtggtcccgcgtgcccttctccgtgcctgactttgacttcctgcagcattgtgccgagaacttgtcggacctctccctggactgaccacctcattgctgcagtgcccggtttgggctgtagggggcgggagagtctgcagcagactccaggcccctccttcctgaatcatcagctgtgggcatcaggcccaccagccacacaggagtcctgggcaccctggcttaggctcccgcaatgggaaaacaaccggagggccagagcttagtccagacctaccttgtacgcacatagacattttcatatgcactggatggagttagggaaactgaggcaaaagaatttgccatactgtactcagaatcacgacattccttccctaccaaggccacttctattttttgaggctcctcataaaaataaatgaaaaaatgggatagaaaa

SEQ ID NO: 126573 - DNA, 730 bp, Homo sapiens
  Payload ID: 4822
  Gene Symbol: DHX58
  Gene Name: DEXH (Asp-Glu-X-His) box polypeptide 58
  ENST ID: ENST00000430773
  CDS Start-End: 263-730
gctctggccaggagttgggatgagtggagggcccagtgggtctgagtcccctgccattcccagaatggagctgtggccctaccaatgggaggtgatcatgcctgccagggcgctggcgcagcagcagtacttaaccggagtttgtactcacggcagttggcgatgacttttcagtttccatcttgggtctctgagctgagcagagtggcaccaggctgagttaagtgggactgccctgggcagacctacctactagagcagaatggagcttcggtcctaccaatgggaggtgatcatgcctgccctggagggcaagaatatcatcatctggctgcccacgggtgccgggaagacccgggcggctgcttatgtggccaagcggcacctagagactgtggatggagccaaggtggttgtattggtcaacagggtgcacctggtgacccagcatggtgaagagttcaggcgcatgctggatggacgctggaccgtgacaaccctgagtggggacatgggaccacgtgctggctttggccacctggcccggtgccatgacctgctcatctgcacagcagagcttctgcagatggcactgaccagccccgaggaggaggagcacgtggagctcactgtcttctccctgatcgtggtggatgagtgccaccacacgcacaaggacaccgtctacaacgtcatcatgagccagtacctagaacttaaactccagagg

SEQ ID NO: 126574 - DNA, 1283 bp, Homo sapiens
  Payload ID: 4822
  Gene Symbol: DHX58
  Gene Name: DEXH (Asp-Glu-X-His) box polypeptide 58
  ENST ID: ENST00000413196
  CDS Start-End: 376-1283
aaagggaggtctctgtaccgactgctctggccaggagttgggatgagtggagggcccagtgggtctgagtcccctgccattcccagaatggagctgtggccctaccaatgggaggtgatcatgcctgccagggcgctggcgcagcagcagtacttaaccggagtttgtactcacggcagttggcgatgactgttagcacaaacggttcttttctcttggttctttttcctggggcggggatgggagattcctaagtcggctcagctggctccttccctcagtttcagtttccatcttgggtctctgagctgagcagagtggcaccaggctgagttaagtgggactgccctgggcagacctacctactagagcagaatggagcttcggtcctaccaatgggaggtgatcatgcctgccctggagggcaagaatatcatcatctggctgcccacgggtgccgggaagacccgggcggctgcttatgtggccaagcggcacctagagactgtggatggagccaaggtggttgtattggtcaacagggtgcacctggtgacccagcatggtgaagagttcaggcgcatgctggatggacgctggaccgtgacaaccctgagtggggacatgggaccacgtgctggctttggccacctggcccggtgccatgacctgctcatctgcacagcagagcttctgcagatggcactgaccagccccgaggaggaggagcacgtggagctcactgtcttctccctgatcgtggtggatgagtgccaccacacgcacaaggacaccgtctacaacgtcatcatgagccagtacctagaacttaaactccagagggcacagccgctaccccaggtgctgggtctcacagcctccccaggcactggcggggcctccaaactcgatggggccatcaaccacgtcctgcagctctgtgccaacttggacacgtggtgcatcatgtcaccccagaactgctgcccccagctgcaggagcacagccaacagccttgcaaacagtacaacctctgccacaggcgcagccaggatccgtttggggacttgctgaagaagctcatggaccaaatccatgaccacctggagatgcctgagttgagccggaaatttgggacgcaaatgtatgagcagcaggtggtgaagctgagtgaggctgcggctttggctgggcttcaggagcaacgggtgtatgcgcttcacctgaggcgctacaatgacgcgctgctcatccatgacaccgtccgcgccgtggatgcctt

SEQ ID NO: 126575 - DNA, 540 bp, Homo sapiens
  Payload ID: 4822
  Gene Symbol: DHX58
  Gene Name: DEXH (Asp-Glu-X-His) box polypeptide 58
  ENST ID: ENST00000591220
  CDS Start-End: 243-540
gatttctgctctctgcgctgagcacagcggcaccaggctgagctaagcagggccgccttgggcaggcctacgtggtggtgcaggcgagacccaggctgggcaaggcgcagtttcagtttccatcttgggtctctgagctgagcagagtggcaccaggctgagttaagtgggactgccctgggcagacctacctactagagcaggtgcacctggtgacccagcatggtgaagagttcaggcgcatgctggatggacgctggaccgtgacaaccctgagtggggacatgggaccacgtgctggctttggccacctggcccggtgccatgacctgctcatctgcacagcagagcttctgcagatggcactgaccagccccgaggaggaggagcacgtggagctcactgtcttctccctgatcgtggtggatgagtgccaccacacgcacaaggacaccgtctacaacgtcatcatgagccagtacctagaacttaaactccagagggcacagccgctaccccaggtgctgggtctcacagcct

SEQ ID NO: 126576 - DNA, 782 bp, Homo sapiens
  Payload ID: 4822
  Gene Symbol: DHX58
  Gene Name: DEXH (Asp-Glu-X-His) box polypeptide 58
  ENST ID: ENST00000589979
  CDS Start-End: 1-154
cgatcagagtgtatacgcgtttgtagcaactgaaggtagccgggagctgaagcgggagctgatcaacgaggcgctggagacgctgatggagcaggcagtggctgctgtgcagaaaatggaccaggccgagtaccaggccaaggaactactataatgtctccagggatcctgtggtcatcaacaaagtcttcaaggactggaagcctgggggtgtcatcagctgcaggaactgtggggaggtctggggtctgcagatgatctacaagtcagtgaagctgccagtgctcaaagtccgcagcatgctgctggagacccctcaggggcggatccaggccaaaaagtggtcccgcgtgcccttctccgtgcctgactttgacttcctgcagcattgtgccgagaacttgtcggacctctccctggactgaccacctcattgctgcagtgcccggtttgggctgtagggggcgggagagtctgcagcagactccaggcccctccttcctgaatcatcagctgtgggcatcaggcccaccagccacacaggagtcctgggcaccctggcttaggctcccgcaatgggaaaacaaccggagggccagagcttagtccagacctaccttgtacgcacatagacattttcatatgcactggatggagttagggaaactgaggcaaaagaatttgccatactgtactcagaatcacgacattccttccctaccaaggccacttctattttttgaggctcctcataaaaataaatgaaaaaatgggatagaaaa

SEQ ID NO: 126577 - DNA, 1561 bp, Homo sapiens
  Payload ID: 4823
  Gene Symbol: DEXI
  Gene Name: Dexi homolog (mouse)
  Uniprot ID: O95424
  ENST ID: ENST00000331808
  CDS Start-End: 456-743
ccgggagggctacgcggcggccgcagccatgggtgctgggcctgcgggggcgcggggggtgcgcgaggacctgcggggcggggcgggagagaaggctgccgggaccggccctagacactgagccgcggtgggatccccaccggctctgcgaggccctgcgagcgccagggaggcgccacgagggagccgggcagccgcgggccacttcaggggggcccgcctcgccgcccgggcggtcgagagatccttgggggcacatctcggggtgcggtgacccgcccggcgcatttcgggggtcggggcgcaattgccaggggacatctggagcccggccctgcttctgtcgggctccagggtacccctggatggctgcgctgtgccctcgccggccgcccgggcgccgcagcggctgagttcgccgggatcgccgggccgccgcccttgccacccgctgcatgctcggcgcccgggtcgcggcccacctggacgcactgggccccctggtcccctacgtgccgccgccgctgctgccctctatgttctacgtgggcctgttcttcgtcaatgtgctgatcctgtactacgccttcctcatggagtacatcgtcctcaacgtgggcctcgtcttcctgcccgaggacatggaccaggcgctcgtggacctcggcgtgctctccgaccccggctcgggcctttacgatgctgactcggagctcgacgtctttgatgcgtacttggagtagggtctcgactgctgttcccctcttccctacacgatccgcaacccatgccctggaccagccgcccagatcatgccgccgcagctggttgggggcaccatctggacggggatggttccccaggaggagaccctcccctgcctccgaggcctacctgctcccctcaaaagcttcgtgccaacagagaggttcctgtttgaacccaggagagtggaagagagattgggactgagtgctgaggttgggaaggcacctgctcccacagaagggggaacgcaagaggcatcccaagacctcatctgcctgcagtgtcaaatcgatggcctggccttggcttctgattatttgcagctgcgatggatgtttacaggaacccagccagagtttgcctccctgcacttcatcccggagcgcacctgcttcccccacttcaccttcggagaggacacttcaaactgcggacacacgcaaaagcgactcccagctccgtttgatgtgagttgagccttcaggccagctgggtttagcccgaggctggtcttagatgcagcgactgtttcaggggtgactcagaagaaaaagaagctgaggaagctgttggggggctgagggtgggattctcgctccttcatttcaggttactcgttcttcagcaagttggcaaaacagacatcatgctggtgagtgccacgttactcccctggctggaaatgcttttctgaaagtatgagtgttgtgcctacttaattctgataaacctgtctaagcaatacttaggaggcttacttctttggattaaaaaaaaatgtatgcaactccaa

SEQ ID NO: 126578 - DNA, 1393 bp, Homo sapiens
  Payload ID: 4823
  Gene Symbol: DEXI
  Gene Name: Dexi homolog (mouse)
  Uniprot ID: O95424
  ENST ID: ENST00000469379
  CDS Start-End: 127-414
cggccctgcttctgtcgggctccagggtacccctggatggctgcgctgtgccctcgccggccgcccgggcgccgcagcggctgagttcgccgggatcgccgggccgccgcccttgccacccgctgcatgctcggcgcccgggtcgcggcccacctggacgcactgggccccctggtcccctacgtgccgccgccgctgctgccctctatgttctacgtgggcctgttcttcgtcaatgtgctgatcctgtactacgccttcctcatggagtacatcgtcctcaacgtgggcctcgtcttcctgcccgaggacatggaccaggcgctcgtggacctcggcgtgctctccgaccccggctcgggcctttacgatgctgactcggagctcgacgtctttgatgcgtacttggagtagggtctcgactgctgttcccctcttccctacacgatccgcaacccatgccctggaccagccgcccagatcatgccgccgcagctggttgggggcaccatctggacggggatggttccccaggaggagaccctcccctgcctccgaggcctggacatggacctgtgcagagacaggcagcttctcctttgccgtctgtctccttccggccaccaggagacagccagaccccagccatgccttcattctgagataaggtagagaccctcctgccacatagcctgtcaccagcgtggaggatcagaatggctgcacctgctcccctcaaaagcttcgtgccaacagagaggttcctgtttgaacccaggagagtggaagagagattgggactgagtgctgaggttgggaaggcacctgctcccacagaagggggaacgcaagaggcatcccaagacctcatctgcctgcagtgtcaaatcgatggcctggccttggcttctgattatttgcagctgcgatggatgtttacaggaacccagccagagtttgcctccctgcacttcatcccggagcgcacctgcttcccccacttcaccttcggagaggacacttcaaactgcggacacacgcaaaagcgactcccagctccgtttgatgtgagttgagccttcaggccagctgggtttagcccgaggctggtcttagatgcagcgactgtttcaggggtgactcagaagaaaaagaagctgaggaagctgttggggggctgagggtgggattctcgctccttcatttcaggttactcgttcttcagcaagttggcaaaacagacatcatgctggtgagtgccacgttactcccctggctggaaatgcttttctgaaagtatgagtgttgtgcctacttaattctgataaacctgtctaagcaatacttaggaggcttacttctttggattaaaaaaaaatgtatgcaactccaa

SEQ ID NO: 126579 - DNA, 4514 bp, Homo sapiens
  Payload ID: 4824
  Gene Symbol: DGCR8
  Gene Name: DGCR8 microprocessor complex subunit
  Uniprot ID: Q8WYQ5
  ENST ID: ENST00000351989
  CDS Start-End: 430-2751
aggcccgccctccgctcgcccggcgcggcaggcgggtgccggcgaccggagagcctggacaggctttccagatggctgcggcggtcggtcggtgaggctttcccggctgtggtttggctgcgggcggcttgggcagcccgcgggcgcctcaggtagaagaagaaaggtgccactccggcatgaagacagactcgcttagtcgccagtcacttaagctgagtgcattgtgatttccaataattgaggcagtggttctaaaagctgtctacattaatgaaaagagcaatgtggccagcttgactaagccgccagcgcacagcgcggcaggacgcgcccgggtctcagcggacttgtgcatgttagctgtgtagatttatgtgagggcttgtaaaactctggtcttgtaaactagtcttaagcgcttttaatatggagacagatgagagcccctctccgctcccgtgtgggcccgcaggagaagcggtgatggagagccgagctcgccccttccaagcgctgccccgtgagcagtctccaccacctcccctgcaaacgtccagtggtgcagaggtaatggacgttggctctggtggtgatggacagtccgaactccctgctgaggaccccttcaacttctacggagcttctcttctctccaaaggatccttctctaagggccgcctcctcatagacccgaactgtagtggccacagcccgcgcaccgcccggcacgcacctgcggtccggaagttctcccctgaccttaagttgcttaaggatgtaaagattagcgtgagctttaccgagagctgcaggagtaaggacaggaaggtgctgtacacaggagcagagcgcgacgtgcgggcggagtgcggtctgctccttagccctgtcagtggggacgtgcatgcttgtccctttggcgggagtgttggtgacggggtaggcatagggggtgagagtgctgataagaaggatgaggagaatgagctggatcaggaaaagagagtggagtatgcagtgctcgatgagttagaagattttactgacaatttggagctagatgaagaaggagcaggcgggttcacggctaaagcaatcgttcagagagacagagtggatgaagaggccttgaatttcccctacgaggatgactttgacaacgatgtggatgctctgctggaagaaggcctttgtgcccccaaaaagaggcgaacagaggaaaaatatggcggagacagcgaccatccgtccgatggagagacaagtgtgcagccgatgatgaccaagattaaaacagtgctcaaaagtcgtggccgcccacctacagagccgctgcccgacgggtggatcatgacattccataactctggagtcccggtgtacctacacagagagtctcgggtggtcacctggtccaggccatacttcttgggaacgggaagcatacggaaacacgaccctcctctgagtagcatcccttgtctgcattataagaaaatgaaggacaacgaggaacgggagcaaagcagtgacctcacccctagtggggatgtgtcccccgtcaagcccctgagccgatctgcagagctggagtttcccctggatgagcctgactctatgggtgctgacccggggcccccggacgagaaagacccactaggggctgaggcagcccctggggccctggggcaggtgaaggccaaagtcgaggtgtgcaaagatgaatccgttgatctcgaggaatttcgaagctacctggagaagcgttttgactttgagcaagttactgtgaaaaaattcaggacttgggctgagcggcggcaattcaatcgggaaatgaagcggaagcaggcggagtccgagaggcccatcttgccagccaatcagaagctcattactttatcagtgcaagatgcacccacaaagaaagagtttgttattaaccccaacgggaaatccgaggtctgcatcctgcacgagtacatgcagcgtgtcctcaaggtccgccctgtctataatttctttgaatgtgagaacccaagtgagccttttggtgcctcggtgaccattgatggtgtgacttacggatctggaactgcaagcagcaaaaaacttgcgaagaataaagctgcccgagctacactggaaatcctcatccctgactttgttaaacagacctctgaagagaagcccaaagacagtgaagaactcgagtattttaaccacatcagcatcgaggactcgcgggtctacgagctgaccagcaaggctgggctgttgtctccatatcagatcctccacgagtgccttaaaagaaaccatgggatgggtgacacgtctatcaagtttgaagtggttcctgggaaaaaccagaagagtgaatacgtcatggcgtgtggcaagcacacagtgcgcgggtggtgtaagaacaagagagttggaaagcagttagcctcacagaagatccttcagctgctgcacccacatgtcaagaactgggggtctttactgcgcatgtatggccgtgagagcagcaagatggtcaagcaggagacatcggacaagagtgtgattgagctgcagcagtatgccaagaagaacaagcccaacctgcacatcctcagcaagctccaagaggagatgaagaggctagctgaggaaagggaggagactcgaaagaagcccaagatgtccattgtggcgtccgcccagcctggcggtgagcccctgtgcaccgtggacgtgtgagggaggtggcacgggccagggcgcgggggccgccagccgcacttctgaggagaccagcagtcatgcatcgtgcaccacagtgtcaggcctccaacccacgctccttccctgtggccaacctgtgggcccggccttagggtggaggctttagtgtacagggacagccatggccacacagcacacatgtggagcagcggctctccctggaaagctccaggcctgaatggatggactcagcgactgcaccagtggcagctggtgactgtggacagtggtggaccctgcttctgtgcacctgctgcaggctctttttatgaaggctttcatgaattttagtatgtaatacgcactgacgacacatgatgcttggatgacagatgagaggggatggctgagtcctgtggctggcccgtgatgccaggtggcccatgtgcccagggcgcctgcagggctgctacagggacctggtcaggaggtgcacatggtgccctgccctcacccaccctctgtgtttccccttctttgaaaaggtagaagagaaaggaatattttaaacctttttggcttaaacagaattttagcatcagaactagctttctgggattggaggcaaaccatcaaggtggtccctctccagtctggacacgatgccagcaaggatgacgtcctgccacctcctggagttaccctggcctcctagggtccctttttctgatgaagtcttaattccctaaaagcgcctctttggacactgaggccctctctgcctttcctggcctccggcaacagttttttacaaagattttttgcagtcgagtccatatgtccacccattgatttttaaagcttttgtgatattttagcattttgaaagactttcacagtgagagtagaaggtagatttggaatcatgcattttagcaagtggacttgttgaaacaggaagcaagggccttcagtgtagcccattcttgatccagagctgttgcctgtgacagcggtttctctggatgtcaaaggcagctgcctggtgcccagcttgcttctcgactggtggcccctatgggtgggtgtgcgatggaaatgtgttcctgccggagtctgaggcaccagggtgtgctcaaaggctggccctggtggtggactggcacctgtgcagagtgccgtgtgcttgtggtgcgccatctgaagcaagagtccagcgttctgccgtgtctgtcccccaccatgccccctacaggcggtactgatggcgcttttttttttttttctgtcaggaaaacaatgttggcctgtgggccgcccacaacatatccttccctcactacctgtgtgaccaaggttggcttctgttgacctttaaaaaagaaaccctcaactcaaattgctataattagacacttgcttctgtcttgcctcctgtctgcagctgtgaatagtcatttgactgtgactgttgcccttagccagccagatgcgcctgtgaaccaaagcttcgtgcacatgtgttcccctaaaggttggggagcctcgctgtgtcttgctgttcccaggcaccaccacagcaggtgctgccatactcttgtggtctctgtgcgccccccccccccccccacccgtctgccaagcatgggtatgaatcgtgcacacagccatgcttcaaggccggggcaggggagcctgtgctgatgccatccagggcactgggctgtgcctggaaggcgagccttgattgtctgaacacataaagcaaactgtccaga

SEQ ID NO: 126580 - DNA, 4419 bp, Homo sapiens
  Payload ID: 4824
  Gene Symbol: DGCR8
  Gene Name: DGCR8 microprocessor complex subunit
  Uniprot ID: Q8WYQ5
  ENST ID: ENST00000383024
  CDS Start-End: 430-2652
aggcccgccctccgctcgcccggcgcggcaggcgggtgccggcgaccggagagcctggacaggctttccagatggctgcggcggtcggtcggtgaggctttcccggctgtggtttggctgcgggcggcttgggcagcccgcgggcgcctcaggtagaagaagaaaggtgccactccggcatgaagacagactcgcttagtcgccagtcacttaagctgagtgcattgtgatttccaataattgaggcagtggttctaaaagctgtctacattaatgaaaagagcaatgtggccagcttgactaagccgccagcgcacagcgcggcaggacgcgcccgggtctcagcggacttgtgcatgttagctgtgtagatttatgtgagggcttgtaaaactctggtcttgtaaactagtcttaagcgcttttaatatggagacagatgagagcccctctccgctcccgtgtgggcccgcaggagaagcggtgatggagagccgagctcgccccttccaagcgctgccccgtgagcagtctccaccacctcccctgcaaacgtccagtggtgcagaggtaatggacgttggctctggtggtgatggacagtccgaactccctgctgaggaccccttcaacttctacggagcttctcttctctccaaaggatccttctctaagggccgcctcctcatagacccgaactgtagtggccacagcccgcgcaccgcccggcacgcacctgcggtccggaagttctcccctgaccttaagttgcttaaggatgtaaagattagcgtgagctttaccgagagctgcaggagtaaggacaggaaggtgctgtacacaggagcagagcgcgacgtgcgggcggagtgcggtctgctccttagccctgtcagtggggacgtgcatgcttgtccctttggcgggagtgttggtgacggggtaggcatagggggtgagagtgctgataagaaggatgaggagaatgagctggatcaggaaaagagagtggagtatgcagtgctcgatgagttagaagattttactgacaatttggagctagatgaagaaggagcaggcgggttcacggctaaagcaatcgttcagagagacagagtggatgaagaggccttgaatttcccctacgaggatgactttgacaacgatgtggatgctctgctggaagaaggcctttgtgcccccaaaaagaggcgaacagaggaaaaatatggcggagacagcgaccatccgtccgatggagagacaagtgtgcagccgatgatgaccaagattaaaacagtgctcaaaagtcgtggccgcccacctacagagccgctgcccgacgggtggatcatgacattccataactctggagtcccggtgtacctacacagagagtctcgggtggtcacctggtccaggccatacttcttgggaacgggaagcatacggaaacacgaccctcctctgagtagcatcccttgtctgcattataagaaaatgaaggacaacgaggaacgggagcaaagcagtgacctcacccctagtggggatgtgtcccccgtcaagcccctgagccgatctgcagagctggagtttcccctggatgagcctgactctatgggtgctgacccggggcccccggacgagaaagacccactaggggctgaggcagcccctggggccctggggcaggtgaaggccaaagtcgaggtgtgcaaagatgaatccgttgatctcgaggaatttcgaagctacctggagaagcgttttgactttgagcaagttactgtgaaaaaattcaggacttgggctgagcggcggcaattcaatcgggaaatgaagcggaagcaggcggagtccgagaggcccatcttgccagccaatcagaagctcattactttatcagtgcaagatgcacccacaaagaaagagtttgttattaaccccaacgggaaatccgaggtctgcatcctgcacgagtacatgcagcgtgtcctcaaggtccgccctgtctataatttctttgaatgtgcccgagctacactggaaatcctcatccctgactttgttaaacagacctctgaagagaagcccaaagacagtgaagaactcgagtattttaaccacatcagcatcgaggactcgcgggtctacgagctgaccagcaaggctgggctgttgtctccatatcagatcctccacgagtgccttaaaagaaaccatgggatgggtgacacgtctatcaagtttgaagtggttcctgggaaaaaccagaagagtgaatacgtcatggcgtgtggcaagcacacagtgcgcgggtggtgtaagaacaagagagttggaaagcagttagcctcacagaagatccttcagctgctgcacccacatgtcaagaactgggggtctttactgcgcatgtatggccgtgagagcagcaagatggtcaagcaggagacatcggacaagagtgtgattgagctgcagcagtatgccaagaagaacaagcccaacctgcacatcctcagcaagctccaagaggagatgaagaggctagctgaggaaagggaggagactcgaaagaagcccaagatgtccattgtggcgtccgcccagcctggcggtgagcccctgtgcaccgtggacgtgtgagggaggtggcacgggccagggcgcgggggccgccagccgcacttctgaggagaccagcagtcatgcatcgtgcaccacagtgtcaggcctccaacccacgctccttccctgtggccaacctgtgggcccggccttagggtggaggctttagtgtacagggacagccatggccacacagcacacatgtggagcagcggctctccctggaaagctccaggcctgaatggatggactcagcgactgcaccagtggcagctggtgactgtggacagtggtggaccctgcttctgtgcacctgctgcaggctctttttatgaaggctttcatgaattttagtatgtaatacgcactgacgacacatgatgcttggatgacagatgagaggggatggctgagtcctgtggctggcccgtgatgccaggtggcccatgtgcccagggcgcctgcagggctgctacagggacctggtcaggaggtgcacatggtgccctgccctcacccaccctctgtgtttccccttctttgaaaaggtagaagagaaaggaatattttaaacctttttggcttaaacagaattttagcatcagaactagctttctgggattggaggcaaaccatcaaggtggtccctctccagtctggacacgatgccagcaaggatgacgtcctgccacctcctggagttaccctggcctcctagggtccctttttctgatgaagtcttaattccctaaaagcgcctctttggacactgaggccctctctgcctttcctggcctccggcaacagttttttacaaagattttttgcagtcgagtccatatgtccacccattgatttttaaagcttttgtgatattttagcattttgaaagactttcacagtgagagtagaaggtagatttggaatcatgcattttagcaagtggacttgttgaaacaggaagcaagggccttcagtgtagcccattcttgatccagagctgttgcctgtgacagcggtttctctggatgtcaaaggcagctgcctggtgcccagcttgcttctcgactggtggcccctatgggtgggtgtgcgatggaaatgtgttcctgccggagtctgaggcaccagggtgtgctcaaaggctggccctggtggtggactggcacctgtgcagagtgccgtgtgcttgtggtgcgccatctgaagcaagagtccagcgttctgccgtgtctgtcccccaccatgccccctacaggcggtactgatggcgcttttttttttttttctgtcaggaaaacaatgttggcctgtgggccgcccacaacatatccttccctcactacctgtgtgaccaaggttggcttctgttgacctttaaaaaagaaaccctcaactcaaattgctataattagacacttgcttctgtcttgcctcctgtctgcagctgtgaatagtcatttgactgtgactgttgcccttagccagccagatgcgcctgtgaaccaaagcttcgtgcacatgtgttcccctaaaggttggggagcctcgctgtgtcttgctgttcccaggcaccaccacagcaggtgctgccatactcttgtggtctctgtgcgccccccccccccccccacccgtctgccaagcatgggtatgaatcgtgcacacagccatgcttcaaggccggggcaggggagcctgtgctgatgccatccagggcactgggctgtgcctggaaggcgagccttgattgtctgaacacataaagcaaactgtccagaaggg

SEQ ID NO: 126581 - DNA, 4129 bp, Homo sapiens
  Payload ID: 4824
  Gene Symbol: DGCR8
  Gene Name: DGCR8 microprocessor complex subunit
  Uniprot ID: Q8WYQ5
  ENST ID: ENST00000407755
  CDS Start-End: 143-2365
gtggccagcttgactaagccgccagcgcacagcgcggcaggacgcgcccgggtctcagcggacttgtgcatgttagctgtgtagatttatgtgagggcttgtaaaactctggtcttgtaaactagtcttaagcgcttttaatatggagacagatgagagcccctctccgctcccgtgtgggcccgcaggagaagcggtgatggagagccgagctcgccccttccaagcgctgccccgtgagcagtctccaccacctcccctgcaaacgtccagtggtgcagaggtaatggacgttggctctggtggtgatggacagtccgaactccctgctgaggaccccttcaacttctacggagcttctcttctctccaaaggatccttctctaagggccgcctcctcatagacccgaactgtagtggccacagcccgcgcaccgcccggcacgcacctgcggtccggaagttctcccctgaccttaagttgcttaaggatgtaaagattagcgtgagctttaccgagagctgcaggagtaaggacaggaaggtgctgtacacaggagcagagcgcgacgtgcgggcggagtgcggtctgctccttagccctgtcagtggggacgtgcatgcttgtccctttggcgggagtgttggtgacggggtaggcatagggggtgagagtgctgataagaaggatgaggagaatgagctggatcaggaaaagagagtggagtatgcagtgctcgatgagttagaagattttactgacaatttggagctagatgaagaaggagcaggcgggttcacggctaaagcaatcgttcagagagacagagtggatgaagaggccttgaatttcccctacgaggatgactttgacaacgatgtggatgctctgctggaagaaggcctttgtgcccccaaaaagaggcgaacagaggaaaaatatggcggagacagcgaccatccgtccgatggagagacaagtgtgcagccgatgatgaccaagattaaaacagtgctcaaaagtcgtggccgcccacctacagagccgctgcccgacgggtggatcatgacattccataactctggagtcccggtgtacctacacagagagtctcgggtggtcacctggtccaggccatacttcttgggaacgggaagcatacggaaacacgaccctcctctgagtagcatcccttgtctgcattataagaaaatgaaggacaacgaggaacgggagcaaagcagtgacctcacccctagtggggatgtgtcccccgtcaagcccctgagccgatctgcagagctggagtttcccctggatgagcctgactctatgggtgctgacccggggcccccggacgagaaagacccactaggggctgaggcagcccctggggccctggggcaggtgaaggccaaagtcgaggtgtgcaaagatgaatccgttgatctcgaggaatttcgaagctacctggagaagcgttttgactttgagcaagttactgtgaaaaaattcaggacttgggctgagcggcggcaattcaatcgggaaatgaagcggaagcaggcggagtccgagaggcccatcttgccagccaatcagaagctcattactttatcagtgcaagatgcacccacaaagaaagagtttgttattaaccccaacgggaaatccgaggtctgcatcctgcacgagtacatgcagcgtgtcctcaaggtccgccctgtctataatttctttgaatgtgcccgagctacactggaaatcctcatccctgactttgttaaacagacctctgaagagaagcccaaagacagtgaagaactcgagtattttaaccacatcagcatcgaggactcgcgggtctacgagctgaccagcaaggctgggctgttgtctccatatcagatcctccacgagtgccttaaaagaaaccatgggatgggtgacacgtctatcaagtttgaagtggttcctgggaaaaaccagaagagtgaatacgtcatggcgtgtggcaagcacacagtgcgcgggtggtgtaagaacaagagagttggaaagcagttagcctcacagaagatccttcagctgctgcacccacatgtcaagaactgggggtctttactgcgcatgtatggccgtgagagcagcaagatggtcaagcaggagacatcggacaagagtgtgattgagctgcagcagtatgccaagaagaacaagcccaacctgcacatcctcagcaagctccaagaggagatgaagaggctagctgaggaaagggaggagactcgaaagaagcccaagatgtccattgtggcgtccgcccagcctggcggtgagcccctgtgcaccgtggacgtgtgagggaggtggcacgggccagggcgcgggggccgccagccgcacttctgaggagaccagcagtcatgcatcgtgcaccacagtgtcaggcctccaacccacgctccttccctgtggccaacctgtgggcccggccttagggtggaggctttagtgtacagggacagccatggccacacagcacacatgtggagcagcggctctccctggaaagctccaggcctgaatggatggactcagcgactgcaccagtggcagctggtgactgtggacagtggtggaccctgcttctgtgcacctgctgcaggctctttttatgaaggctttcatgaattttagtatgtaatacgcactgacgacacatgatgcttggatgacagatgagaggggatggctgagtcctgtggctggcccgtgatgccaggtggcccatgtgcccagggcgcctgcagggctgctacagggacctggtcaggaggtgcacatggtgccctgccctcacccaccctctgtgtttccccttctttgaaaaggtagaagagaaaggaatattttaaacctttttggcttaaacagaattttagcatcagaactagctttctgggattggaggcaaaccatcaaggtggtccctctccagtctggacacgatgccagcaaggatgacgtcctgccacctcctggagttaccctggcctcctagggtccctttttctgatgaagtcttaattccctaaaagcgcctctttggacactgaggccctctctgcctttcctggcctccggcaacagttttttacaaagattttttgcagtcgagtccatatgtccacccattgatttttaaagcttttgtgatattttagcattttgaaagactttcacagtgagagtagaaggtagatttggaatcatgcattttagcaagtggacttgttgaaacaggaagcaagggccttcagtgtagcccattcttgatccagagctgttgcctgtgacagcggtttctctggatgtcaaaggcagctgcctggtgcccagcttgcttctcgactggtggcccctatgggtgggtgtgcgatggaaatgtgttcctgccggagtctgaggcaccagggtgtgctcaaaggctggccctggtggtggactggcacctgtgcagagtgccgtgtgcttgtggtgcgccatctgaagcaagagtccagcgttctgccgtgtctgtcccccaccatgccccctacaggcggtactgatggcgcttttttttttttttctgtcaggaaaacaatgttggcctgtgggccgcccacaacatatccttccctcactacctgtgtgaccaaggttggcttctgttgacctttaaaaaagaaaccctcaactcaaattgctataattagacacttgcttctgtcttgcctcctgtctgcagctgtgaatagtcatttgactgtgactgttgcccttagccagccagatgcgcctgtgaaccaaagcttcgtgcacatgtgttcccctaaaggttggggagcctcgctgtgtcttgctgttcccaggcaccaccacagcaggtgctgccatactcttgtggtctctgtgcgccccccccccccccccacccgtctgccaagcatgggtatgaatcgtgcacacagccatgcttcaaggccggggcaggggagcctgtgctgatgccatccagggcactgggctgtgcctggaaggcgagccttgattgtctgaacacataaagcaaactgtccagaa

SEQ ID NO: 126582 - DNA, 770 bp, Homo sapiens
  Payload ID: 4824
  Gene Symbol: DGCR8
  Gene Name: DGCR8 microprocessor complex subunit
  ENST ID: ENST00000457069
  CDS Start-End: 395-770
ggggctggggggcgggccccgggcccaggcgttgccgactctcgtcgctgtccgcccgggtaaagaggctcctctcccggagggcccgaagcctagcatcgccttcaggcgggaaaggtagaagaagaaaggtgccactccggcatgaagacagactcgcttagtcgccagtcacttaagctgagtgcattgtgatttccaataattgaggcagtggttctaaaagctgtctacattaatgaaaagagcaatgtggccagcttgactaagccgccagcgcacagcgcggcaggacgcgcccgggtctcagcggacttgtgcatgttagctgtgtagatttatgtgagggcttgtaaaactctggtcttgtaaactagtcttaagcgcttttaatatggagacagatgagagcccctctccgctcccgtgtgggcccgcaggagaagcggtgatggagagccgagctcgccccttccaagcgctgccccgtgagcagtctccaccacctcccctgcaaacgtccagtggtgcagaggtaatggacgttggctctggtggtgatggacagtccgaactccctgctgaggaccccttcaacttctacggagcttctcttctctccaaaggatccttctctaagggccgcctcctcatagacccgaactgtagtggccacagcccgcgcaccgcccggcacgcacctgcggtccggaagttctcccctgaccttaagttgcttaaggatgtaaagattagcgtgagctttaccg

SEQ ID NO: 126583 - DNA, 1316 bp, Homo sapiens
  Payload ID: 4825
  Gene Symbol: DIABLO
  Gene Name: diablo, IAP-binding mitochondrial protein
  Uniprot ID: Q9NR28
  ENST ID: ENST00000267169
  CDS Start-End: 169-729
acttccggcgtgtgcgtctggcgtccgcgcgctgcacaatggcggctctgaagagttggctgtcgcgcagcgtaacttcattcttcaggttcctgcttggctcgagtttgagtttacagcccctgcaagtaaatccaagagcctgttacagattggcggtcgtgccttatgaaatctgacttctacttccagaaatcagagcctcattcccttagtagtgaagcattgatgaggagagcagtgtctttggtaacagatagcacctctacctttctctctcagaccacatatgcgttgattgaagctattactgaatatactaaggctgtttataccttaacttctctttaccgacaatatacaagtttacttgggaaaatgaattcagaggaggaagatgaagtgtggcaggtgatcataggagccagagctgagatgacttcaaaacaccaagagtacttgaagctggaaaccacttggatgactgcagttggtctttcagagatggcagcagaagctgcatatcaaactggcgcagatcaggcctctataaccgccaggaatcacattcagctggtgaaactgcaggtggaagaggtgcaccagctctcccggaaagcagaaaccaagctggcagaagcacagatagaagagctccgtcagaaaacacaggaggaaggggaggagcgggctgagtcggagcaggaggcctacctgcgtgaggattgagggcctgagcacactgccctgtctccccactcagtggggaaagcaggggcagatgccaccctgcccagggttggcatgactgtctgtgcaccgagaagaggcggcagatcctgccctggccaatcaggcgagacgcctttgtgagctgtgagtgcctcctgtggtctcaggcttgcgctggacctggttcttagcccttgggcactgcaccctgtttaacatttcaccccactctgtacagctgctcttacccattttttttacctcacacccaaagcattttgcctacctgggtcagagagaggagtcctttttgtcatgcccttaagttcagcaactgtttaacctgttttcagtcttatttacgtcgtcaaaaatgatttagtacttgttccctctgttgggatgccagttgtggcagggggaggggaacctgtccagtttgtacgatttctttgtatgtatttctgatgtgttctctgatctgcccccactgtcctgtgaggacagctgaggccaaggagtgaaaaacctattactactaagagaaggggtgcagagtgtttacctggtgctctcaacaggac

SEQ ID NO: 126584 - DNA, 1345 bp, Homo sapiens
  Payload ID: 4825
  Gene Symbol: DIABLO
  Gene Name: diablo, IAP-binding mitochondrial protein
  Uniprot ID: Q9NR28
  ENST ID: ENST00000353548
  CDS Start-End: 39-626
acttccggcgtgtgcgtctggcgtccgcgcgctgcacaatggcggctctgaagagttggctgtcgcgcagcgtaacttcattcttcaggtacagacagtgtttgtgtgttcctgttgtggctaactttaagaagcggtgtttctcagaattgataagaccatggcacaaaactgtgacgattggctttggagtaaccctgtgtgcggttcctattgcacaggctgtttataccttaacttctctttaccgacaatatacaagtttacttgggaaaatgaattcagaggaggaagatgaagtgtggcaggtgatcataggagccagagctgagatgacttcaaaacaccaagagtacttgaagctggaaaccacttggatgactgcagttggtctttcagagatggcagcagaagctgcatatcaaactggcgcagatcaggcctctataaccgccaggaatcacattcagctggtgaaactgcaggtggaagaggtgcaccagctctcccggaaagcagaaaccaagctggcagaagcacagatagaagagctccgtcagaaaacacaggaggaaggggaggagcgggctgagtcggagcaggaggcctacctgcgtgaggattgagggcctgagcacactgccctgtctccccactcagtggggaaagcaggggcagatgccaccctgcccagggttggcatgactgtctgtgcaccgagaagaggcggcagatcctgccctggccaatcaggcgagacgcctttgtgagctgtgagtgcctcctgtggtctcaggcttgcgctggacctggttcttagcccttgggcactgcaccctgtttaacatttcaccccactctgtacagctgctcttacccattttttttacctcacacccaaagcattttgcctacctgggtcagagagaggagtcctttttgtcatgcccttaagttcagcaactgtttaacctgttttcagtcttatttacgtcgtcaaaaatgatttagtacttgttccctctgttgggatgccagttgtggcagggggaggggaacctgtccagtttgtacgatttctttgtatgtatttctgatgtgttctctgatctgcccccactgtcctgtgaggacagctgaggccaaggagtgaaaaacctattactactaagagaaggggtgcagagtgtttacctggtgctctcaacaggacttaacatcaacaggacttaacacaggcctcttgttccttcctttctttccgtttctctattgtatccaaaggagaagagtgtaagattttgtttgcatctgaaagagaaaatgcgtctctcctggggtccta

SEQ ID NO: 126585 - DNA, 1336 bp, Homo sapiens
  Payload ID: 4825
  Gene Symbol: DIABLO
  Gene Name: diablo, IAP-binding mitochondrial protein
  ENST ID: ENST00000342392
  CDS Start-End: 39-179
acttccggcgtgtgcgtctggcgtccgcgcgctgcacaatggcggctctgaagagttggctgtcgcgcagcgtaacttcattcttcaggttcctgcttggctcgagtttgagtttacagcccctgcaagtaaatccaagagcctgttacagattggcggtcgtgccttatgaaatctgacttctacttccagaaatcagagcctcattcccttagtagtgaagcattgatgaggagagcagtgtctttggtaacagatagcacctctacctttctctctcagaccacatatgcgttgattgaagctattactgaatatactaaggctgtttataccttaacttctctttaccgacaatatacaagtttacttgggaaaatgaattcagaggaggaagatgaagtgtggcaggtgatcataggagccagagctgagatgacttcaaaacaccaagagtacttgaagctggaaaccacttggatgactgcagttggtctttcagagatggcagcagaagctgcatatcaaactggcgcagatcaggcctctataaccgccaggaatcacattcagctggtgaaactgcaggtggaagaggtgcaccagctctcccggaaagcagaaaccaagctggcagaagcacagatagaagagctccgtcagaaaacacaggaggaaggggaggagcgggctgagtcggagcaggaggcctacctgcgtgaggattgagggcctgagcacactgccctgtctccccactcagtggggaaagcaggggcagatgccaccctgcccagggttggcatgactgtctgtgcaccgagaagaggcggcagatcctgccctggccaatcaggcgagacgcctttgtgagctgtgagtgcctcctgtggtctcaggcttgcgctggacctggttcttagcccttgggcactgcaccctgtttaacatttcaccccactctgtacagctgctcttacccattttttttacctcacacccaaagcattttgcctacctgggtcagagagaggagtcctttttgtcatgcccttaagttcagcaactgtttaacctgttttcagtcttatttacgtcgtcaaaaatgatttagtacttgttccctctgttgggatgccagttgtggcagggggaggggaacctgtccagtttgtacgatttctttgtatgtatttctgatgtgttctctgatctgcccccactgtcctgtgaggacagctgaggccaaggagtgaaaaacctattactactaagagaaggggtgcagagtgtttacctggtgctctcaacaggacttaacatcaacaggacttaa

SEQ ID NO: 126586 - DNA, 573 bp, Homo sapiens
  Payload ID: 4825
  Gene Symbol: DIABLO
  Gene Name: diablo, IAP-binding mitochondrial protein
  ENST ID: ENST00000446652
  CDS Start-End: 1-573
ggctctgaagagttggctgtcgcgcagcgtaacttcattcttcaggtacagacagtgtttgtgtgttcctgttgtggctaactttaagaagcggtgtttctcagaattgataagaccatggcacaaaactgtgacgattggctttggagtaaccctgtgtgcggttcctattgcacagaaatcagagcctcattcccttagtagtgaagcattgatgaggagagcagtgtctttggtaacagatagcacctctacctttctctctcagaccacatatgcgttgattgaagctattactgaatatactaaggctgtttataccttaacttctctttaccgacaatatacaagtttacttgggaaaatgaattcagaggaggaagatgaagtgtggcaggtgatcataggagccagagctgagatgacttcaaaacaccaagagtacttgaagctggaaaccacttggatgactgcagttggtctttcagagatggcagcagaagctgcatatcaaactgagtgtcagttaaatccagacctgaacatagaggtggaagtttctttgcagagaga

SEQ ID NO: 126587 - DNA, 634 bp, Homo sapiens
  Payload ID: 4825
  Gene Symbol: DIABLO
  Gene Name: diablo, IAP-binding mitochondrial protein
  ENST ID: ENST00000439489
  CDS Start-End: 1-362
aggctgtttataccttaacttctctttaccgacaatatacaagtttacttgggaaaatgaattcagaggaggaagatgaagtgtggcaggtgatcataggagccagagctgagatgacttcaaaacaccaagagtacttgaagctggaaaccacttggatgactgcagttggtctttcagagatggcagcagaagctgcatatcaaactgaagtgttttcatcgaagttagaagaggaggatgcctgccattctccactacctgtcaacattgtcctgaaggttcttgttaatgcagtaagatcaaaatgttctacagacgaattgataaaatgtatatacccagatggtgaaatacactaactagcagcaggcgcagatcaggcctctataaccgccaggaatcacattcagctggtgaaactgcaggtggaagaggtgcaccagctctcccggaaagcagaaaccaagctggcagaagcacagatagaagagctccgtcagaaaacacaggaggaaggggaggagcgggctgagtcggagcaggaggcctacctgcgtgaggattgagggcctgagcacactgccctgtctccccactcagtggggaaagcaggggcagatgccaccctgcc

SEQ ID NO: 126588 - DNA, 2250 bp, Homo sapiens
  Payload ID: 4825
  Gene Symbol: DIABLO
  Gene Name: diablo, IAP-binding mitochondrial protein
  Uniprot ID: Q9NR28
  ENST ID: ENST00000443649
  CDS Start-End: 819-1538
gagctcggggaccacgcggaggttgtaattggtctctagaccacacctagttgttgagtgccgctgcttgaaaatctcagttctgccgagatcgcagaatacacacaagctacctttgggcaccagagcagacagaaccgcggagcttcagggtggaagattcgtggaaactttgccaaggccaggacctcgtgtgttcccgtccgcccctctgggacggcgccagcccggcaggccgccgaccgtcctggggctcccgcgcagcgcgatgccggcctcgtccaccgtccacgtgctgcagctgctgcgggagctgctcgccttcgtgctcctcagctacacggtgctcatcggggcgctgctgctggccggctggaccacttacttcctggtgctgaagtgacagcgccgtcgccgcgcccggccccgcctcccgcccggccccgcctcccgcccggccccgcctccctaactcaccaggaaattcccttcaagccctggcccgaactgagtccccgcccacccgccagcgtcacggcgcccgactcagctccgcgccggacccacctccgcgccctcaggccctgcatatgccccgccccgcgcggaagttccggcggttggttgccttgcgcggccgttacagcctttgccctaagcctcgccccctttccccctgcctgcccaatcccgactgcttccttgggtgggggcgtggctatggggcgaggcgctctcaggtggaggccgtgccccgctccgcgctcacgaagctgcgtcacttccggcgtgtgcgtctggcgtccgcgcgctgcacaatggcggctctgaagagttggctgtcgcgcagcgtaacttcattcttcaggtacagacagtgtttgtgtgttcctgttgtggctaactttaagaagcggtgtttctcagaattgataagaccatggcacaaaactgtgacgattggctttggagtaaccctgtgtgcggttcctattgcacagaaatcagagcctcattcccttagtagtgaagcattgatgaggagagcagtgtctttggtaacagatagcacctctacctttctctctcagaccacatatgcgttgattgaagctattactgaatatactaaggctgtttataccttaacttctctttaccgacaatatacaagtttacttgggaaaatgaattcagaggaggaagatgaagtgtggcaggtgatcataggagccagagctgagatgacttcaaaacaccaagagtacttgaagctggaaaccacttggatgactgcagttggtctttcagagatggcagcagaagctgcatatcaaactggcgcagatcaggcctctataaccgccaggaatcacattcagctggtgaaactgcaggtggaagaggtgcaccagctctcccggaaagcagaaaccaagctggcagaagcacagatagaagagctccgtcagaaaacacaggaggaaggggaggagcgggctgagtcggagcaggaggcctacctgcgtgaggattgagggcctgagcacactgccctgtctccccactcagtggggaaagcaggggcagatgccaccctgcccagggttggcatgactgtctgtgcaccgagaagaggcggcagatcctgccctggccaatcaggcgagacgcctttgtgagctgtgagtgcctcctgtggtctcaggcttgcgctggacctggttcttagcccttgggcactgcaccctgtttaacatttcaccccactctgtacagctgctcttacccattttttttacctcacacccaaagcattttgcctacctgggtcagagagaggagtcctttttgtcatgcccttaagttcagcaactgtttaacctgttttcagtcttatttacgtcgtcaaaaatgatttagtacttgttccctctgttgggatgccagttgtggcagggggaggggaacctgtccagtttgtacgatttctttgtatgtatttctgatgtgttctctgatctgcccccactgtcctgtgaggacagctgaggccaaggagtgaaaaacctattactactaagagaaggggtgcagagtgtttacctggtgctctcaacaggacttaacatcaacaggacttaacacaggcctcttgttccttcctttctttccgtttctctattgtatccaaaggagaagagtgtaagattttgtttgcatctgaaagagaaaatgcgtctctcctgg

SEQ ID NO: 126589 - DNA, 1859 bp, Homo sapiens
  Payload ID: 4825
  Gene Symbol: DIABLO
  Gene Name: diablo, IAP-binding mitochondrial protein
  ENST ID: ENST00000413918
  CDS Start-End: 641-1141
cgcgatgccggcctcgtccaccgtccacgtgctgcagctgctgcgggagctgctcgccttcgtgctcctcagctacacggtgctcatcggggcgctgctgctggccggctggaccacttacttcctggtgctgaagtgacagcgccgtcgccgcgcccggccccgcctcccgcccggccccgcctcccgcccggccccgcctccctaactcaccaggaaattcccttcaagccctggcccgaactgagtccccgcccacccgccagcgtcacggcgcccgactcagctccgcgccggacccacctccgcgccctcaggccctgcatatgccccgccccgcgcggaagttccggcggttggttgccttgcgcggccgttacagcctttgccctaagcctcgccccctttccccctgcctgcccaatcccgactgcttccttgggtgggggcgtggctatggggcgaggcgctctcaggtggaggccgtgccccgctccgcgctcacgaagctgcgtcacttccggcgtgtgcgtctggcgtccgcgcgctgcacaatggcggctctgaagagttggctgtcgcgcagcgtaacttcattcttcagaaatcagagcctcattcccttagtagtgaagcattgatgaggagagcagtgtctttggtaacagatagcacctctacctttctctctcagaccacatatgcgttgattgaagctattactgaatatactaaggctgtttataccttaacttctctttaccgacaatatacaagtttacttgggaaaatgaattcagaggaggaagatgaagtgtggcaggtgatcataggagccagagctgagatgacttcaaaacaccaagagtacttgaagctggaaaccacttggatgactgcagttggtctttcagagatggcagcagaagctgcatatcaaactggcgcagatcaggcctctataaccgccaggaatcacattcagctggtgaaactgcaggtggaagaggtgcaccagctctcccggaaagcagaaaccaagctggcagaagcacagatagaagagctccgtcagaaaacacaggaggaaggggaggagcgggctgagtcggagcaggaggcctacctgcgtgaggattgagggcctgagcacactgccctgtctccccactcagtggggaaagcaggggcagatgccaccctgcccagggttggcatgactgtctgtgcaccgagaagaggcggcagatcctgccctggccaatcaggcgagacgcctttgtgagctgtgagtgcctcctgtggtctcaggcttgcgctggacctggttcttagcccttgggcactgcaccctgtttaacatttcaccccactctgtacagctgctcttacccattttttttacctcacacccaaagcattttgcctacctgggtcagagagaggagtcctttttgtcatgcccttaagttcagcaactgtttaacctgttttcagtcttatttacgtcgtcaaaaatgatttagtacttgttccctctgttgggatgccagttgtggcagggggaggggaacctgtccagtttgtacgatttctttgtatgtatttctgatgtgttctctgatctgcccccactgtcctgtgaggacagctgaggccaaggagtgaaaaacctattactactaagagaaggggtgcagagtgtttacctggtgctctcaacaggacttaacatcaacaggacttaacacaggcctcttgttccttcctttctttccgtttctctattgtatccaaaggagaagagtgtaagattttgtttgcatctgaaagagaaaatgcgtctctcctggggtcct

SEQ ID NO: 126590 - DNA, 560 bp, Homo sapiens
  Payload ID: 4825
  Gene Symbol: DIABLO
  Gene Name: diablo, IAP-binding mitochondrial protein
  ENST ID: ENST00000485724
  CDS Start-End: 330-560
ctttgggcaccagagcagacagaaccgcggagcttcagggtggaagattcgtggaaactttgccaagtacagacagtgtttgtgtgttcctgttgtggctaactttaagaagcggtgtttctcagaattgataagaccatggcacaaaactgtgacgattggctttggagtaaccctgtgtgcggttcctattgcacagtagagacggggtttcaccatgttggccaggatcgtctcaatctcctgacctcgtgatctgcctgcctcagcctcccaaagtgctggtattacagaaatcagagcctcattcccttagtagtgaagcattgatgaggagagcagtgtctttggtaacagatagcacctctacctttctctctcagaccacatatgcgttgattgaagctattactgaatatactaaggctgtttataccttaacttctctttaccgacaatatacaagtttacttgggaaaatgaattcagaggaggaagatgaagtgtggcaggtgatcataggagccagagctgagatgacttcaaaacaccaagagtac

SEQ ID NO: 126591 - DNA, 732 bp, Homo sapiens
  Payload ID: 4825
  Gene Symbol: DIABLO
  Gene Name: diablo, IAP-binding mitochondrial protein
  ENST ID: ENST00000541656
  CDS Start-End: 357-732
attcttcaggtaccgctgcggccgcgtagaggggacaggaccagagggagggaccgacgcggacagcgctgtggcccggcccacggcgcccgccttccttacgcgctcatctctcgtccgcccagctgggtcgcggcgtctcgctccggtcgggaggactgaggacagccccgcctccgccccctgggtacagacagtgtttgtgtgttcctgttgtggctaactttaagaagcggtgtttctcagaattgataagaccatggcacaaaactgtgacgattggctttggagtaaccctgtgtgcggttcctattgcacagaaatcagagcctcattcccttagtagtgaagcattgatgaggagagcagtgtctttggtaacagatagcacctctacctttctctctcagaccacatatgcgttgattgaagctattactgaatatactaaggctgtttataccttaacttctctttaccgacaatatacaagtttacttgggaaaatgaattcagaggaggaagatgaagtgtggcaggtgatcataggagccagagctgagatgacttcaaaacaccaagagtacttgaagctggaaaccacttggatgactgcagttggtctttcagagatggcagcagaagctgcatatcaaactggcgcagatcaggcctctataaccgccaggaatcacattcagctggtgaaactgcaggtggaagaggtgcacc

SEQ ID NO: 126592 - DNA, 555 bp, Homo sapiens
  Payload ID: 4825
  Gene Symbol: DIABLO
  Gene Name: diablo, IAP-binding mitochondrial protein
  ENST ID: ENST00000541273
  CDS Start-End: 156-555
gcgtctggcgtccgcgcgctgcacaatggcggctctgaagagttggctgtcgcgcagcgtaacttcattcttcaggttcctgcttggctcgagtttgagtttacagcccctgcaagtaaatccaagagcctgttacagattggcggtcgtgccttatgaaatctgacttctacttccaggctgtttataccttaacttctctttaccgacaatatacaagtttacttgggaaaatgaattcagaggaggaagatgaagtgtggcaggtgatcataggagccagagctgagatgacttcaaaacaccaagagtacttgaagctggaaaccacttggatgactgcagttggtctttcagagatggcagcagaagctgcatatcaaactggcgcagatcaggcctctataaccgccaggaatcacattcagctggtgaaactgcaggtggaagaggtgcaccagctctcccggaaagcagaaaccaagctggcagaagcacagatagaagagctccgtcagaaaacacaggaggaaggggaggagcgggctgagtcgg

SEQ ID NO: 126593 - DNA, 703 bp, Homo sapiens
  Payload ID: 4825
  Gene Symbol: DIABLO
  Gene Name: diablo, IAP-binding mitochondrial protein
  ENST ID: ENST00000540535
  CDS Start-End: 318-703
attcttcaggtaccgctgcggccgcgtagaggggacaggaccagagggagggaccgacgcggacagcgctgtggcccggcccacggcgcccgccttccttacgcgctcatctctcgtccgcccagctgggtcgcggcgtctcgctccggtacagacagtgtttgtgtgttcctgttgtggctaactttaagaagcggtgtttctcagaattgataagaccatggcacaaaactgtgacgattggctttggagtaaccctgtgtgcggttcctattgcacagaaatcagagcctcattcccttagtagtgaagcattgatgaggagagcagtgtctttggtaacagatagcacctctacctttctctctcagaccacatatgcgttgattgaagctattactgaatatactaaggctgtttataccttaacttctctttaccgacaatatacaagtttacttgggaaaatgaattcagaggaggaagatgaagtgtggcaggtgatcataggagccagagctgagatgacttcaaaacaccaagagtacttgaagctggaaaccacttggatgactgcagttggtctttcagagatggcagcagaagctgcatatcaaactggcgcagatcaggcctctataaccgccaggaatcacattcagctggtgaaactgcaggtggaagaggtgcaccagctctcccg

SEQ ID NO: 126594 - DNA, 2569 bp, Homo sapiens
  Payload ID: 4825
  Gene Symbol: DIABLO
  Gene Name: diablo, IAP-binding mitochondrial protein
  Uniprot ID: Q9NR28
  ENST ID: ENST00000464942
  CDS Start-End: 1395-1955
aagctgcgtcacttccggcgtgtgcgtctggcgtccgcgcgctgcacaatggcggctctgaagagttggctgtcgcgcagcgtaacttcattcttcaggtaccgctgcggccgcgtagaggggacaggaccagagggagggaccgacgcggacagcgctgtggcccggcccacggcgcccgccttccttacgcgctcatctctcgtccgcccagctgggtcgcggcgtctcgctccggtcgggaggactgaggacagccccgcctccgccccctgggtcaagcccggcttccttttcagttcgtccatcttctagaaacgagtccccgagaccccgggctgccttcttggggctgctccgcctcctgaccagccctcgtcagccactcgaagtccctgaggagacgtggagaggaggagggacacggcatggggggagtccgggaagggagacgagcgtctgaagacgtcctcccgagggcagaaggggccgggggagctggcgcagggctctctacctagcgctgcaggctcctgggcgattgtagcgggaccgtcacacacaactggcacccaggccaggggtccagagctaaattctgcctgcaggagcggttattgtggcatccgtttctaaaaagtttaaaggcaacattttattttattttaatttttttgagacaagatctgcctctgtcgcccaggctggagtgcagtggcgagatctcagctcactgcaacctgtgcctcccggcttcaagcgattctcagcctcagcctcccgagtagctgggattgcaggcgcccgccaccacgcccggctaatttttttttttctttttgttttgtttgagactcagtctcgctctgttgcccaggctgaagtgcagtggggcgctctcggctcactgcaacctctgcctcccaggttcaagcgattctcctgcctcagcctcccgagtagctgggattacaggagcgtgccaccactccgggctaatttttgtgttttaagtagagatggggtttcaccatgttggtcaggcagatttcgaattcctgacctcaagtgatccacccgcctcggcctttatttacttatttttttttaatagacacggggtcatgttgccagccatgttgcccaggctggtcgtgaactcctgggctcaagtgatcctcccgccttgcccttggccttccaagtgctaggattacaggcgtgagccaccaacaccctgcctgaggcaacattttaaacttggtgtatgttgaaaatttcaaaacccctcagctgtcctgcatcctcatttaggttcctgcttggctcgagtttgagtttacagcccctgcaagtaaatccaagagcctgttacagattggcggtcgtgccttatgaaatctgacttctacttccagaaatcagagcctcattcccttagtagtgaagcattgatgaggagagcagtgtctttggtaacagatagcacctctacctttctctctcagaccacatatgcgttgattgaagctattactgaatatactaaggctgtttataccttaacttctctttaccgacaatatacaagtttacttgggaaaatgaattcagaggaggaagatgaagtgtggcaggtgatcataggagccagagctgagatgacttcaaaacaccaagagtacttgaagctggaaaccacttggatgactgcagttggtctttcagagatggcagcagaagctgcatatcaaactggcgcagatcaggcctctataaccgccaggaatcacattcagctggtgaaactgcaggtggaagaggtgcaccagctctcccggaaagcagaaaccaagctggcagaagcacagatagaagagctccgtcagaaaacacaggaggaaggggaggagcgggctgagtcggagcaggaggcctacctgcgtgaggattgagggcctgagcacactgccctgtctccccactcagtggggaaagcaggggcagatgccaccctgcccagggttggcatgactgtctgtgcaccgagaagaggcggcagatcctgccctggccaatcaggcgagacgcctttgtgagctgtgagtgcctcctgtggtctcaggcttgcgctggacctggttcttagcccttgggcactgcaccctgtttaacatttcaccccactctgtacagctgctcttacccattttttttacctcacacccaaagcattttgcctacctgggtcagagagaggagtcctttttgtcatgcccttaagttcagcaactgtttaacctgttttcagtcttatttacgtcgtcaaaaatgatttagtacttgttccctctgttgggatgccagttgtggcagggggaggggaacctgtccagtttgtacgatttctttgtatgtatttctgatgtgttctctgatctgcccccactgtcctgtgaggacagctgaggccaaggagtgaaaaacctattactactaagagaaggggtgcagagtgtttacctggtgctctcaacaggacttaacatcaacaggacttaacacaggc

SEQ ID NO: 126595 - DNA, 804 bp, Homo sapiens
  Payload ID: 4825
  Gene Symbol: DIABLO
  Gene Name: diablo, IAP-binding mitochondrial protein
  ENST ID: ENST00000474004
  CDS Start-End: 335-804
tgctggtattacaggtgtgagccaccgtaccccgccacaatttattttatatgtaaagaaataatttgctttttggagcagagaatgaaagttggtagaaagcatactccggaattatttctctatattgtcttaaattgccaaaataaggccttaaaaaatataacccaaagaaatatagtgcagtttcagcctaaaacactaagcagcatgacaattacgttttttgcttgcctattggtgaaaaagttctcagtttgagctttagaggttgagtgacaatgtttgtgtctttcagaaatcagagcctcattcccttagtagtgaagcattgatgaggagagcagtgtctttggtaacagatagcacctctacctttctctctcagaccacatatgcgttgattgaagctattactgaatatactaaggctgtttataccttaacttctctttaccgacaatatacaagtttacttgggaaaatgaattcagaggaggaagatgaagtgtggcaggtgatcataggagccagagctgagatgacttcaaaacaccaagagtacttgaagctggaaaccacttggatgactgcagttggtctttcagagatggcagcagaagctgcatatcaaactggcgcagatcaggcctctataaccgccaggaatcacattcagctggtgaaactgcaggtggaagaggtgcaccagctctcccggaaagcagaaaccaagctggcagaagcacagatagaagagctccgtcagaaaacacaggaggaaggggaggagcgggctgagtc

SEQ ID NO: 126596 - DNA, 2909 bp, Homo sapiens
  Payload ID: 4826
  Gene Symbol: DGKA
  Gene Name: diacylglycerol kinase, alpha 80kDa
  Uniprot ID: P23743
  ENST ID: ENST00000331886
  CDS Start-End: 455-2662
acacaatacccacacatgcatatacccttctagtcagaggtctcccctcccccttcttcccacccccaggtgtaagaaggacgattccaggaacctaaggctttgttactctgccccattttcaatgaagggtaggagggagttagacaggggttggggcggggccagtgagcaggatgcctgggtctccagttcctgccagtgagtccctaggcctccatctctctcccttgctgtaccaccttcaccaccatccatgcgaccccaagagccttaatgactctagaagagactccaggcaggggaagctgaaaggacctttcactccctacttttggccagggccttctgtgccacctgccaagaccagcaggcctaccctctgaagaggtccaagcaacggaagtactactacgaagctgcctttctggccatccttgagaaaaatagacagatggccaaggagaggggcctaataagccccagtgattttgcccagctgcaaaaatacatggaatactccaccaaaaaggtcagtgatgtcctaaagctcttcgaggatggcgagatggctaaatatgtccaaggagatgccattgggtacgagggattccagcaattcctgaaaatctatctcgaagtggataatgttcccagacacctaagcctggcactgtttcaatcctttgagactggtcactgcttaaatgagacaaatgtgacaaaagatgtggtgtgtctcaatgatgtttcctgctacttttcccttctggagggtggtcggccagaagacaagttagaattcaccttcaagctgtacgacacggacagaaatgggatcctggacagctcagaagtggacaaaattatcctacagatgatgcgagtggctgaatacctggattgggatgtgtctgagctgaggccgattcttcaggagatgatgaaagagattgactatgatggcagtggctctgtctctcaagctgagtgggtccgggctggggccaccaccgtgccactgctagtgctgctgggtctggagatgactctgaaggacgacggacagcacatgtggaggcccaagaggttccccagaccagtctactgcaatctgtgcgagtcaagcattggtcttggcaaacagggactgagctgtaacctctgtaagtacactgttcacgaccagtgtgccatgaaagccctgccttgtgaagtcagcacctatgccaagtctcggaaggacattggtgtccaatcacatgtgtgggtgcgaggaggctgtgagtccgggcgctgcgaccgctgtcagaaaaagatccggatctaccacagtctgaccgggctgcattgtgtatggtgccacctagagatccacgatgactgcctgcaagcggtgggccatgagtgtgactgtgggctgctccgggatcacatcctgcctccatcttccatctatcccagtgtcctggcctctggaccggatcgtaaaaatagcaaaacaagccagaagaccatggatgatttaaatttgagcacctctgaggctctgcggattgaccctgttcctaacacccacccacttctcgtctttgtcaatcctaagagtggcgggaagcaggggcaaagggtgctctggaagttccagtatatattaaaccctcgacaggtgttcaacctcctaaaggatggtcctgagatagggctccgattattcaaggatgttcctgatagccggattttggtgtgtggtggagacggcacagtaggctggattctagagaccattgacaaagctaacttgccagttttgcctcctgttgctgtgttgcccctgggtactggaaatgatctggctcgatgcctaagatggggaggaggttatgaaggacagaatctggcaaagatcctcaaggatttagagatgagtaaagtggtacatatggatcgatggtctgtggaggtgatacctcaacaaactgaagaaaaaagtgacccagtcccctttcaaatcatcaataactacttctctattggcgtggatgcctctattgctcatcgattccacatcatgcgagagaaatatccggagaagttcaacagcagaatgaagaacaagctatggtacttcgaatttgccacatctgaatccatcttctcaacatgcaaaaagctggaggagtctttgacagttgagatctgtgggaaaccgctggatctgagcaacctgtccctagaaggcatcgcagtgctaaacatccctagcatgcatggtggctccaacctctggggtgataccaggagaccccatggggatatctatgggatcaaccaggccttaggtgctacagctaaagtcatcaccgaccctgatatcctgaaaacctgtgtaccagacctaagtgacaagagactggaagtggttgggctggagggtgcaattgagatgggccaaatctataccaagctcaagaatgctggacgtcggctggccaagtgctctgagatcaccttccacaccacaaaaacccttcccatgcaaattgacggagaaccctggatgcagacgccctgtacaatcaagatcacccacaagaaccagatgcccatgctcatgggcccacccccccgctccaccaatttctttggcttcttgagctaagggggacacccttggcctccaagccagccttgaacccacctccctgtccctggactctactcccgaggctctgtacattgctgccacatactcctgccagcttgggggagtgttccttcaccctcacagtatttattatcctgcaccacctcactgttccccatgcgcacacacatacacacaccccaaaacacatacattgaaagtgcctcatctgaataaaatgacttgtgtttcccctttggga

SEQ ID NO: 126597 - DNA, 2770 bp, Homo sapiens
  Payload ID: 4826
  Gene Symbol: DGKA
  Gene Name: diacylglycerol kinase, alpha 80kDa
  Uniprot ID: P23743
  ENST ID: ENST00000394147
  CDS Start-End: 310-2517
gcggccgcgtctgcctggcccgtcccctccagcccagctcgggctccagctccagcgccggcgcttcagctgcgaccgcgagccctctcaagcaaggtagagaccccgcgagccccccagcgccccaccctcccccatcggaaaaggacaggggtagggaagccgaggacccacgggctgcgttcgtgctgctgggtcgggaaggaggaagcgtgacagctggagcgggcctaccctctgaagaggtccaagcaacggaagtactactacgaagctgcctttctggccatccttgagaaaaatagacagatggccaaggagaggggcctaataagccccagtgattttgcccagctgcaaaaatacatggaatactccaccaaaaaggtcagtgatgtcctaaagctcttcgaggatggcgagatggctaaatatgtccaaggagatgccattgggtacgagggattccagcaattcctgaaaatctatctcgaagtggataatgttcccagacacctaagcctggcactgtttcaatcctttgagactggtcactgcttaaatgagacaaatgtgacaaaagatgtggtgtgtctcaatgatgtttcctgctacttttcccttctggagggtggtcggccagaagacaagttagaattcaccttcaagctgtacgacacggacagaaatgggatcctggacagctcagaagtggacaaaattatcctacagatgatgcgagtggctgaatacctggattgggatgtgtctgagctgaggccgattcttcaggagatgatgaaagagattgactatgatggcagtggctctgtctctcaagctgagtgggtccgggctggggccaccaccgtgccactgctagtgctgctgggtctggagatgactctgaaggacgacggacagcacatgtggaggcccaagaggttccccagaccagtctactgcaatctgtgcgagtcaagcattggtcttggcaaacagggactgagctgtaacctctgtaagtacactgttcacgaccagtgtgccatgaaagccctgccttgtgaagtcagcacctatgccaagtctcggaaggacattggtgtccaatcacatgtgtgggtgcgaggaggctgtgagtccgggcgctgcgaccgctgtcagaaaaagatccggatctaccacagtctgaccgggctgcattgtgtatggtgccacctagagatccacgatgactgcctgcaagcggtgggccatgagtgtgactgtgggctgctccgggatcacatcctgcctccatcttccatctatcccagtgtcctggcctctggaccggatcgtaaaaatagcaaaacaagccagaagaccatggatgatttaaatttgagcacctctgaggctctgcggattgaccctgttcctaacacccacccacttctcgtctttgtcaatcctaagagtggcgggaagcaggggcaaagggtgctctggaagttccagtatatattaaaccctcgacaggtgttcaacctcctaaaggatggtcctgagatagggctccgattattcaaggatgttcctgatagccggattttggtgtgtggtggagacggcacagtaggctggattctagagaccattgacaaagctaacttgccagttttgcctcctgttgctgtgttgcccctgggtactggaaatgatctggctcgatgcctaagatggggaggaggttatgaaggacagaatctggcaaagatcctcaaggatttagagatgagtaaagtggtacatatggatcgatggtctgtggaggtgatacctcaacaaactgaagaaaaaagtgacccagtcccctttcaaatcatcaataactacttctctattggcgtggatgcctctattgctcatcgattccacatcatgcgagagaaatatccggagaagttcaacagcagaatgaagaacaagctatggtacttcgaatttgccacatctgaatccatcttctcaacatgcaaaaagctggaggagtctttgacagttgagatctgtgggaaaccgctggatctgagcaacctgtccctagaaggcatcgcagtgctaaacatccctagcatgcatggtggctccaacctctggggtgataccaggagaccccatggggatatctatgggatcaaccaggccttaggtgctacagctaaagtcatcaccgaccctgatatcctgaaaacctgtgtaccagacctaagtgacaagagactggaagtggttgggctggagggtgcaattgagatgggccaaatctataccaagctcaagaatgctggacgtcggctggccaagtgctctgagatcaccttccacaccacaaaaacccttcccatgcaaattgacggagaaccctggatgcagacgccctgtacaatcaagatcacccacaagaaccagatgcccatgctcatgggcccacccccccgctccaccaatttctttggcttcttgagctaagggggacacccttggcctccaagccagccttgaacccacctccctgtccctggactctactcccgaggctctgtacattgctgccacatactcctgccagcttgggggagtgttccttcaccctcacagtatttattatcctgcaccacctcactgttccccatgcgcacacacatacacacaccccaaaacacatacattgaaagtgcctcatctgaataaaatgacttgtgtttcccctttgggatctgct

SEQ ID NO: 126598 - DNA, 2582 bp, Homo sapiens
  Payload ID: 4826
  Gene Symbol: DGKA
  Gene Name: diacylglycerol kinase, alpha 80kDa
  Uniprot ID: P23743
  ENST ID: ENST00000402956
  CDS Start-End: 205-948
agcccagctcgggctccagctccagcgccggcgcttcagctgcgaccgcgagccctctcaagcaaggtagagaccccgcgagccccccagcgccccaccctcccccatcggaaaaggacaggggcctaccctctgaagaggtccaagcaacggaagtactactacgaagctgcctttctggccatccttgagaaaaatagacagatggccaaggagaggggcctaataagccccagtgattttgcccagctgcaaaaatacatggaatactccaccaaaaaggtcagtgatgtcctaaagctcttcgaggatggcgagatggctaaatatgtccaaggagatgccattgggtacgagggattccagcaattcctgaaaatctatctcgaagtggataatgttcccagacacctaagcctggcactgtttcaatcctttgagactggtcactgcttaaatgagacaaatgtgacaaaagatgtggtgtgtctcaatgatgtttcctgctacttttcccttctggagggtggtcggccagaagacaagttagaattcaccttcaagctgtacgacacggacagaaatgggatcctggacagctcagaagtggacaaaattatcctacagatgatgcgagtggctgaatacctggattgggatgtgtctgagctgaggccgattcttcaggagatgatgaaagagattgactatgatggcagtggctctgtctctcaagctgagtgggtccgggctggggccaccaccgtgccactgctagtgctgctgggtctggagatgactctgaaggacgacggacagcacatgtggaggcccaagaggttccccagaccagtctactgcaatctgtgcgagtcaagcattggtcttggcaaacagggactgagctgtaaccgtccaatcacatgtgtgggtgcgaggaggctgtgagtccgggcgctgcgaccgctgtcagaaaaagatccggatctaccacagtctgaccgggctgcattgtgtatggtgccacctagagatccacgatgactgcctgcaagcggtgggccatgagtgtgactgtgggctgctccgggatcacatcctgcctccatcttccatctatcccagtgtcctggcctctggaccggatcgtaaaaatagcaaaacaagccagaagaccatggatgatttaaatttgagcacctctgaggctctgcggattgaccctgttcctaacacccacccacttctcgtctttgtcaatcctaagagtggcgggaagcaggggcaaagggtgctctggaagttccagtatatattaaaccctcgacaggtgttcaacctcctaaaggatggtcctgagatagggctccgattattcaaggatgttcctgatagccggattttggtgtgtggtggagacggcacagtaggctggattctagagaccattgacaaagctaacttgccagttttgcctcctgttgctgtgttgcccctgggtactggaaatgatctggctcgatgcctaagatggggaggaggttatgaaggacagaatctggcaaagatcctcaaggatttagagatgagtaaagtggtacatatggatcgatggtctgtggaggtgatacctcaacaaactgaagaaaaaagtgacccagtcccctttcaaatcatcaataactacttctctattggcgtggatgcctctattgctcatcgattccacatcatgcgagagaaatatccggagaagttcaacagcagaatgaagaacaagctatggtacttcgaatttgccacatctgaatccatcttctcaacatgcaaaaagctggaggagtctttgacagttgagatctgtgggaaaccgctggatctgagcaacctgtccctagaaggcatcgcagtgctaaacatccctagcatgcatggtggctccaacctctggggtgataccaggagaccccatggggatatctatgggatcaaccaggccttaggtgctacagctaaagtcatcaccgaccctgatatcctgaaaacctgtgtaccagacctaagtgacaagagactggaagtggttgggctggagggtgcaattgagatgggccaaatctataccaagctcaagaatgctggacgtcggctggccaagtgctctgagatcaccttccacaccacaaaaacccttcccatgcaaattgacggagaaccctggatgcagacgccctgtacaatcaagatcacccacaagaaccagatgcccatgctcatgggcccacccccccgctccaccaatttctttggcttcttgagctaagggggacacccttggcctccaagccagccttgaacccacctccctgtccctggactctactcccgaggctctgtacattgctgccacatactcctgccagcttgggggagtgttccttcaccctcacagtatttattatcctgcaccacctcactgttccccatgcgcacacacatacacacaccccaaaacacatacattgaaagtgcctcatctgaataaaatgacttgtgtttcccctttgggatctgctaagtaa

SEQ ID NO: 126599 - DNA, 591 bp, Homo sapiens
  Payload ID: 4826
  Gene Symbol: DGKA
  Gene Name: diacylglycerol kinase, alpha 80kDa
  ENST ID: ENST00000432422
  CDS Start-End: 243-591
agctgcgaccgcgagccctctcaagcaaggtagagaccccgcgagccccccagcgccccaccctcccccatcggaaaaggacaggggtagggaagccgaggacccacgggctgcgttcgtgctgctgggtcgggaaggaggaagcgtgacagctggagcgggcctaccctctgaagaggtccaagcaacggaagtactactacgaagctgcctttctggccatccttgagaaaaatagacagatggccaaggagaggggcctaataagccccagtgattttgcccagctgcaaaaatacatggaatactccaccaaaaaggtcagtgatgtcctaaagctcttcgaggatggcgagatggctaaatatgtccaaggagatgccattgggtacgagggattccagcaattcctgaaaatctatctcgaagtggataatgttcccagacacctaagcctggcactgtttcaatcctttgagactggtcactgcttaaatgagacaaatgtgacaaaagatgtggtgtgtctcaatgatgtttcctgctacttttcccttctggagggtggtcggccagaagacaagttagaat

SEQ ID NO: 126600 - DNA, 556 bp, Homo sapiens
  Payload ID: 4826
  Gene Symbol: DGKA
  Gene Name: diacylglycerol kinase, alpha 80kDa
  ENST ID: ENST00000546878
  CDS Start-End: 383-556
attactgagcgcttgctgcctgtaaaacagtcctcagggagccaagagaagttccgaggcacagtccctctcatccccaggaactcctcgtacgtccaggacctgcgagggaaaagggcgcaaggcccacctgcacccaaaaagggggccttataaatgaagaaaggaagaatatccaggctctggcctgcacccagatctcagagcggcttggtgacgtggagcagacaaactccaggaacgcactggggcgcacaagtgtttctagggacggttggagaccctatctaaccctaagaaggcctaccctctgaagaggtccaagcaacggaagtactactacgaagctgcctttctggccatccttgagaaaaatagacagatggccaaggagaggggcctaataagccccagtgattttgcccagctgcaaaaatacatggaatactccaccaaaaaggtcagtgatgtcctaaagctcttcgaggatggcgagatggctaaatatgtccaaggagatgccattgggtacgagggattccagcaattcctgaaa

SEQ ID NO: 126601 - DNA, 1734 bp, Homo sapiens
  Payload ID: 4826
  Gene Symbol: DGKA
  Gene Name: diacylglycerol kinase, alpha 80kDa
  Uniprot ID: P23743
  ENST ID: ENST00000553084
  CDS Start-End: 212-568
ttcaccaccatccatgcgaccccaagagccttaatgactctagaagagactccaggcaggggaagctgaaaggacctttcactccctacttttggccagggccttctgtgccacctgccaagaccagcaggcctaccctctgaagaggtccaagcaacggaagtactactacgaagctgcctttctggccatccttgagaaaaatagacagatggccaaggagaggggcctaataagccccagtgattttgcccagctgcaaaaatacatggaatactccaccaaaaaggtcagtgatgtcctaaagctcttcgaggatggcgagatggctaaatatgtccaaggagatgccattgggtacgagggattccagcaattcctgaaaatctatctcgaagtggataatgttcccagacacctaagcctggcactgtttcaatcctttgagactggtcactgcttaaatgagacaaatgtgacaaaagatgtggtgtgtctcaatgatgtttcctgctacttttcccttctggagggtggtcggccagaagacaagttagaatggtcttaagaaacagaagaggatggggggagaggttgagtcctctaggactaaatttgaaagaagtggacaaaattatcctacagatgatgcgagtggctgaatacctggattgggatgtgtctgagctgaggccgattcttcaggagatgatgaaagagattgactatgatggcagtggctctgtctctcaagctgagtgggtccgggctggggccaccaccgtgccactgctagtgctgctgggtctggagatgactctgaaggacgacggacagcacatgtggaggcccaagaggttccccagaccagtctactgcaatctgtgcgagtcaagcattggtcttggcaaacagggactgagctgtaacctctgtaagtacactgttcacgaccagtgtgccatgaaagccctgccttgtgaagtcagcacctatgccaagtctcggaaggacattggtgtccaatcacatgtgtgggtgcgaggaggctgtgagtccgggcgctgcgaccgctgtcagaaaaagatccggatctaccacagtctgaccgggctgcattgtgtatggtgccacctagagatccacgatgactgcctgcaagcggtgggccatgagtgtgactgtgggctgctccgggatcacatcctgcctccatcttccatctatcccagtgtcctggcctctggaccggatcgtaaaaatagcaaaacaagccagaagaccatggatgatttaaatttgagcacctctgaggctctgcggattgaccctgttcctaacacccacccacttctcgtctttgtcaatcctaagagtggcgggaagcaggggcaaagggtgctctggaagttccagtatatattaaaccctcgacaggtgttcaacctcctaaaggatggtcctgagatagggctccgattattcaaggatgttcctgatagccggattttggtgtgtggtggagacggcacagtaggctggattctagagaccattgacaaagctaacttgccagttttgcctcctgttgctgtgttgcccctgggtactggaaatgatctggctcgatgcctaagatggggaggaggttatgaaggacagaatctggcaaagatcctcaaggatttagagatgagtaaagtggtacatatggatcgatggtctgtggaggtg

SEQ ID NO: 126602 - DNA, 567 bp, Homo sapiens
  Payload ID: 4826
  Gene Symbol: DGKA
  Gene Name: diacylglycerol kinase, alpha 80kDa
  ENST ID: ENST00000549368
  CDS Start-End: 126-567
gactggggaaaataggtctaaaaggaaagaggaacgtgaagaaggcctaccctctgaagaggtccaagcaacggaagtactactacgaagctgcctttctggccatccttgagaaaaatagacagatggccaaggagaggggcctaataagccccagtgattttgcccagctgcaaaaatacatggaatactccaccaaaaaggtcagtgatgtcctaaagctcttcgaggatggcgagatggctaaatatgtccaaggagatgccattgggtacgagggattccagcaattcctgaaaatctatctcgaagtggataatgttcccagacacctaagcctggcactgtttcaatcctttgagactggtcactgcttaaatgagacaaatgtgacaaaagatgtggtgtgtctcaatgatgtttcctgctacttttcccttctggagggtggtcggccagaagacaagttagaattcaccttcaagctgtacgacacggacagaaatgggatcctggacagctcagaagtggacaaaattatcctacagatgatgcgagtggctgaat

SEQ ID NO: 126603 - DNA, 605 bp, Homo sapiens
  Payload ID: 4826
  Gene Symbol: DGKA
  Gene Name: diacylglycerol kinase, alpha 80kDa
  ENST ID: ENST00000551707
  CDS Start-End: 207-605
gtcagaagcgctagaggtcgttgcgtggcgtgggtggctcggggagtgggtggctgagcggagctggggtccctggccagaggcggaacaaaatggggtcatggccaggaagacgcgctaacgcagcctaccctctgaagaggtccaagcaacggaagtactactacgaagctgcctttctggccatccttgagaaaaatagacagatggccaaggagaggggcctaataagccccagtgattttgcccagctgcaaaaatacatggaatactccaccaaaaaggtcagtgatgtcctaaagctcttcgaggatggcgagatggctaaatatgtccaaggagatgccattgggtacgagggattccagcaattcctgaaaatctatctcgaagtggataatgttcccagacacctaagcctggcactgtttcaatcctttgagactggtcactgcttaaatgagacaaatgtgacaaaagatgtggtgtgtctcaatgatgtttcctgctacttttcccttctggagggtggtcggccagaagacaagttagaattcaccttcaagctgtacgacacggacagaaatgggatcctggacagctca

SEQ ID NO: 126604 - DNA, 563 bp, Homo sapiens
  Payload ID: 4826
  Gene Symbol: DGKA
  Gene Name: diacylglycerol kinase, alpha 80kDa
  Uniprot ID: P23743
  ENST ID: ENST00000548549
  CDS Start-End: 126-482
gactggggaaaataggtctaaaaggaaagaggaacgtgaagaaggcctaccctctgaagaggtccaagcaacggaagtactactacgaagctgcctttctggccatccttgagaaaaatagacagatggccaaggagaggggcctaataagccccagtgattttgcccagctgcaaaaatacatggaatactccaccaaaaaggtcagtgatgtcctaaagctcttcgaggatggcgagatggctaaatatgtccaaggagatgccattgggtacgagggattccagcaattcctgaaaatctatctcgaagtggataatgttcccagacacctaagcctggcactgtttcaatcctttgagactggtcactgcttaaatgagacaaatgtgacaaaagatgtggtgtgtctcaatgatgtttcctgctacttttcccttctggagggtggtcggccagaagacaagttagaatggtcttaagaaacagaagaggatggggggagaggttgagtcctctaggactaaatttgaaagaagtggacaaaattatcctacagatga

SEQ ID NO: 126605 - DNA, 542 bp, Homo sapiens
  Payload ID: 4826
  Gene Symbol: DGKA
  Gene Name: diacylglycerol kinase, alpha 80kDa
  ENST ID: ENST00000547015
  CDS Start-End: 479-542
atgatctcggctcactgcaacctctgcctcccaggttcaagcgattctcctgcctcagcctcgcgagtaactgggactacaggcatgtgccaccacgcccggctaattttttgtatttttagtagagacaggttttcaccgtgttagccaggatggtctcaatctcctgatctcgtgatccgcctgcctcagcctgccaaagtgctgggattacagttcctgccagtgagtccctaggcctccatctctctcccttgctgtaccaccttcaccaccatccatgcgaccccaagagccttaatgactctagaagagactccaggcaggggaagctgaaaggacctttcactccctacttttggccagggccttctgtgccacctgccaagaccagcaggcctaccctctgaagaggtccaagcaacggaagtactactacgaagctgcctttctggccatccttgagaaaaatagacagatggccaaggagaggggcctaataagccccagtgattttgcccagctgcaaaaatacatggaat

SEQ ID NO: 126606 - DNA, 585 bp, Homo sapiens
  Payload ID: 4826
  Gene Symbol: DGKA
  Gene Name: diacylglycerol kinase, alpha 80kDa
  ENST ID: ENST00000550888
  CDS Start-End: 57-407
aacggaagtactactacgaagctgcctttctggccatccttgagaaaaatagacagatggccaaggagaggggcctaataagccccagtgattttgcccagctgcaaaaatacatggaatactccaccaaaaaggtcagtgatgtcctaaagctcttcgaggatggcgagatggctaaatatgtccaaggagatgccattgggtacgagggattccagcaattcctgaaaatctatctcgaagtggataatgttcccagacacctaagcctggcactgtttcaatcctttgagactggtcactgcttaaatgagacaaatgtgacaaaagatgtggtgtgtctcaatgatgtttcctgctacttttcccttctggagggtggtcggccagaagacaagttagaatgaagtggacaaaattatcctacagatgatgcgagtggctgaatacctggattgggatgtgtctgagctgaggccgattcttcaggagatgatgaaagagattgactatgatggcagtggctctgtctctcaagctgagtgggtccgggctggggccaccaccgtgccactgctagtgctg

SEQ ID NO: 126607 - DNA, 2671 bp, Homo sapiens
  Payload ID: 4826
  Gene Symbol: DGKA
  Gene Name: diacylglycerol kinase, alpha 80kDa
  Uniprot ID: P23743
  ENST ID: ENST00000551156
  CDS Start-End: 205-2412
agcccagctcgggctccagctccagcgccggcgcttcagctgcgaccgcgagccctctcaagcaaggtagagaccccgcgagccccccagcgccccaccctcccccatcggaaaaggacaggggcctaccctctgaagaggtccaagcaacggaagtactactacgaagctgcctttctggccatccttgagaaaaatagacagatggccaaggagaggggcctaataagccccagtgattttgcccagctgcaaaaatacatggaatactccaccaaaaaggtcagtgatgtcctaaagctcttcgaggatggcgagatggctaaatatgtccaaggagatgccattgggtacgagggattccagcaattcctgaaaatctatctcgaagtggataatgttcccagacacctaagcctggcactgtttcaatcctttgagactggtcactgcttaaatgagacaaatgtgacaaaagatgtggtgtgtctcaatgatgtttcctgctacttttcccttctggagggtggtcggccagaagacaagttagaattcaccttcaagctgtacgacacggacagaaatgggatcctggacagctcagaagtggacaaaattatcctacagatgatgcgagtggctgaatacctggattgggatgtgtctgagctgaggccgattcttcaggagatgatgaaagagattgactatgatggcagtggctctgtctctcaagctgagtgggtccgggctggggccaccaccgtgccactgctagtgctgctgggtctggagatgactctgaaggacgacggacagcacatgtggaggcccaagaggttccccagaccagtctactgcaatctgtgcgagtcaagcattggtcttggcaaacagggactgagctgtaacctctgtaagtacactgttcacgaccagtgtgccatgaaagccctgccttgtgaagtcagcacctatgccaagtctcggaaggacattggtgtccaatcacatgtgtgggtgcgaggaggctgtgagtccgggcgctgcgaccgctgtcagaaaaagatccggatctaccacagtctgaccgggctgcattgtgtatggtgccacctagagatccacgatgactgcctgcaagcggtgggccatgagtgtgactgtgggctgctccgggatcacatcctgcctccatcttccatctatcccagtgtcctggcctctggaccggatcgtaaaaatagcaaaacaagccagaagaccatggatgatttaaatttgagcacctctgaggctctgcggattgaccctgttcctaacacccacccacttctcgtctttgtcaatcctaagagtggcgggaagcaggggcaaagggtgctctggaagttccagtatatattaaaccctcgacaggtgttcaacctcctaaaggatggtcctgagatagggctccgattattcaaggatgttcctgatagccggattttggtgtgtggtggagacggcacagtaggctggattctagagaccattgacaaagctaacttgccagttttgcctcctgttgctgtgttgcccctgggtactggaaatgatctggctcgatgcctaagatggggaggaggttatgaaggacagaatctggcaaagatcctcaaggatttagagatgagtaaagtggtacatatggatcgatggtctgtggaggtgatacctcaacaaactgaagaaaaaagtgacccagtcccctttcaaatcatcaataactacttctctattggcgtggatgcctctattgctcatcgattccacatcatgcgagagaaatatccggagaagttcaacagcagaatgaagaacaagctatggtacttcgaatttgccacatctgaatccatcttctcaacatgcaaaaagctggaggagtctttgacagttgagatctgtgggaaaccgctggatctgagcaacctgtccctagaaggcatcgcagtgctaaacatccctagcatgcatggtggctccaacctctggggtgataccaggagaccccatggggatatctatgggatcaaccaggccttaggtgctacagctaaagtcatcaccgaccctgatatcctgaaaacctgtgtaccagacctaagtgacaagagactggaagtggttgggctggagggtgcaattgagatgggccaaatctataccaagctcaagaatgctggacgtcggctggccaagtgctctgagatcaccttccacaccacaaaaacccttcccatgcaaattgacggagaaccctggatgcagacgccctgtacaatcaagatcacccacaagaaccagatgcccatgctcatgggcccacccccccgctccaccaatttctttggcttcttgagctaagggggacacccttggcctccaagccagccttgaacccacctccctgtccctggactctactcccgaggctctgtacattgctgccacatactcctgccagcttgggggagtgttccttcaccctcacagtatttattatcctgcaccacctcactgttccccatgcgcacacacatacacacaccccaaaacacatacattgaaagtgcctcatctgaataaaatgacttgtgtttcccctttgggatctgctaagtaa

SEQ ID NO: 126608 - DNA, 548 bp, Homo sapiens
  Payload ID: 4826
  Gene Symbol: DGKA
  Gene Name: diacylglycerol kinase, alpha 80kDa
  ENST ID: ENST00000555025
  CDS Start-End: 417-548
agaagcagagctgccgccggcgcgggaagaagatgaggagcgcagcaaatggagaaaatgtgtccaaagccccggacatattcgagggagggtggagcaggttatggtgaactggaaacctagaaacgggcctctccaacttcgaagttcccagagtcgggggcgccgggcgcgggcgcggcgggcaggctggggtggggggcgggcagctatgtcgtcaggaacggggcggccccgctgcggccgcgtctgcctggcccgtcccctccagcccagctcgggctccagctccagcgccggcgcttcagctgcgaccgcgagccctctcaagcaaggcctaccctctgaagaggtccaagcaacggaagtactactacgaagctgcctttctggccatccttgagaaaaatagacagatggccaaggagaggggcctaataagccccagtgattttgcccagctgcaaaaatacatggaatactccaccaaaaaggtcagtgatgtcctaaagctcttcgaggatggcgagatggctaaatatgtccaa

SEQ ID NO: 126609 - DNA, 548 bp, Homo sapiens
  Payload ID: 4826
  Gene Symbol: DGKA
  Gene Name: diacylglycerol kinase, alpha 80kDa
  ENST ID: ENST00000549629
  CDS Start-End: 265-548
agttcctgccagtgagtccctaggcctccatctctctcccttgctgtaccaccttcaccaccatccatgcgaccccaagagccttaatgactctagaagagactccaggcaggggaagctgaaaggacctttcactccctacttttggccagggccttctgtgccacctgccaagaccagcaggcctaccctctgaagaggtccaagcaacggaagtactactacgaagctgcctttctggccatccttgagaaaaatagacagatggccaaggagaggggcctaataagccccagtgattttgcccagctgcaaaaatacatggaatcttcctcagtggctttgagcagtgtgctgctcagatgtgcccatgactggaaatgggaggagtgggagatggggagatgtcagaaaaagatccggatctaccacagtctaactgggctgcattgtgcaaggtctcggctctctacccaccttcgctatacctggactgcttgctccagctctcagagaagaggagtaaagagtgactccaccaaaaaggt

SEQ ID NO: 126610 - DNA, 564 bp, Homo sapiens
  Payload ID: 4826
  Gene Symbol: DGKA
  Gene Name: diacylglycerol kinase, alpha 80kDa
  ENST ID: ENST00000553783
  CDS Start-End: 243-564
agctcgggctccagctccagcgccggcgcttcagctgcgaccgcgagccctctcaagcaagatataacttccccaagtcacacagtggtatcagagctaagaatgggacccagatatgactgatctagttctgttccaaaaccgtgctgtattatattaacgcctaccctctgaagaggtccaagcaacggaagtactactacgaagctgcctttctggccatccttgagaaaaatagacagatggccaaggagaggggcctaataagccccagtgattttgcccagctgcaaaaatacatggaatactccaccaaaaaggtcagtgatgtcctaaagctcttcgaggatggcgagatggctaaatatgtccaaggagatgccattgggtacgagggattccagcaattcctgaaaatctatctcgaagtggataatgttcccagacacctaagcctggcactgtttcaatcctttgagactggtcactgcttaaatgagacaaatgtgacaaaagatgtggtgtgtctcaatgatgtttcctgctacttttcccttctggagg

SEQ ID NO: 126611 - DNA, 497 bp, Homo sapiens
  Payload ID: 4826
  Gene Symbol: DGKA
  Gene Name: diacylglycerol kinase, alpha 80kDa
  ENST ID: ENST00000556001
  CDS Start-End: 98-497
agccctctcaagcaaggcctaccctctgaagaggtccaagcaacggaagtactactacgaagctgcctttctggccatccttgagaaaaatagacagatggccaaggagaggggcctaataagccccagtgattttgcccagctgcaaaaatacatggaatactccaccaaaaaggtcagtgatgtcctaaagctcttcgaggatggcgagatggctaaatatgtccaaggagatgccattgggtacgagggattccagcaattcctgaaaatctatctcgaagtggataatgttcccagacacctaagcctggcactgtttcaatcctttgagactggtcactgcttaaatgagacaaatgtgacaaaagatgtggtgtgtctcaatgatgtttcctgctacttttcccttctggagggtggtcggccagaagacaagttagaattcaccttcaagctgtacgacacggacagaaatgggatcctggacagctcag

SEQ ID NO: 126612 - DNA, 698 bp, Homo sapiens
  Payload ID: 4826
  Gene Symbol: DGKA
  Gene Name: diacylglycerol kinase, alpha 80kDa
  ENST ID: ENST00000557180
  CDS Start-End: 1-294
tgcaatctgtgcgagtcaagcattggtcttggcaaacagggactgagctgtaacctctgtaagtacactgttcacgaccagtgtgccatgaaagccctgccttgtgaagtcagcacctatgccaagtctcggaaggacattggtcccctccctcccctaggtcctgctcagaccctgccagacaaggaactgcctttctccccaaggtccaatcacatgtgtgggtgcgaggaggctgtgagtccgggcgctgcgaccgctgtcagaaaaagatccggatctaccacagtctgaccgggctgcattgtgtatggtgccacctagagatccacgatgactgcctgcaagcggtgggccatgagtgtgactgtgggctgctccgggatcacatcctgcctccatcttccatctatcccagtgtcctggcctctggaccggatcgtaaaaatagcaaaacaagccagaagaccatggatgatttaaatttgagcacctctgaggctctgcggattgaccctgttcctaacacccacccacttctcgtctttgtcaatcctaagagtggcgggaagcaggggcaaagggtgctctggaagttccagtatatattaaaccctcgacaggtgttcaacctcctaaaggatggtcctgagatagggctccgattattcaaggatgttcctgatagccggattttg

SEQ ID NO: 126613 - DNA, 607 bp, Homo sapiens
  Payload ID: 4826
  Gene Symbol: DGKA
  Gene Name: diacylglycerol kinase, alpha 80kDa
  ENST ID: ENST00000552903
  CDS Start-End: 1-607
ctgcggattgaccctgttcctaacacccacccacttctcgtctttgtcaatcctaagagtggcgggaagcaggggcaaaggctccgattattcaaggatgttcctgatagccggattttggtgtgtggtggagacggcacagtaggctggattctagagaccattgacaaagctaacttgccagttttgcctcctgttgctgtgttgcccctgggtactggaaatgatctggctcgatgcctaagatggggaggaggttatgaaggacagaatctggcaaagatcctcaaggatttagagatgagtaaagtggtacatatggatcgatggtctgtggaggtgatacctcaacaaactgaagaaaaaagtgacccagtcccctttcaaatcatcaataactacttctctattggcgtggatgcctctattgctcatcgattccacatcatgcgagagaaatatccggagaagttcaacagcagaatgaagaacaagctatggtacttcgaatttgccacatctgaatccatcttctcaacatgcaaaaagctggaggagtctttgacagttgagatctgtgggaaaccgctggatctgagcaacctgt

SEQ ID NO: 126614 - DNA, 1900 bp, Homo sapiens
  Payload ID: 4826
  Gene Symbol: DGKA
  Gene Name: diacylglycerol kinase, alpha 80kDa
  ENST ID: ENST00000555218
  CDS Start-End: 265-1900
agttcctgccagtgagtccctaggcctccatctctctcccttgctgtaccaccttcaccaccatccatgcgaccccaagagccttaatgactctagaagagactccaggcaggggaagctgaaaggacctttcactccctacttttggccagggccttctgtgccacctgccaagaccagcaggcctaccctctgaagaggtccaagcaacggaagtactactacgaagctgcctttctggccatccttgagaaaaatagacagatggccaaggagaggggcctaataagccccagtgattttgcccagctgcaaaaatacatggaatactccaccaaaaagggtggtcggccagaagacaagttagaattcaccttcaagctgtacgacacggacagaaatgggatcctggacagctcagaagtggacaaaattatcctacagatgatgcgagtggctgaatacctggattgggatgtgtctgagctgaggccgattcttcaggagatgatgaaagagattgactatgatggcagtggctctgtctctcaagctgagtgggtccgggctggggccaccaccgtgccactgctagtgctgctgggtctggagatgactctgaaggacgacggacagcacatgtggaggcccaagaggttccccagaccagtctactgcaatctgtgcgagtcaagcattggtcttggcaaacagggactgagctgtaacctctgtaagtacactgttcacgaccagtgtgccatgaaagccctgccttgtgaagtcagcacctatgccaagtctcggaaggacattggtgtccaatcacatgtgtgggtgcgaggaggctgtgagtccgggcgctgcgaccgctgtcagaaaaagatccggatctaccacagtctgaccgggctgcattgtgtatggtgccacctagagatccacgatgactgcctgcaagcggtgggccatgagtgtgactgtgggctgctccgggatcacatcctgcctccatcttccatctatcccagtgtcctggcctctggaccggatcgtaaaaatagcaaaacaagccagaagaccatggatgatttaaatttgagcacctctgaggctctgcggattgaccctgttcctaacacccacccacttctcgtctttgtcaatcctaagagtggcgggaagcaggggcaaagggtgctctggaagttccagtatatattaaaccctcgacaggtgttcaacctcctaaaggatggtcctgagatagggctccgattattcaaggatgttcctgatagccggattttggtgtgtggtggagacggcacagtaggctggattctagagaccattgacaaagctaacttgccagttttgcctcctgttgctgtgttgcccctgggtactggaaatgatctggctcgatgcctaagatggggaggaggttatgaaggacagaatctggcaaagatcctcaaggatttagagatgagtaaagtggtacatatggatcgatggtctgtggaggtgatacctcaacaaactgaagaaaaaagtgacccagtcccctttcaaatcatcaataactacttctctattggcgtggatgcctctattgctcatcgattccacatcatgcgagagaaatatccggagaagttcaacagcagaatgaagaacaagctatggtacttcgaatttgccacatctgaatccatcttctcaacatgcaaaaagctggaggagtctttgacagttgagatctgtgggaaaccgctggatctgagcaacctgtccctagaaggcatcgcagtgctaaacatccctagcatgcatggtggctccaacctctggggtgataccaggagaccccatggggatatctatgggatcaacc

SEQ ID NO: 126615 - DNA, 505 bp, Homo sapiens
  Payload ID: 4826
  Gene Symbol: DGKA
  Gene Name: diacylglycerol kinase, alpha 80kDa
  ENST ID: ENST00000557080
  CDS Start-End: 374-505
gctcgggctccagctccagcgccggcgcttcagctgcgaccgcgagccctctcaagcaaggtagagaccccgcgagccccccagcgccccaccctcccccatcggaaaaggacaggggtagggaagccgaggacccacgggctgcgttcgtgctgctgggtcgggaaggaggaagcgtgacagctggagcggatataacttccccaagtcacacagtggtatcagagctaagaatgggacccagatatgactgatctagttctgttccaaaaccgtgctgtattatattaacgcctaccctctgaagaggtccaagcaacggaagtactactacgaagctgcctttctggccatccttgagaaaaatagacagatggccaaggagaggggcctaataagccccagtgattttgcccagctgcaaaaatacatggaatactccaccaaaaaggtcagtgatgtcctaaagctcttcgaggatggcgagatggctaaatatgtccaa

SEQ ID NO: 126616 - DNA, 569 bp, Homo sapiens
  Payload ID: 4826
  Gene Symbol: DGKA
  Gene Name: diacylglycerol kinase, alpha 80kDa
  ENST ID: ENST00000555090
  CDS Start-End: 438-569
attttcaatgaagggtaggagggagttagacaggggttggggcggggccagtgagcaggatgcctgggtctccagttcctgccagtgagtccctaggcctccatctctctcccttgctgtaccaccttcaccaccatccatgcgaccccaagagccttaatgactctagaagagactccaggcaggggaagctgaaaggacctttcactccctacttttggccagggccttctgtgccacctgccaagaccagcagatataacttccccaagtcacacagtggtatcagagctaagaatgggacccagatatgactgatctagttctgttccaaaaccgtgctgtattatattaacgcctaccctctgaagaggtccaagcaacggaagtactactacgaagctgcctttctggccatccttgagaaaaatagacagatggccaaggagaggggcctaataagccccagtgattttgcccagctgcaaaaatacatggaatactccaccaaaaaggtcagtgatgtcctaaagctcttcgaggatggcgagatggctaaatatgtccaa

SEQ ID NO: 126617 - DNA, 6684 bp, Homo sapiens
  Payload ID: 4827
  Gene Symbol: DGKB
  Gene Name: diacylglycerol kinase, beta 90kDa
  Uniprot ID: Q9Y6T7
  ENST ID: ENST00000399322
  CDS Start-End: 188-2602
ttctttaacacattattgaaattacaagcatccaaagcagtttcatgtggacagattgcatattttgaaagcctgaggtattttatcatgaaacatgccatgtggaatctttgaagcatagacctctgcgcaacacctgaataaagaatcttttacctggtatgtgacagagcttctcaccaccaccatgacaaaccaggaaaaatgggcccacctcagcccttcggaattttcccaacttcagaaatatgctgagtattctacaaagaaattaaaggatgttcttgaagaattccatggtaatggtgtgcttgcaaagtataatcctgaagggaaacaagacattcttaaccaaacaatagattttgaaggtttcaaactattcatgaagacattcctggaagccgagcttcctgatgatttcactgcacaccttttcatgtcatttagcaacaagtttcctcattctagtccaatggtaaaaagtaagcctgctctcctatcaggcggtctgagaatgaataaaggtgccatcacccctccccggactacttctcctgcaaatacgtgttccccagaagtaatccatctgaaggacattgtctgttacctgtctctgcttgaaagaggaagacctgaggataagcttgagtttatgtttcgcctttatgacacggatgggaatggcttcctggacagctcggagctagaaaatatcatcagtcagatgatgcatgttgcagaataccttgagtgggatgtcactgaacttaatccaatcctccatgaaatgatggaagaaattgactatgatcatgatggaaccgtgtctctggaggaatggattcaaggaggaatgacaacgattccacttcttgtgctcctgggcttagaaaataacgtgaaggatgatggacagcacgtgtggcgactgaagcactttaacaaacctgcctattgcaacctttgcctgaacatgctgattggcgtggggaagcagggcctctgctgttccttctgcaagtacacagtccatgagcgctgtgtggctcgagcacctccctcttgcatcaagacctatgtgaagtccaaaaggaacactgatgtcatgcaccattactgggttgaaggtaactgcccaaccaagtgtgataagtgccacaaaactgttaaatgttaccagggcctgacaggactgcattgtgtttggtgtcagatcacactgcataataaatgtgcttctcatctaaaacctgaatgtgactgtggacctttgaaggaccatattttaccacccacaacaatctgtccagtggtactgcagactctgcccacttcaggagtttcagttcctgaggaaagacaatcaacagtgaaaaaggaaaagagtggttcccagcagccaaacaaagtgattgacaagaataaaatgcaaagagccaactctgttactgtagatggacaaggcctgcaggtcactcctgtgcctggtactcacccacttttagtttttgtgaaccccaaaagtggtggaaaacaaggagaacgaatttacagaaaattccagtatctattaaatcctcgtcaggtttacagtctttctggaaatggaccaatgccagggttaaactttttccgtgatgttcctgacttcagagtgttagcctgtggtggagatggaaccgtgggctgggttttggattgcatagaaaaggccaatgtaggcaagcatcctccagttgcgattctgcctcttgggactggcaatgatctagcaagatgcctgcgatggggaggaggttacgaaggtgagaatctgatgaaaattctaaaagacattgaaaacagcacagaaatcatgttggacaggtggaagtttgaagtcatacctaatgacaaagatgagaaaggagacccagtgccttacagtatcatcaataattacttttccattggcgtggatgcctccattgcacacagattccacatcatgagagaaaaacacccagagaaattcaacagtagaatgaagaacaaattttggtattttgagtttggcacatctgaaactttctcagccacctgcaagaagctacatgaatctgtagaaatagaatgtgatggagtacagatagatttaataaacatctctctggaaggaattgctattttgaatataccaagcatgcatggaggatccaatctttggggagagtctaagaaaagacgaagccatcgacgaatagagaaaaaagggtctgacaaaaggaccaccgtcacagatgccaaagagttgaagtttgcaagtcaagatctcagtgaccagctgctggaggtggtcggcttggaaggagccatggagatggggcaaatatacacaggcctgaaaagtgctggccggcggctggctcagtgctcctgcgtggtcatcaggacgagcaagtctctgccaatgcaaattgatggggagccatggatgcagaccccatgcacaataaaaattacacacaagaaccaagccccaatgctgatgggcccgcctccaaaaaccggtttattctgctccctcgtcaaaaggacaagaaaccgaagcaaggaataatcctgtgttgtttcactcttagaaattgaattagcataattgggccatggaacacatatgctggaaatctttgaaccatttcaagtctcctgctcatgcaaaatcatggaagtggtttaacagtttttgttactaagctaatgtaaaattcagctattagaaaatttattgtctcagtttttataggcatctttgcatgaagaaagcagaagtttacctgaagtgatactgcatatttttggtgcatgcattcccatagatttttacatctcccacccaactcttccccaatttccttttactaacctgtgagaaaaacccgtgaaacatgaaaaaggaaataccatgggaaacgtgattctcagtgtgattccaattattacgaagcactaatcagtaacgctacaatgatcataattgcagattgctatacgtttcccttttagaatcagtgtatcagtgacctatgacttgaggagaaacttttaattcgaagattttattaaatagttgactacaataccttgctatatatacatagtttttcttcaacatcttaactcttctgagtggaaataaaaatatcaggcataaggttttctcatgctgaaaaatagaacgcggtttttattttgcttagttttctttttaattccagaaataagtgaaaacatgttacttgacagtcaagtgtggtaatatggcaagccttgttcctttctgcatgagaatctaggagagaattcataaccacaccaataacgaaatagaagttttaaactatgtgcctaatcaatgtgtttcccaccaaagattcagaaaacaatgcttgagagaaatgggttaatgcataattaattaagcattgtggagcaaatttagggttcctgtgattaattttgtgatgactaaaatgctggaaagcgagtgagttgcccattaattatgattaaaattctcacctttcacagacagacaataagccagacaacacaatcaaagctcaatagatgatttcttgcttttttcagtcatttataaatataggtgtaatttttcatggatcagttaagtacacttgaaggaagtaaatgattgtatcagtttatttctagtataaatgggtacctgtaataatactgagctcttggaagcgaatcatgcatgcaattagctccctcctcctcacctactccactcccatctttatgacatttcaaatgtttatttggaaacaacagcctagatcactgttgaaggtgttcatggcatagttggagtctctgactgtttaaagaaatcacagaacagtacttttcttttagtgtttcattaagcctatgatgtaaaatgaaatgcttctgagcagtcttgtaatattgttcattcatattgacctgcatctcatcattgcatgttttatgttttcaaacatgccataaggaaaacgagtgcctgaactgcatgatttattagtttctctccactctgcattaaagtgctaatgatttatcggttctattttgttattgattcattcatctttctttgaataacaaatagcatttagtgattctgttgaacacaatcctgtgcatggatttatggatttcaagtgaaattgctataattttagttctttggtttgaaaactcaactgaatgctgttatatcaaatagctgctctcaagcaatgtgctataatggaagattacgtacaaagtgtattcttttagtgttcctggaacattggacggtaaatatcaatcaacaataagcttaattactttaaaaataaaagcttttgaataaaattaagacataatttagcattcccaggaaaattatgattacaattgcaaatttagtacagcaatcacttgcgctggtataaaataaaaaagttgtttggcagaagagtaatccagaccaaaagaaagaaagaaatctcaaaacagtaacaagtacattactgacataatgttacgtaacacacacattgattttttgtatctatggttgcaggtaataaatattttcacatgaattgacaaaattttctacaatgggcaggcaggctttgtgtcaaaaacatattttgaagccacaaattattttatgttcgctacaacatacaattatgtcttggctaccttttatagtatatagtttgaaggcagcaacagtttgtgaatcattcttaacaatctgtacagtagaaagctgttggatagacagtgggatgagacaaattaaacaacctgcttataagatttcaatgattgaaataatgggatgcagcttcacttcagtgtagctgtataactacaattagtgctaatagtggttacattttcagtcagatggattctttggtacccataataaatgttcaaataggaatccaatttgacttttctcaactcattttctaaatacactgatgtacttgccccttcaagtatactgcccctggggtttggaaagtagtttttaaaaacgtaacttgatgggtttgaaatcagagaagatattctcatcagttttatgacagcttcatatgaaaaatatatagtttaaggaaaattctatagtatattaaaatattgaatgatgaatgttgttagctttacaagatggaaacttctcttctatgtgtgcagataaattttcagctattgagtcgccctcttttaatataggagacataaagttttaagtggctgaaactcttaaatgtaaattaatgctggacttaacagcagtcagaaacaaagagggaaaagagacatgcactctgctaaacattgctaggcactgagttgatgagattccagagagacatttcagagtaaaccttgatatccacgcttctaagagataggaagggaggtatctacatagaaccagaaagtttaaaagacgtaaatttattttttccacttccttgtgtacaccatgtatttcatgtgaaaatgctgatcaatttattgtggtggaaggagatatcttgcaggaagtttaaaaattaacattttaaaacagtttttattttatttaaaacaggttcatgtgatcatagccagaataaaacaaaaggctcagatgtttagcctagtctactgcagacagaaatttaaatccagtgagggctaatgaatcacatacgtgtttccacattttattttgttttcgttttttaggcatatgggaagtagttgcaatttttcagggaagaatatgttttgaatctcacactgtattctccttgaatctcacactgtattcttgaatgagacaagattttgagatcattcttttcctttttgtgtcaacgttagtttgttgttcattggttataaaaaggaaaatgtggccaggcgcaatggcttacgcctgtaatcccagcactttgggagacagaggcaggcagatcacaaggtcaggagttcaagaccagcctggccaatatggtgaaacctcgtctctactaaaaatacaaaaattagccaggcatggtggcacatgcctgtaatcccagctactcgggaggctgaggcagaagaattgcttgaactcgggaggctgcggttgcagtgagccaagatcacaccactgcactccagcctgggtgacagagccagactctgtctcaaaaaaaaaaaggaaaatgtacttttcatggcacgtataacccccaaaggattattcaatactgaacaattaaataataattgaataatattgaatcatgttctccgttatttttcaaataactgaataatatctctattaaaagattaaacccttgtaacatatattaaagctgtaaactttaagaaaataaataaataaaaccctgtaaaagagcttttattttgtgagaggcagaaatcaccacttaaaactcccaattaaattctgctatatttaaataaagtttgagtaaactcacatttgagagattctgtataaccttattgtgtttaaaaacatggaacttaattatagtaccttaattattttctcagaaatgatatatacaatatcctgttttttgaaataaaaacgttaaccactca

SEQ ID NO: 126618 - DNA, 5595 bp, Homo sapiens
  Payload ID: 4827
  Gene Symbol: DGKB
  Gene Name: diacylglycerol kinase, beta 90kDa
  ENST ID: ENST00000402815
  CDS Start-End: 287-2698
ggaaaggatcctgagaactggctagtcccagttcctctccggaaaagcagtggctctcgcttcagagatgcgctcagctttcgcctgcatcacactgcattctttaacacattattgaaattacaagcatccaaagcagtttcatgtggacagattgcatattttgaaagcctgaggtattttatcatgaaacatgccatgtggaatctttgaagcatagacctctgcgcaacacctgaataaagaatcttttacctggtatgtgacagagcttctcaccaccaccatgacaaaccaggaaaaatgggcccacctcagcccttcggaattttcccaacttcagaaatatgctgagtattctacaaagaaattaaaggatgttcttgaagaattccatggtaatggtgtgcttgcaaagtataatcctgaagggaaacaagacattcttaaccaaacaatagattttgaaggtttcaaactattcatgaagacattcctggaagccgagcttcctgatgatttcactgcacaccttttcatgtcatttagcaacaagtttcctcattctagtccaatggtaaaaagtaagcctgctctcctatcaggcggtctgagaatgaataaaggtgccatcacccctccccggactacttctcctgcaaatacgtgttccccagaagtaatccatctgaaggacattgtctgttacctgtctctgcttgaaagaggaagacctgaggataagcttgagtttatgtttcgcctttatgacacggatgggaatggcttcctggacagctcggagctagaaaatatcatcagtcagatgatgcatgttgcagaataccttgagtgggatgtcactgaacttaatccaatcctccatgaaatgatggaagaaattgactatgatcatgatggaaccgtgtctctggaggaatggattcaaggaggaatgacaacgattccacttcttgtgctcctgggcttagaaaataacgtgaaggatgatggacagcacgtgtggcgactgaagcactttaacaaacctgcctattgcaacctttgcctgaacatgctgattggcgtggggaagcagggcctctgctgttccttctgcaagtacacagtccatgagcgctgtgtggctcgagcacctccctcttgcatcaagacctatgtgaagtccaaaaggaacactgatgtcatgcaccattactgggttgaaggtaactgcccaaccaagtgtgataagtgccacaaaactgttaaatgttaccagggcctgacaggactgcattgtgtttggtgtcagatcacactgcataataaatgtgcttctcatctaaaacctgaatgtgactgtggacctttgaaggaccatattttaccacccacaacaatctgtccagtggtactgactctgcccacttcaggagtttcagttcctgaggaaagacaatcaacagtgaaaaaggaaaagagtggttcccagcagccaaacaaagtgattgacaagaataaaatgcaaagagccaactctgttactgtagatggacaaggcctgcaggtcactcctgtgcctggtactcacccacttttagtttttgtgaaccccaaaagtggtggaaaacaaggagaacgaatttacagaaaattccagtatctattaaatcctcgtcaggtttacagtctttctggaaatggaccaatgccagggttaaactttttccgtgatgttcctgacttcagagtgttagcctgtggtggagatggaaccgtgggctgggttttggattgcatagaaaaggccaatgtaggcaagcatcctccagttgcgattctgcctcttgggactggcaatgatctagcaagatgcctgcgatggggaggaggttacgaaggtgagaatctgatgaaaattctaaaagacattgaaaacagcacagaaatcatgttggacaggtggaagtttgaagtcatacctaatgacaaagatgagaaaggagacccagtgccttacagtatcatcaataattacttttccattggcgtggatgcctccattgcacacagattccacatcatgagagaaaaacacccagagaaattcaacagtagaatgaagaacaaattttggtattttgagtttggcacatctgaaactttctcagccacctgcaagaagctacatgaatctgtagaaatagaatgtgatggagtacagatagatttaataaacatctctctggaaggaattgctattttgaatataccaagcatgcatggaggatccaatctttggggagagtctaagaaaagacgaagccatcgacgaatagagaaaaaagggtctgacaaaaggaccaccgtcacagatgccaaagagttgaagtttgcaagtcaagatctcagtgaccagctgctggaggtggtcggcttggaaggagccatggagatggggcaaatatacacaggcctgaaaagtgctggccggcggctggctcagtgctcctgcgtggtcatcaggacgagcaagtctctgccaatgcaaattgatggggagccatggatgcagaccccatgcacaataaaaattacacacaagaaccaagccccaatgctgatgggcccgcctccaaaaaccggtttattctgctccctcgtcaaaaggacaagaaaccgaagcaaggaataatcctgtgttgtttcactcttagaaattgaattagcataattgggccatggaacacatatgctggaaatctttgaaccatttcaagtctcctgctcatgcaaaatcatggaagtggtttaacagtttttgttactaagctaatgtaaaattcagctattagaaaatttattgtctcagtttttataggcatctttgcatgaagaaagcagaagtttacctgaagtgatactgcatatttttggtgcatgcattcccatagatttttacatctcccacccaactcttccccaatttccttttactaacctgtgagaaaaacccgtgaaacatgaaaaaggaaataccatgggaaacgtgattctcagtgtgattccaattattacgaagcactaatcagtaacgctacaatgatcataattgcagattgctatacgtttcccttttagaatcagtgtatcagtgacctatgacttgaggagaaacttttaattcgaagattttattaaatagttgactacaataccttgctatatatacatagtttttcttcaacatcttaactcttctgagtggaaataaaaatatcaggcataaggttttctcatgctgaaaaatagaacgcggtttttattttgcttagttttctttttaattccagaaataagtgaaaacatgttacttgacagtcaagtgtggtaatatggcaagccttgttcctttctgcatgagaatctaggagagaattcataaccacaccaataacgaaatagaagttttaaactatgtgcctaatcaatgtgtttcccaccaaagattcagaaaacaatgcttgagagaaatgggttaatgcataattaattaagcattgtggagcaaatttagggttcctgtgattaattttgtgatgactaaaatgctggaaagcgagtgagttgcccattaattatgattaaaattctcacctttcacagacagacaataagccagacaacacaatcaaagctcaatagatgatttcttgcttttttcagtcatttataaatataggtgtaatttttcatggatcagttaagtacacttgaaggaagtaaatgattgtatcagtttatttctagtataaatgggtacctgtaataatactgagctcttggaagcgaatcatgcatgcaattagctccctcctcctcacctactccactcccatctttatgacatttcaaatgtttatttggaaacaacagcctagatcactgttgaaggtgttcatggcatagttggagtctctgactgtttaaagaaatcacagaacagtacttttcttttagtgtttcattaagcctatgatgtaaaatgaaatgcttctgagcagtcttgtaatattgttcattcatattgacctgcatctcatcattgcatgttttatgttttcaaacatgccataaggaaaacgagtgcctgaactgcatgatttattagtttctctccactctgcattaaagtgctaatgatttatcggttctattttgttattgattcattcatctttctttgaataacaaatagcatttagtgattctgttgaacacaatcctgtgcatggatttatggatttcaagtgaaattgctataattttagttctttggtttgaaaactcaactgaatgctgttatatcaaatagctgctctcaagcaatgtgctataatggaagattacgtacaaagtgtattcttttagtgttcctggaacattggacggtaaatatcaatcaacaataagcttaattactttaaaaataaaagcttttgaataaaattaagacataatttagcattcccaggaaaattatgattacaattgcaaatttagtacagcaatcacttgcgctggtataaaataaaaaagttgtttggcagaagagtaatccagaccaaaagaaagaaagaaatctcaaaacagtaacaagtacattactgacataatgttacgtaacacacacattgattttttgtatctatggttgcaggtaataaatattttcacatgaattgacaaaattttctacaatgggcaggcaggctttgtgtcaaaaacatattttgaagccacaaattattttatgttcgctacaacatacaattatgtcttggctaccttttatagtatatagtttgaaggcagcaacagtttgtgaatcattcttaacaatctgtacagtagaaagctgttggatagacagtgggatgagacaaattaaacaacctgcttataagatttcaatgattgaaataatgggatgcagcttcacttcagtgtagctgtataactacaattagtgctaatagtggttacattttcagtcagatggattctttggtacccataataaatgttcaaataggaatccaatttgacttttctcaactcattttctaaatacactgatgtacttgccccttcaagtatactgcccctggggtttggaaagtagtttttaaaaacgtaacttgatgggtttgaaatcagagaagatattctcatcagttttatgacagcttcatatgaaaaatatatagtttaaggaaaattctatagtatattaaaatattgaatgatgaatgttgttagctttacaagatggaaacttctcttctatgtgtgcagataaattttcagctattgagtcgccctcttttaatataggagacataaagttttaagtggctgaaactcttaaatgtaaattaatgctggacttaacagcagtcagaaacaaagagggaaaagagacatgcactctgctaaacattgctaggcactgagttgatgagattccagagagacatttcagagtaaaccttgatatccacgcttctaagagataggaagggaggtatc

SEQ ID NO: 126619 - DNA, 3651 bp, Homo sapiens
  Payload ID: 4827
  Gene Symbol: DGKB
  Gene Name: diacylglycerol kinase, beta 90kDa
  ENST ID: ENST00000407950
  CDS Start-End: 439-2829
atctttcagacactagttccaatgggccgggtgttctggaagggggtggcagtggggaggaggatgctgtgagcagagttcttgaagctccactcctctggggaagccgagctgtgtgggagccttcttactgtgccgggagcgtgtgaattggaaaggatcctgagaactggctagtcccagttcctctccggaaaagcagtggctctcgcttcagagatgcgctcagctttcgcctgcatcacactgcattctttaacacattattgaaattacaagcatccaaagcagtttcatgtggacagattgcatattttgaaagcctgaggtattttatcatgaaacatgccatgtggaatctttgaagcatagacctctgcgcaacacctgaataaagaatcttttacctggtatgtgacagagcttctcaccaccaccatgacaaaccaggaaaaatgggcccacctcagcccttcggaattttcccaacttcagaaatatgctgagtattctacaaagaaattaaaggatgttcttgaagaattccatggtaatggtgtgcttgcaaagtataatcctgaagggacaatagattttgaaggtttcaaactattcatgaagacattcctggaagccgagcttcctgatgatttcactgcacaccttttcatgtcatttagcaacaagtttcctcattctagtccaatggtaaaaagtaagcctgctctcctatcaggcggtctgagaatgaataaaggtgccatcacccctccccggactacttctcctgcaaatacgtgttccccagaagtaatccatctgaaggacattgtctgttacctgtctctgcttgaaagaggaagacctgaggataagcttgagtttatgtttcgcctttatgacacggatgggaatggcttcctggacagctcggagctagaaaatatcatcagtcagatgatgcatgttgcagaataccttgagtgggatgtcactgaacttaatccaatcctccatgaaatgatggaagaaattgactatgatcatgatggaaccgtgtctctggaggaatggattcaaggaggaatgacaacgattccacttcttgtgctcctgggcttagaaaataacgtgaaggatgatggacagcacgtgtggcgactgaagcactttaacaaacctgcctattgcaacctttgcctgaacatgctgattggcgtggggaagcagggcctctgctgttccttctgcaagtacacagtccatgagcgctgtgtggctcgagcacctccctcttgcatcaagacctatgtgaagtccaaaaggaacactgatgtcatgcaccattactgggttgaaggtaactgcccaaccaagtgtgataagtgccacaaaactgttaaatgttaccagggcctgacaggactgcattgtgtttggtgtcagatcacactgcataataaatgtgcttctcatctaaaacctgaatgtgactgtggacctttgaaggaccatattttaccacccacaacaatctgtccagtggtactgactctgcccacttcaggagtttcagttcctgaggaaagacaatcaacagtgaaaaaggaaaagagtggttcccagcagccaaacaaagtgattgacaagaataaaatgcaaagagccaactctgttactgtagatggacaaggcctgcaggtcactcctgtgcctggtactcacccacttttagtttttgtgaaccccaaaagtggtggaaaacaaggagaacgaatttacagaaaattccagtatctattaaatcctcgtcaggtttacagtctttctggaaatggaccaatgccagggttaaactttttccgtgatgttcctgacttcagagtgttagcctgtggtggagatggaaccgtgggctgggttttggattgcatagaaaaggccaatgtaggcaagcatcctccagttgcgattctgcctcttgggactggcaatgatctagcaagatgcctgcgatggggaggaggttacgaaggtgagaatctgatgaaaattctaaaagacattgaaaacagcacagaaatcatgttggacaggtggaagtttgaagtcatacctaatgacaaagatgagaaaggagacccagtgccttacagtatcatcaataattacttttccattggcgtggatgcctccattgcacacagattccacatcatgagagaaaaacacccagagaaattcaacagtagaatgaagaacaaattttggtattttgagtttggcacatctgaaactttctcagccacctgcaagaagctacatgaatctgtagaaatagaatgtgatggagtacagatagatttaataaacatctctctggaaggaattgctattttgaatataccaagcatgcatggaggatccaatctttggggagagtctaagaaaagacgaagccatcgacgaatagagaaaaaagggtctgacaaaaggaccaccgtcacagatgccaaagagttgaagtttgcaagtcaagatctcagtgaccagctgctggaggtggtcggcttggaaggagccatggagatggggcaaatatacacaggcctgaaaagtgctggccggcggctggctcagtgctcctgcgtggtcatcaggacgagcaagtctctgccaatgcaaattgatggggagccatggatgcagaccccatgcacaataaaaattacacacaagaaccaagccccaatgctgatgggcccgcctccaaaaaccggtttattctgctccctcgtcaaaaggacaagaaaccgaagcaaggaataatcctgtgttgtttcactcttagaaattgaattagcataattgggccatggaacacatatgctggaaatctttgaaccatttcaagtctcctgctcatgcaaaatcatggaagtggtttaacagtttttgttactaagctaatgtaaaattcagctattagaaaatttattgtctcagtttttataggcatctttgcatgaagaaagcagaagtttacctgaagtgatactgcatatttttggtgcatgcattcccatagatttttacatctcccacccaactcttccccaatttccttttactaacctgtgagaaaaacccgtgaaacatgaaaaaggaaataccatgggaaacgtgattctcagtgtgattccaattattacgaagcactaatcagtaacgctacaatgatcataattgcagattgctatacgtttcccttttagaatcagtgtatcagtgacctatgacttgaggagaaacttttaattcgaagattttattaaatagttgactacaataccttgctatatatacatagtttttcttcaacatcttaactcttctgagtggaaataaaaatatcaggcataaggttttctcatgctgaaaaatagaacgcggtttttattttgcttagttttctttttaattccagaaataagtgaaaacatgttacttgacagtcaagtgtggtaatatggcaagccttgttcctttctgcatgagaatctaggagagaattcataaccacaccaataacgaaatagaagttttaaactatgtgcctaatcaatgtgtttcccaccaaagattcagaaa

SEQ ID NO: 126620 - DNA, 6917 bp, Homo sapiens
  Payload ID: 4827
  Gene Symbol: DGKB
  Gene Name: diacylglycerol kinase, beta 90kDa
  Uniprot ID: Q9Y6T7
  ENST ID: ENST00000403951
  CDS Start-End: 421-2835
attttcccctgagctccatcagcaagagtagcaatagcagctggagaagcggcagccagagataggcagggctggtgcttgcagccgcgcaaatcgcctcctcctcaacacacacacacacacacacacacacacacacacacacacactgcacagacttccaatatcaacgcgtcttgacataaatcaaggactaagagagactgaagaagagcgttagtcatggacaacagttctttaacacattattgaaattacaagcatccaaagcagtttcatgtggacagattgcatattttgaaagcctgaggtattttatcatgaaacatgccatgtggaatctttgaagcatagacctctgcgcaacacctgaataaagaatcttttacctggtatgtgacagagcttctcaccaccaccatgacaaaccaggaaaaatgggcccacctcagcccttcggaattttcccaacttcagaaatatgctgagtattctacaaagaaattaaaggatgttcttgaagaattccatggtaatggtgtgcttgcaaagtataatcctgaagggaaacaagacattcttaaccaaacaatagattttgaaggtttcaaactattcatgaagacattcctggaagccgagcttcctgatgatttcactgcacaccttttcatgtcatttagcaacaagtttcctcattctagtccaatggtaaaaagtaagcctgctctcctatcaggcggtctgagaatgaataaaggtgccatcacccctccccggactacttctcctgcaaatacgtgttccccagaagtaatccatctgaaggacattgtctgttacctgtctctgcttgaaagaggaagacctgaggataagcttgagtttatgtttcgcctttatgacacggatgggaatggcttcctggacagctcggagctagaaaatatcatcagtcagatgatgcatgttgcagaataccttgagtgggatgtcactgaacttaatccaatcctccatgaaatgatggaagaaattgactatgatcatgatggaaccgtgtctctggaggaatggattcaaggaggaatgacaacgattccacttcttgtgctcctgggcttagaaaataacgtgaaggatgatggacagcacgtgtggcgactgaagcactttaacaaacctgcctattgcaacctttgcctgaacatgctgattggcgtggggaagcagggcctctgctgttccttctgcaagtacacagtccatgagcgctgtgtggctcgagcacctccctcttgcatcaagacctatgtgaagtccaaaaggaacactgatgtcatgcaccattactgggttgaaggtaactgcccaaccaagtgtgataagtgccacaaaactgttaaatgttaccagggcctgacaggactgcattgtgtttggtgtcagatcacactgcataataaatgtgcttctcatctaaaacctgaatgtgactgtggacctttgaaggaccatattttaccacccacaacaatctgtccagtggtactgcagactctgcccacttcaggagtttcagttcctgaggaaagacaatcaacagtgaaaaaggaaaagagtggttcccagcagccaaacaaagtgattgacaagaataaaatgcaaagagccaactctgttactgtagatggacaaggcctgcaggtcactcctgtgcctggtactcacccacttttagtttttgtgaaccccaaaagtggtggaaaacaaggagaacgaatttacagaaaattccagtatctattaaatcctcgtcaggtttacagtctttctggaaatggaccaatgccagggttaaactttttccgtgatgttcctgacttcagagtgttagcctgtggtggagatggaaccgtgggctgggttttggattgcatagaaaaggccaatgtaggcaagcatcctccagttgcgattctgcctcttgggactggcaatgatctagcaagatgcctgcgatggggaggaggttacgaaggtgagaatctgatgaaaattctaaaagacattgaaaacagcacagaaatcatgttggacaggtggaagtttgaagtcatacctaatgacaaagatgagaaaggagacccagtgccttacagtatcatcaataattacttttccattggcgtggatgcctccattgcacacagattccacatcatgagagaaaaacacccagagaaattcaacagtagaatgaagaacaaattttggtattttgagtttggcacatctgaaactttctcagccacctgcaagaagctacatgaatctgtagaaatagaatgtgatggagtacagatagatttaataaacatctctctggaaggaattgctattttgaatataccaagcatgcatggaggatccaatctttggggagagtctaagaaaagacgaagccatcgacgaatagagaaaaaagggtctgacaaaaggaccaccgtcacagatgccaaagagttgaagtttgcaagtcaagatctcagtgaccagctgctggaggtggtcggcttggaaggagccatggagatggggcaaatatacacaggcctgaaaagtgctggccggcggctggctcagtgctcctgcgtggtcatcaggacgagcaagtctctgccaatgcaaattgatggggagccatggatgcagaccccatgcacaataaaaattacacacaagaaccaagccccaatgctgatgggcccgcctccaaaaaccggtttattctgctccctcgtcaaaaggacaagaaaccgaagcaaggaataatcctgtgttgtttcactcttagaaattgaattagcataattgggccatggaacacatatgctggaaatctttgaaccatttcaagtctcctgctcatgcaaaatcatggaagtggtttaacagtttttgttactaagctaatgtaaaattcagctattagaaaatttattgtctcagtttttataggcatctttgcatgaagaaagcagaagtttacctgaagtgatactgcatatttttggtgcatgcattcccatagatttttacatctcccacccaactcttccccaatttccttttactaacctgtgagaaaaacccgtgaaacatgaaaaaggaaataccatgggaaacgtgattctcagtgtgattccaattattacgaagcactaatcagtaacgctacaatgatcataattgcagattgctatacgtttcccttttagaatcagtgtatcagtgacctatgacttgaggagaaacttttaattcgaagattttattaaatagttgactacaataccttgctatatatacatagtttttcttcaacatcttaactcttctgagtggaaataaaaatatcaggcataaggttttctcatgctgaaaaatagaacgcggtttttattttgcttagttttctttttaattccagaaataagtgaaaacatgttacttgacagtcaagtgtggtaatatggcaagccttgttcctttctgcatgagaatctaggagagaattcataaccacaccaataacgaaatagaagttttaaactatgtgcctaatcaatgtgtttcccaccaaagattcagaaaacaatgcttgagagaaatgggttaatgcataattaattaagcattgtggagcaaatttagggttcctgtgattaattttgtgatgactaaaatgctggaaagcgagtgagttgcccattaattatgattaaaattctcacctttcacagacagacaataagccagacaacacaatcaaagctcaatagatgatttcttgcttttttcagtcatttataaatataggtgtaatttttcatggatcagttaagtacacttgaaggaagtaaatgattgtatcagtttatttctagtataaatgggtacctgtaataatactgagctcttggaagcgaatcatgcatgcaattagctccctcctcctcacctactccactcccatctttatgacatttcaaatgtttatttggaaacaacagcctagatcactgttgaaggtgttcatggcatagttggagtctctgactgtttaaagaaatcacagaacagtacttttcttttagtgtttcattaagcctatgatgtaaaatgaaatgcttctgagcagtcttgtaatattgttcattcatattgacctgcatctcatcattgcatgttttatgttttcaaacatgccataaggaaaacgagtgcctgaactgcatgatttattagtttctctccactctgcattaaagtgctaatgatttatcggttctattttgttattgattcattcatctttctttgaataacaaatagcatttagtgattctgttgaacacaatcctgtgcatggatttatggatttcaagtgaaattgctataattttagttctttggtttgaaaactcaactgaatgctgttatatcaaatagctgctctcaagcaatgtgctataatggaagattacgtacaaagtgtattcttttagtgttcctggaacattggacggtaaatatcaatcaacaataagcttaattactttaaaaataaaagcttttgaataaaattaagacataatttagcattcccaggaaaattatgattacaattgcaaatttagtacagcaatcacttgcgctggtataaaataaaaaagttgtttggcagaagagtaatccagaccaaaagaaagaaagaaatctcaaaacagtaacaagtacattactgacataatgttacgtaacacacacattgattttttgtatctatggttgcaggtaataaatattttcacatgaattgacaaaattttctacaatgggcaggcaggctttgtgtcaaaaacatattttgaagccacaaattattttatgttcgctacaacatacaattatgtcttggctaccttttatagtatatagtttgaaggcagcaacagtttgtgaatcattcttaacaatctgtacagtagaaagctgttggatagacagtgggatgagacaaattaaacaacctgcttataagatttcaatgattgaaataatgggatgcagcttcacttcagtgtagctgtataactacaattagtgctaatagtggttacattttcagtcagatggattctttggtacccataataaatgttcaaataggaatccaatttgacttttctcaactcattttctaaatacactgatgtacttgccccttcaagtatactgcccctggggtttggaaagtagtttttaaaaacgtaacttgatgggtttgaaatcagagaagatattctcatcagttttatgacagcttcatatgaaaaatatatagtttaaggaaaattctatagtatattaaaatattgaatgatgaatgttgttagctttacaagatggaaacttctcttctatgtgtgcagataaattttcagctattgagtcgccctcttttaatataggagacataaagttttaagtggctgaaactcttaaatgtaaattaatgctggacttaacagcagtcagaaacaaagagggaaaagagacatgcactctgctaaacattgctaggcactgagttgatgagattccagagagacatttcagagtaaaccttgatatccacgcttctaagagataggaagggaggtatctacatagaaccagaaagtttaaaagacgtaaatttattttttccacttccttgtgtacaccatgtatttcatgtgaaaatgctgatcaatttattgtggtggaaggagatatcttgcaggaagtttaaaaattaacattttaaaacagtttttattttatttaaaacaggttcatgtgatcatagccagaataaaacaaaaggctcagatgtttagcctagtctactgcagacagaaatttaaatccagtgagggctaatgaatcacatacgtgtttccacattttattttgttttcgttttttaggcatatgggaagtagttgcaatttttcagggaagaatatgttttgaatctcacactgtattctccttgaatctcacactgtattcttgaatgagacaagattttgagatcattcttttcctttttgtgtcaacgttagtttgttgttcattggttataaaaaggaaaatgtggccaggcgcaatggcttacgcctgtaatcccagcactttgggagacagaggcaggcagatcacaaggtcaggagttcaagaccagcctggccaatatggtgaaacctcgtctctactaaaaatacaaaaattagccaggcatggtggcacatgcctgtaatcccagctactcgggaggctgaggcagaagaattgcttgaactcgggaggctgcggttgcagtgagccaagatcacaccactgcactccagcctgggtgacagagccagactctgtctcaaaaaaaaaaaggaaaatgtacttttcatggcacgtataacccccaaaggattattcaatactgaacaattaaataataattgaataatattgaatcatgttctccgttatttttcaaataactgaataatatctctattaaaagattaaacccttgtaacatatattaaagctgtaaactttaagaaaataaataaataaaaccctgtaaaagagcttttattttgtgagaggcagaaatcaccacttaaaactcccaattaaattctgctatatttaaataaagtttgagtaaactcacatttgagagattctgtataaccttattgtgtttaaaaacatggaacttaattatagtaccttaattattttctcagaaatgatatatacaatatcctgttttttgaaataaaaacgttaaccactca

SEQ ID NO: 126621 - DNA, 3257 bp, Homo sapiens
  Payload ID: 4827
  Gene Symbol: DGKB
  Gene Name: diacylglycerol kinase, beta 90kDa
  Uniprot ID: Q9Y6T7
  ENST ID: ENST00000406247
  CDS Start-End: 85-2406
ggaatctttgaagcatagacctctgcgcaacacctgaataaagaatcttttacctggtatgtgacagagcttctcaccaccaccatgacaaaccaggaaaaatgggcccacctcagcccttcggaattttcccaacttcagaaatatgctgagtattctacaaagaaattaaaggatgttcttgaagaattccatggtaatggtgtgcttgcaaagtataatcctgaagggaaacaagacattcttaaccaaacaatagattttgaaggtttcaaactattcatgaagacattcctggaagccgagcttcctgatgatttcactgcacaccttttcatgtcatttagcaacaagtttcctcattctagtccaatggtaaaaagtaagcctgctctcctatcaggcggtctgagaatgaataaaggtgccatcacccctccccggactacttctcctgcaaatacgtgttccccagaagtaatccatctgaaggacattgtctgttacctgtctctgcttgaaagaggaagacctgaggataagcttgagtttatgtttcgcctttatgacacggatgggaatggcttcctggacagctcggagctagaaaatatcatcagtcagatgatgcatgttgcagaataccttgagtgggatgtcactgaacttaatccaatcctccatgaaatgatggaagaaattgactatgatcatgatggaaccgtgtctctggaggaatggattcaaggaggaatgacaacgattccacttcttgtgctcctgggcttagaaaataacgtgaaggatgatggacagcacgtgtggcgactgaagcactttaacaaacctgcctattgcaacctttgcctgaacatgctgattggcgtggggaagcagggcctctgctgttccttctgcaagtacacagtccatgagcgctgtgtggctcgagcacctccctcttgcatcaagacctatgtgaagtccaaaaggaacactgatgtcatgcaccattactgggttgaaggtaactgcccaaccaagtgtgataagtgccacaaaactgttaaatgttaccagggcctgacaggactgcattgtgtttggtgtcagatcacactgcataataaatgtgcttctcatctaaaacctgaatgtgactgtggacctttgaaggaccatattttaccacccacaacaatctgtccagtggtactgcagactctgcccacttcaggagtttcagttcctgaggaaagacaatcaacagtgaaaaaggaaaagagtggttcccagcagccaaacaaagtgattgacaagaataaaatgcaaagagccaactctgttactgtagatggacaaggcctgcaggtcactcctgtgcctggtactcacccacttttagtttttgtgaaccccaaaagtggtggaaaacaaggagaacgaatttacagaaaattccagtatctattaaatcctcgtcaggtttacagtctttctggaaatggaccaatgccagggttaaactttttccgtgatgttcctgacttcagagtgttagcctgtggtggagatggaaccgtgggctgggttttggattgcatagaaaaggccaatgtaggcaagcatcctccagttgcgattctgcctcttgggactggcaatgatctagcaagatgcctgcgatggggaggaggttacgaaggtgagaatctgatgaaaattctaaaagacattgaaaacagcacagaaatcatgttggacaggtggaagtttgaagtcatacctaatgacaaagatgagaaaggagacccagtgccttacagtatcatcaataattacttttccattggcgtggatgcctccattgcacacagattccacatcatgagagaaaaacacccagagaaattcaacagtagaatgaagaacaaattttggtattttgagtttggcacatctgaaactttctcagccacctgcaagaagctacatgaatctgtagaaatagaatgtgatggagtacagatagatttaataaacatctctctggaaggaattgctattttgaatataccaagcatgcatggaggatccaatctttggggagagtctaagaaaagacgaagccatcgacgaatagagaaaaaagggtctgacaaaaggaccaccgtcacagatgccaaagagttgaagtttgcaagtcaagatctcagtgaccagctgctggaggtggtcggcttggaaggagccatggagatggggcaaatatacacaggcctgaaaagtgctggccggcggctggctcagtgctcctgcgtggtcatcaggacgagcaagtctctgccaatgcaaattgatggggagccatggatgcagaccccatgcacagtgagtacagagtagttgatatgctatgtcaatctcagttttgctttcctctttgactaaataaccacaataactgatttttttctttatttcttttcaacctatcagcaaatagtctttttgttgttgttgttatgtgtgtgtcagagccactacatttaggttgtagacattatatacccttggcaatgatttagctcttgaatgtttgtgttagcctaagtataaatagatcttttaaatagatcaattataaaccatagatcaattataaactatggagctaaacaaaatattaataaaagtttatctgaaacttttttgtttatttcagagcacattattagaatattatttgcaagaaatgcagacctaagcttatatgtgaacttatttctcagcttttctatgcctccatttggggatttgagggctttcttctccataagaaaaaaatttctctccagtttctaccataattaattgtgttttccagaatgaggtattatttaaggcagacactgcccctctcaaaaaaaaatcagttttcatttgcatagtgaatattttattgcatttcaaaaacatgctaggaactgcttttggcactgggagtagacacatgaacaagaccaacagtgtaatttccttcaagttacttacattcctataatagaggaccgaataaataaacaactacatgataaatataacttcagactgtgagagttattaaaaaataaggtgaaatgatgataagaagctggattaggtgtggagaataaatactacttgagataagggagacctctttgaaaggacatagccaaaagcttagtataaaattaaaaaaaataaaaaaaaaa

SEQ ID NO: 126622 - DNA, 494 bp, Homo sapiens
  Payload ID: 4827
  Gene Symbol: DGKB
  Gene Name: diacylglycerol kinase, beta 90kDa
  ENST ID: ENST00000437998
  CDS Start-End: 270-494
acataaattagtaccttactggctagggaatgttgaatcacagttggatgaagaaacaattcatgttaatgtttctctaaagttctttaacacattattgaaattacaagcatccaaagcagtttcatgtggacagattgcatattttgaaagcctgaggtattttatcatgaaacatgccatgtggaatctttgaagcatagacctctgcgcaacacctgaataaagaatcttttacctggtatgtgacagagcttctcaccaccaccatgacaaaccaggaaaaatgggcccacctcagcccttcggaattttcccaacttcagaaatatgctgagtattctacaaagaaattaaaggatgttcttgaagaattccatggtaatggtgtgcttgcaaagtataatcctgaagggaaacaagacattcttaaccaaacaatagattttgaaggtttcaaactattcatgaagacattcctggaagccgagctt

SEQ ID NO: 126623 - DNA, 6297 bp, Homo sapiens
  Payload ID: 4828
  Gene Symbol: DGKD
  Gene Name: diacylglycerol kinase, delta 130kDa
  Uniprot ID: Q16760
  ENST ID: ENST00000264057
  CDS Start-End: 13-3657
tggcccggcagcatggcggcggcggcgggcgcccctccgccgggtcccccgcaaccgcctccgccgccgccgcccgaggagtcgtccgacagcgagcccgaggcggagcccggctccccacagaagctcatccgcaaggtgtccacgtcgggtcagatccgacagaagaccatcatcaaagaggggatgctgaccaaacagaacaattcattccagcgatcaaaaaggagatactttaagcttcgagggcgaacgctttactatgccaaaacggcaaagtcaatcatatttgatgaggtggatctgacagatgccagcgtagctgaatccagtaccaaaaacgtcaacaacagttttacggtcataactccatgcaggaagctcatcttgtgtgctgataacagaaaagaaatggaagattggattgcagcattaaagactgtgcagaacagggagcactttgagcccacccagtacagcatggaccacttctcagggatgcacaattggtacgcctgttcccacgcgaggccgacctactgcaatgtgtgccgtgaggctctgtctggggtcacgtcgcacgggctgtcctgcgaggtgtgcaaatttaaggcccacaagcgctgtgctgtgcgtgcaaccaataactgcaagtggaccacactggcctcgatcgggaaggacatcattgaagatgcagatgggattgcaatgccccaccagtggttggaaggaaacctacctgtgagcgccaagtgcactgtgtgcgacaagacctgtggcagtgtgctgcgcctgcaggactggcgctgcctctggtgcaaggccatggttcacacatcgtgtaaagaatccttgctgaccaagtgcccacttggcctgtgcaaagtgtcagtcatcccacccacggctctcaacagcatcgactccgatgggttctggaaggccagctgtcctccttcttgcacaagcccactgttggtcttcgtcaattcaaaaagtggggacaaccagggtgtgaagttcctcagaagattcaaacagctactaaaccccgcccaggtcttcgacctcatgaacggaggcccacacctcggcttacggttattccagaagtttgacacattccggattctggtttgtggcggggatggaagtgttggctgggtcctctccgaaatcgacagcctcaaccttcataaacagtgtcagctgggagtgctgccgctcggcacagggaacgacttggcccgagtactgggctggggctcagcctgcgatgacgacacccagctcccccagatcttggagaagttggagagagccagcaccaagatgctggacaggtggagcgtcatggcatacgaggccaagctcccccggcaggcctcctcctctaccgtcaccgaagacttcagcgaggattccgaggtacagcagattctcttctatgaagactcggttgcagcccacctttctaaaatcctcacctcggaccagcactcggtggtcatctcctcggccaaagtgctctgtgagacggtgaaggacttcgtggcacgggtggggaaggcctatgagaagacgaccgagagctcggaggagtcagaggtcatggccaagaagtgctctgtcctgaaagagaagctggattcccttctcaagaccttggacgatgagtcccaggcctcgtcctctctgcccaacccgccccccaccattgccgaggaggctgaagatggagatgggtcgggcagcatctgcggttccaccggagaccgcttggtggcatcagcttgcccggcccggccgcagatattccggcctcgagaacagctcatgctgagagccaacagcctgaagaaagcaattcgtcagatcatagaacacacagaaaaagctgtcgatgagcagaatgcccagacccaggagcaggagggcttcgtcctgggcctctctgagtcagaggagaagatggaccacagagtgtgcccaccactgtcccacagcgagagcttcggggtccccaaggggaggagccagcgcaaagtgtcgaaatctccgtgtgaaaagctgatcagcaaagggagtctgtccctaggcagttctgcttcccttccgccccagccgggaagccgggacggcctgcctgcgctcaacaccaagatcctgtacccaaatgtccgggctggaatgtctggttccttacccggtggctcagtcatcagtcgcctgttaattaatgctgatcccttcaactctgaaccagaaaccctagagtattacacggagaaatgtgtcatgaacaactattttggcattggcctggatgcgaagatatccctggactttaacaacaagcgcgatgagcacccagagaagtgcaggagccgaaccaagaacatgatgtggtatggagttcttggaaccaaagagttgctgcacagaacctacaagaacctggagcaaaaggtcttgctggagtgtgacgggcgacccatcccactccccagtcttcagggaattgctgtccttaacattcccagctatgccggaggaaccaacttctgggggggtaccaaggaagatgatactttcgcagctccatcattcgatgacaagattctggaggtggtcgccgtgttcggcagcatgcagatggccgtctctcgagtcatcaggctacagcatcatcggatcgcccagtgtcgcacggtgaagatctccatccttggggatgagggcgtgcctgtgcaggtggacggagaggcctgggtccagccgccagggtacattcggattgtccacaagaaccgggcacagacactgaccagagacagggcatttgagagcaccctgaagtcctgggaagacaagcagaagtgcgagctgccccgccctccatcctgttccctgcacccggagatgctgtccgaggaggaggccacccagatggaccagtttgggcaggcagcaggggtcctcattcacagtatccgagaaatagctcagtctcaccgggacatggagcaggaactggcccacgccgtcaatgccagctccaagtccatggaccgtgtgtatggcaagcccagaaccacagaggggctcaactgcagcttcgtcctggaaatggtgaataacttcagagctctgcgcagtgagacggagctgctgctgtctgggaagatggccctgcagctggatccgcctcagaaggagcagctggggagtgctcttgccgagatggaccgacagctcaggaggctggcagacaccccgtggctctgccagtccgcagagcccggcgacgaagagagtgtgatgctggatcttgccaagcgcagtcgcagtggtaaattccgcctcgtgaccaagtttaaaaaggagaaaaacaacaagaacaaagaagctcacagtagcctgggagccccggttcacctctgggggacagaggaggttgctgcctggctggagcacctcagtctctgtgagtataaggacatcttcacacggcacgacatccggggctctgagctcctgcacctggagcggagggacctcaaggacctgggcgtgaccaaggtgggccacatgaagaggatcctgtgtggcatcaaggagctgagccgcagcgcccccgccgtcgaggcctagcctctgtcctctcagcctgtggcctccacatccccgccgccgaggcctagcctccgccctctcagcctgtggcctctgcgcctcctgccactgaggccctgggcagatgctgcagcccgcccccttctcatggtgctacttcctctgtcagctacagaaagcctccgtgacaccgtccaccagagctctggggtctcgaacataacaacacagctacctttgaaacaacactttctccagctcagagtcacctggggcacatgtgtcacggccactcagctctcgcccgcctgtgctgtgggccagggaatccagcggcgtctggcctcctgggcactgcttgcctggcctcgtgcttggattgtcccgggggctcctctccgtgtgtccttctgtggccgcaccgtgtggctccgcctcctggcccccagccagttctcagaaacgtggctggggcccagcacagcagcctgcaagggcccctgtttgttgatgcagcttttgttgaacaaaaatcgtgctctttcctggtttgaaagtagcatggatgtttccagtcttgttgattgtaatttgacgtgaagagaaaaaaaaattcctcctgcgtgagccaaggcagcgggtgctgtttcccaggcggggagcccctccctgggtgtcacagggcctgtgctcctccctcctccatcctctctcctcccgctcctccctccccccactgtgggctggggacgcctgcccttctgtctccggacgctctaggcgagttcagcttggggtgtgagtgagacagcttgccagctgcatccctgcagacagaggatgtgtgtccacatgagtgtttctgtgtgggaaatgcttcctggctctgggaaactttttctgcccattctgtggttcccagggagcgtggccctggtgggccaggggtggtttgacctcttcagcccgtccggtggcctggaggccggaggctctcctgagtgtctgcccctgcagtggcttcttgtcgcctgctgctgggcgtgatgtcgctggaggtgctggcagggactctgatttggtggtccgcgctgcccctgccctgcctctgtcctggctctgaactagtagatgatggtgccagagggcagggagctcgcctggggagagggctgtgccccgtagggacagtgcccaggtgaaggatgcccctggtcctccagggcactgactttgcccttttttcccgttgatagtcatggctcagaggtgcttgtaaatgtcttgggaagaggtttctgtaacccctgccctggtgtgaggaggaaatggctctggcctggctgcctggccgtggcttctctttggctcccaaagagaaggacagtgttgggagtatctgccgtggcttctctttggctcccaaagagaaggacagtgttgggagtatctgccggcgctgtccaggtcctttagtcagcgtcactccatctgatgtgcagaagctgggctgcacctgcgggggtgggcatagaccgggctgggtctgcagcagcccctggtcctgagcaggcggcagtgaacagcactggcccacctcccactcacagcccctctgtcccctctgcagtgcacccaggtgggcccctctgcgtgcctttgggtgctcccctctcgtggtcgttctggcccgaggcccttagagtatggaggctgagccaggccttgggtttccccagcacagcctcctgtcgctgcatgcgacgtgttgggatttttggatgaaagactctcccacgctctgttggtggacttagctgcctcactggaagtgatgtgggtggaaggtggttgtatgttaccttttccacctctcattgttttccccagaacattgtagatgggggttggcagagggagaaataagccagccacggcagtcgcttggtttcccaggtggaatgggctaacacaggagatgatgggaacctgtcccgcagtccctgcatgaccattggccctgctggcctggcgatgtgggcatcctggggttcttagggtcccagaacaagccccaggcaagctggaacttgggtggggaggggacatgaggaggataaacagctgactgtggcttcaaggacatcagggccaccccaagtcctcagtgtcctactcctggcaaggagttgggtttggatcaaaagtgtttaaaattaatatgttgtcagtgattagaacaacactgtttacataaaaaccatttttctaattctaacaagttagaatgtgaggaaggaatgaacatgagtgtttaggaacctgccctttggtgctgggctggcgtcccgcactggggtgtcctcgctgtctgggggctgctctgctgccccggcccaggtccccttgtggtgttgccagacgggcctcatggtctgctgtgcagagagaggcaggaaggatccctgaagagtcttggagaaaaggttctgtgccctcaggtggggcttaccccctcgtatttataatcttaatttatatagtgaccaccgtggaaacaaacgcctcttgtattgtcatgtacatagtccatacctgagtgctgtacataagttgttctgtgtataaataaaacaagcctgtttttgatcttccatc

SEQ ID NO: 126624 - DNA, 6228 bp, Homo sapiens
  Payload ID: 4828
  Gene Symbol: DGKD
  Gene Name: diacylglycerol kinase, delta 130kDa
  Uniprot ID: Q16760
  ENST ID: ENST00000409813
  CDS Start-End: 80-3592
agagacacgaatatgtttcagccgcaacaggctgcgtttcagccggaagagtgaaagggcaccttgaaaacgcaagtttatgaatatgtttctgtactttcagaccatcatcaaagaggggatgctgaccaaacagaacaattcattccagcgatcaaaaaggagatactttaagcttcgagggcgaacgctttactatgccaaaacggcaaagtcaatcatatttgatgaggtggatctgacagatgccagcgtagctgaatccagtaccaaaaacgtcaacaacagttttacggtcataactccatgcaggaagctcatcttgtgtgctgataacagaaaagaaatggaagattggattgcagcattaaagactgtgcagaacagggagcactttgagcccacccagtacagcatggaccacttctcagggatgcacaattggtacgcctgttcccacgcgaggccgacctactgcaatgtgtgccgtgaggctctgtctggggtcacgtcgcacgggctgtcctgcgaggtgtgcaaatttaaggcccacaagcgctgtgctgtgcgtgcaaccaataactgcaagtggaccacactggcctcgatcgggaaggacatcattgaagatgcagatgggattgcaatgccccaccagtggttggaaggaaacctacctgtgagcgccaagtgcactgtgtgcgacaagacctgtggcagtgtgctgcgcctgcaggactggcgctgcctctggtgcaaggccatggttcacacatcgtgtaaagaatccttgctgaccaagtgcccacttggcctgtgcaaagtgtcagtcatcccacccacggctctcaacagcatcgactccgatgggttctggaaggccagctgtcctccttcttgcacaagcccactgttggtcttcgtcaattcaaaaagtggggacaaccagggtgtgaagttcctcagaagattcaaacagctactaaaccccgcccaggtcttcgacctcatgaacggaggcccacacctcggcttacggttattccagaagtttgacacattccggattctggtttgtggcggggatggaagtgttggctgggtcctctccgaaatcgacagcctcaaccttcataaacagtgtcagctgggagtgctgccgctcggcacagggaacgacttggcccgagtactgggctggggctcagcctgcgatgacgacacccagctcccccagatcttggagaagttggagagagccagcaccaagatgctggacaggtggagcgtcatggcatacgaggccaagctcccccggcaggcctcctcctctaccgtcaccgaagacttcagcgaggattccgaggtacagcagattctcttctatgaagactcggttgcagcccacctttctaaaatcctcacctcggaccagcactcggtggtcatctcctcggccaaagtgctctgtgagacggtgaaggacttcgtggcacgggtggggaaggcctatgagaagacgaccgagagctcggaggagtcagaggtcatggccaagaagtgctctgtcctgaaagagaagctggattcccttctcaagaccttggacgatgagtcccaggcctcgtcctctctgcccaacccgccccccaccattgccgaggaggctgaagatggagatgggtcgggcagcatctgcggttccaccggagaccgcttggtggcatcagcttgcccggcccggccgcagatattccggcctcgagaacagctcatgctgagagccaacagcctgaagaaagcaattcgtcagatcatagaacacacagaaaaagctgtcgatgagcagaatgcccagacccaggagcaggagggcttcgtcctgggcctctctgagtcagaggagaagatggaccacagagtgtgcccaccactgtcccacagcgagagcttcggggtccccaaggggaggagccagcgcaaagtgtcgaaatctccgtgtgaaaagctgatcagcaaagggagtctgtccctaggcagttctgcttcccttccgccccagccgggaagccgggacggcctgcctgcgctcaacaccaagatcctgtacccaaatgtccgggctggaatgtctggttccttacccggtggctcagtcatcagtcgcctgttaattaatgctgatcccttcaactctgaaccagaaaccctagagtattacacggagaaatgtgtcatgaacaactattttggcattggcctggatgcgaagatatccctggactttaacaacaagcgcgatgagcacccagagaagtgcaggagccgaaccaagaacatgatgtggtatggagttcttggaaccaaagagttgctgcacagaacctacaagaacctggagcaaaaggtcttgctggagtgtgacgggcgacccatcccactccccagtcttcagggaattgctgtccttaacattcccagctatgccggaggaaccaacttctgggggggtaccaaggaagatgatactttcgcagctccatcattcgatgacaagattctggaggtggtcgccgtgttcggcagcatgcagatggccgtctctcgagtcatcaggctacagcatcatcggatcgcccagtgtcgcacggtgaagatctccatccttggggatgagggcgtgcctgtgcaggtggacggagaggcctgggtccagccgccagggtacattcggattgtccacaagaaccgggcacagacactgaccagagacagggcatttgagagcaccctgaagtcctgggaagacaagcagaagtgcgagctgccccgccctccatcctgttccctgcacccggagatgctgtccgaggaggaggccacccagatggaccagtttgggcaggcagcaggggtcctcattcacagtatccgagaaatagctcagtctcaccgggacatggagcaggaactggcccacgccgtcaatgccagctccaagtccatggaccgtgtgtatggcaagcccagaaccacagaggggctcaactgcagcttcgtcctggaaatggtgaataacttcagagctctgcgcagtgagacggagctgctgctgtctgggaagatggccctgcagctggatccgcctcagaaggagcagctggggagtgctcttgccgagatggaccgacagctcaggaggctggcagacaccccgtggctctgccagtccgcagagcccggcgacgaagagagtgtgatgctggatcttgccaagcgcagtcgcagtggtaaattccgcctcgtgaccaagtttaaaaaggagaaaaacaacaagaacaaagaagctcacagtagcctgggagccccggttcacctctgggggacagaggaggttgctgcctggctggagcacctcagtctctgtgagtataaggacatcttcacacggcacgacatccggggctctgagctcctgcacctggagcggagggacctcaaggacctgggcgtgaccaaggtgggccacatgaagaggatcctgtgtggcatcaaggagctgagccgcagcgcccccgccgtcgaggcctagcctctgtcctctcagcctgtggcctccacatccccgccgccgaggcctagcctccgccctctcagcctgtggcctctgcgcctcctgccactgaggccctgggcagatgctgcagcccgcccccttctcatggtgctacttcctctgtcagctacagaaagcctccgtgacaccgtccaccagagctctggggtctcgaacataacaacacagctacctttgaaacaacactttctccagctcagagtcacctggggcacatgtgtcacggccactcagctctcgcccgcctgtgctgtgggccagggaatccagcggcgtctggcctcctgggcactgcttgcctggcctcgtgcttggattgtcccgggggctcctctccgtgtgtccttctgtggccgcaccgtgtggctccgcctcctggcccccagccagttctcagaaacgtggctggggcccagcacagcagcctgcaagggcccctgtttgttgatgcagcttttgttgaacaaaaatcgtgctctttcctggtttgaaagtagcatggatgtttccagtcttgttgattgtaatttgacgtgaagagaaaaaaaaattcctcctgcgtgagccaaggcagcgggtgctgtttcccaggcggggagcccctccctgggtgtcacagggcctgtgctcctccctcctccatcctctctcctcccgctcctccctccccccactgtgggctggggacgcctgcccttctgtctccggacgctctaggcgagttcagcttggggtgtgagtgagacagcttgccagctgcatccctgcagacagaggatgtgtgtccacatgagtgtttctgtgtgggaaatgcttcctggctctgggaaactttttctgcccattctgtggttcccagggagcgtggccctggtgggccaggggtggtttgacctcttcagcccgtccggtggcctggaggccggaggctctcctgagtgtctgcccctgcagtggcttcttgtcgcctgctgctgggcgtgatgtcgctggaggtgctggcagggactctgatttggtggtccgcgctgcccctgccctgcctctgtcctggctctgaactagtagatgatggtgccagagggcagggagctcgcctggggagagggctgtgccccgtagggacagtgcccaggtgaaggatgcccctggtcctccagggcactgactttgcccttttttcccgttgatagtcatggctcagaggtgcttgtaaatgtcttgggaagaggtttctgtaacccctgccctggtgtgaggaggaaatggctctggcctggctgcctggccgtggcttctctttggctcccaaagagaaggacagtgttgggagtatctgccgtggcttctctttggctcccaaagagaaggacagtgttgggagtatctgccggcgctgtccaggtcctttagtcagcgtcactccatctgatgtgcagaagctgggctgcacctgcgggggtgggcatagaccgggctgggtctgcagcagcccctggtcctgagcaggcggcagtgaacagcactggcccacctcccactcacagcccctctgtcccctctgcagtgcacccaggtgggcccctctgcgtgcctttgggtgctcccctctcgtggtcgttctggcccgaggcccttagagtatggaggctgagccaggccttgggtttccccagcacagcctcctgtcgctgcatgcgacgtgttgggatttttggatgaaagactctcccacgctctgttggtggacttagctgcctcactggaagtgatgtgggtggaaggtggttgtatgttaccttttccacctctcattgttttccccagaacattgtagatgggggttggcagagggagaaataagccagccacggcagtcgcttggtttcccaggtggaatgggctaacacaggagatgatgggaacctgtcccgcagtccctgcatgaccattggccctgctggcctggcgatgtgggcatcctggggttcttagggtcccagaacaagccccaggcaagctggaacttgggtggggaggggacatgaggaggataaacagctgactgtggcttcaaggacatcagggccaccccaagtcctcagtgtcctactcctggcaaggagttgggtttggatcaaaagtgtttaaaattaatatgttgtcagtgattagaacaacactgtttacataaaaaccatttttctaattctaacaagttagaatgtgaggaaggaatgaacatgagtgtttaggaacctgccctttggtgctgggctggcgtcccgcactggggtgtcctcgctgtctgggggctgctctgctgccccggcccaggtccccttgtggtgttgccagacgggcctcatggtctgctgtgcagagagaggcaggaaggatccctgaagagtcttggagaaaaggttctgtgccctcaggtggggcttaccccctcgtatttataatcttaatttatatagtgaccaccgtggaaacaaacgcctcttgtattgtcatgtacatagtccatacctgagtgctgtacataagttgttctgtgtataaataaaacaagcctgtttttgatcttc

SEQ ID NO: 126625 - DNA, 5379 bp, Homo sapiens
  Payload ID: 4828
  Gene Symbol: DGKD
  Gene Name: diacylglycerol kinase, delta 130kDa
  ENST ID: ENST00000430834
  CDS Start-End: 1-1355
gaagattcaaacagctactaaaccccgcccaggtcttcgacctcatgaacggaggcccacacctcggcttacggttattccagaagtttgacacattccggattctggtttgtggcggggatggaagtgttggctgggtcctctccgaaatcgacagcctcaaccttcataaacagtgtcagctgggagtgctgccgctcggcacagggaacgacttggcccgagtactgggctggggctcagcctgcgatgacgacacccagctcccccagatcttggagaagttggagagagccagcaccaagatgctggacaggtggagcgtcatggcatacgaggccaagctcccccggcaggcctcctcctctaccgtcaccgaagacttcagcgaggattccgaggtacagcagattctcttctatgaagactcggttgcagcccacctttctaaaatcctcacctcggaccagcactcggtggtcatctcctcggccaaagtgctctgtgagacggtgaaggacttcgtggcacgggtggggaaggcctatgagaagacgaccgagagctcggaggagtcagaggtcatggccaagaagtgctctgtcctgaaagagaagctggattcccttctcaagaccttggacgatgagtcccaggcctcgtcctctctgcccaacccgccccccaccattgccgaggaggctgaagatggagatgggtcgggcagcatctgcggttccaccggagaccgcttggtggcatcagcttgcccggcccggccgcagatattccggcctcgagaacagctcatgctgagagccaacagcctgaagaaagcaattcgtcagatcatagaacacacagaaaaagctgtcgatgagcagaatgcccagacccaggagcaggagggcttcgtcctgggcctctctgagtcagaggagaagatggaccacagagtgtgcccaccactgtcccacagcgagagcttcggggtccccaaggggaggagccagcgcaaagtgtcgaaatctccgtgtgaaaagctgatcagcaaagggagtctgtccctaggcagttctgcttcccttccgccccagccgggaagccgggacggcctgcctgcgctcaacaccaagatcctgtacccaaatgtccgggctggaatgtctggttccttacccggtggctcagtcatcagtcgcctgttaattaatgctgatcccttcaactctgaaccagaaaccctagaaaggagccagacacagagcccacgaccgcatgatcccattcctgtgaactgcctagaagaggcgcctccgtggaggtggaaagtagacgagaggcgccagggatgagagtattacacggagaaatgtgtcatgaacaactattttggcattggcctggatgcgaagatatccctggactttaacaacaagcgcgatgagcacccagagaagtgcaggagccgaaccaagaacatgatgtggtatggagttcttggaaccaaagagttgctgcacagaacctacaagaacctggagcaaaaggtcttgctggagtgtgacgggcgacccatcccactccccagtcttcagggaattgctgtccttaacattcccagctatgccggaggaaccaacttctgggggggtaccaaggaagatgatactttcgcagctccatcattcgatgacaagattctggaggtggtcgccgtgttcggcagcatgcagatggccgtctctcgagtcatcaggctacagcatcatcggatcgcccagtgtcgcacggtgaagatctccatccttggggatgagggcgtgcctgtgcaggtggacggagaggcctgggtccagccgccagggtacattcggattgtccacaagaaccgggcacagacactgaccagagacagggcatttgagagcaccctgaagtcctgggaagacaagcagaagtgcgagctgccccgccctccatcctgttccctgcacccggagatgctgtccgaggaggaggccacccagatggaccagtttgggcaggcagcaggggtcctcattcacagtatccgagaaatagctcagtctcaccgggacatggagcaggaactggcccacgccgtcaatgccagctccaagtccatggaccgtgtgtatggcaagcccagaaccacagaggggctcaactgcagcttcgtcctggaaatggtgaataacttcagagctctgcgcagtgagacggagctgctgctgtctgggaagatggccctgcagctggatccgcctcagaaggagcagctggggagtgctcttgccgagatggaccgacagctcaggaggctggcagacaccccgtggctctgccagtccgcagagcccggcgacgaagagagtgtgatgctggatcttgccaagcgcagtcgcagtggtaaattccgcctcgtgaccaagtttaaaaaggagaaaaacaacaagaacaaagaagctcacagtagcctgggagccccggttcacctctgggggacagaggaggttgctgcctggctggagcacctcagtctctgtgagtataaggacatcttcacacggcacgacatccggggctctgagctcctgcacctggagcggagggacctcaaggacctgggcgtgaccaaggtgggccacatgaagaggatcctgtgtggcatcaaggagctgagccgcagcgcccccgccgtcgaggcctagcctctgtcctctcagcctgtggcctccacatccccgccgccgaggcctagcctccgccctctcagcctgtggcctctgcgcctcctgccactgaggccctgggcagatgctgcagcccgcccccttctcatggtgctacttcctctgtcagctacagaaagcctccgtgacaccgtccaccagagctctggggtctcgaacataacaacacagctacctttgaaacaacactttctccagctcagagtcacctggggcacatgtgtcacggccactcagctctcgcccgcctgtgctgtgggccagggaatccagcggcgtctggcctcctgggcactgcttgcctggcctcgtgcttggattgtcccgggggctcctctccgtgtgtccttctgtggccgcaccgtgtggctccgcctcctggcccccagccagttctcagaaacgtggctggggcccagcacagcagcctgcaagggcccctgtttgttgatgcagcttttgttgaacaaaaatcgtgctctttcctggtttgaaagtagcatggatgtttccagtcttgttgattgtaatttgacgtgaagagaaaaaaaaattcctcctgcgtgagccaaggcagcgggtgctgtttcccaggcggggagcccctccctgggtgtcacagggcctgtgctcctccctcctccatcctctctcctcccgctcctccctccccccactgtgggctggggacgcctgcccttctgtctccggacgctctaggcgagttcagcttggggtgtgagtgagacagcttgccagctgcatccctgcagacagaggatgtgtgtccacatgagtgtttctgtgtgggaaatgcttcctggctctgggaaactttttctgcccattctgtggttcccagggagcgtggccctggtgggccaggggtggtttgacctcttcagcccgtccggtggcctggaggccggaggctctcctgagtgtctgcccctgcagtggcttcttgtcgcctgctgctgggcgtgatgtcgctggaggtgctggcagggactctgatttggtggtccgcgctgcccctgccctgcctctgtcctggctctgaactagtagatgatggtgccagagggcagggagctcgcctggggagagggctgtgccccgtagggacagtgcccaggtgaaggatgcccctggtcctccagggcactgactttgcccttttttcccgttgatagtcatggctcagaggtgcttgtaaatgtcttgggaagaggtttctgtaacccctgccctggtgtgaggaggaaatggctctggcctggctgcctggccgtggcttctctttggctcccaaagagaaggacagtgttgggagtatctgccgtggcttctctttggctcccaaagagaaggacagtgttgggagtatctgccggcgctgtccaggtcctttagtcagcgtcactccatctgatgtgcagaagctgggctgcacctgcgggggtgggcatagaccgggctgggtctgcagcagcccctggtcctgagcaggcggcagtgaacagcactggcccacctcccactcacagcccctctgtcccctctgcagtgcacccaggtgggcccctctgcgtgcctttgggtgctcccctctcgtggtcgttctggcccgaggcccttagagtatggaggctgagccaggccttgggtttccccagcacagcctcctgtcgctgcatgcgacgtgttgggatttttggatgaaagactctcccacgctctgttggtggacttagctgcctcactggaagtgatgtgggtggaaggtggttgtatgttaccttttccacctctcattgttttccccagaacattgtagatgggggttggcagagggagaaataagccagccacggcagtcgcttggtttcccaggtggaatgggctaacacaggagatgatgggaacctgtcccgcagtccctgcatgaccattggccctgctggcctggcgatgtgggcatcctggggttcttagggtcccagaacaagccccaggcaagctggaacttgggtggggaggggacatgaggaggataaacagctgactgtggcttcaaggacatcagggccaccccaagtcctcagtgtcctactcctggcaaggagttgggtttggatcaaaagtgtttaaaattaatatgttgtcagtgattagaacaacactgtttacataaaaaccatttttctaattctaacaagttagaatgtgaggaaggaatgaacatgagtgtttaggaacctgccctttggtgctgggctggcgtcccgcactggggtgtcctcgctgtctgggggctgctctgctgccccggcccaggtccccttgtggtgttgccagacgggcctcatggtctgctgtgcagagagaggcaggaaggatccctgaagagtcttggagaaaaggttctgtgccctcaggtggggcttaccccctcgtatttataatcttaatttatatagtgaccaccgtggaaacaaacgcctcttgtattgtcatgtacatagtccatacctgagtgctgtacataagttgttctgtgtataaataaaacaagcctgtttttgatcttccatcgcca

SEQ ID NO: 126626 - DNA, 494 bp, Homo sapiens
  Payload ID: 4828
  Gene Symbol: DGKD
  Gene Name: diacylglycerol kinase, delta 130kDa
  ENST ID: ENST00000447484
  CDS Start-End: 1-494
agcccaagatcgcagactctcatccgccctcagaaagattgtgcgtgtgcgtgtgtgtgcgtgtgtaccatcatcaaagaggggatgctgaccaaacagaacaattcattccagcgatcaaaaaggagatactttaagcttcgagggcgaacgctttactatgccaaaacggcaaagtcaatcatatttgatgaggtggatctgacagatgccagcgtagctgaatccagtaccaaaaacgtcaacaacagttttacggtcataactccatgcaggaagctcatcttgtgtgctgataacagaaaagaaatggaagattggattgcagcattaaagactgtgcagaacagggagcactttgagcccacccagtacagcatggaccacttctcagggatgcacaattggtacgcctgttcccacgcgaggccgacctactgcaatgtgtgccgtgaggctctgtctggggtcacgtcgcacgggctgtcctgcga

SEQ ID NO: 126627 - DNA, 482 bp, Homo sapiens
  Payload ID: 4828
  Gene Symbol: DGKD
  Gene Name: diacylglycerol kinase, delta 130kDa
  ENST ID: ENST00000427930
  CDS Start-End: 12-482
ggcccggcagcatggcggcggcggcgggcgcccctccgccgggtcccccgcaaccgcctccgccgccgccgcccgaggagtcgtccgacagcgagcccgaggcggagcccggctccccacagaagctcatccgcaaggtgtccacgtcgggtcagatccgacagaaggtcataactccatgcaggaagctcatcttgtgtgctgataacagaaaagaaatggaagattggattgcagcattaaagactgtgcagaacagggagcactttgagcccacccagtacagcatggaccacttctcagggatgcacaattggtacgcctgttcccacgcgaggccgacctactgcaatgtgtgccgtgaggctctgtctggggtcacgtcgcacgggctgtcctgcgaggtgtgcaaatttaaggcccacaagcgctgtgctgtgcgtgcaaccaataactgcaagtggaccacactggcctcgatc

SEQ ID NO: 126628 - DNA, 6222 bp, Homo sapiens
  Payload ID: 4828
  Gene Symbol: DGKD
  Gene Name: diacylglycerol kinase, delta 130kDa
  ENST ID: ENST00000622717
  CDS Start-End: 80-3586
agagacacgaatatgtttcagccgcaacaggctgcgtttcagccggaagagtgaaagggcaccttgaaaacgcaagtttatgaatatgtttctgtactttcagaccatcatcaaagaggggatgctgaccaaacagaacaattcattccagcgatcaaaaaggagatactttaagcttcgagggcgaacgctttactatgccaaaacggcaaagtcaatcatatttgatgaggtggatctgacagatgccagcgtagctgaatccagtaccaaaaacgtcaacaacagttttacggtcataactccatgcaggaagctcatcttgtgtgctgataacagaaaagaaatggaagattggattgcagcattaaagactgtgcagaacagggagcactttgagcccacccagtacagcatggaccacttctcagggatgcacaattggtacgcctgttcccacgcgaggccgacctactgcaatgtgtgccgtgaggctctgtctggggtcacgtcgcacgggctgtcctgcgaggtgtgcaaatttaaggcccacaagcgctgtgctgtgcgtgcaaccaataactgcaagtggaccacactggcctcgatcgggaaggacatcattgaagatgcagatgggattgcaatgccccaccagtggttggaaggaaacctacctgtgagcgccaagtgcactgtgtgcgacaagacctgtggcagtgtgctgcgcctgcaggactggcgctgcctctggtgcaaggccatggttcacacatcgtgtaaagaatccttgctgaccaagtgcccacttggcctgtgcaaagtgtcagtcatcccacccacggctctcaacagcatcgactccgatgggttctggaaggccagctgtcctccttcttgcacaagcccactgttggtcttcgtcaattcaaaaagtggggacaaccagggtgtgaagttcctcagaagattcaaacagctactaaaccccgcccaggtcttcgacctcatgaacggaggcccacacctcggcttacggttattccagaagtttgacacattccggattctggtttgtggcggggatggaagtgttggctgggtcctctccgaaatcgacagcctcaaccttcataaacagtgtcagctgggagtgctgccgctcggcacagggaacgacttggcccgagtactgggctggggctcagcctgcgatgacgacacccagctcccccagatcttggagaagttggagagagccagcaccaagatgctggacaggtggagcgtcatggcatacgaggccaagctcccccggcaggcctcctcctctaccgtcaccgaagacttcagcgaggattccgaggtacagcagattctcttctatgaagactcggttgcagcccacctttctaaaatcctcacctcggaccagcactcggtggtcatctcctcggccaaagtgctctgtgagacggtgaaggacttcgtggcacgggtggggaaggcctatgagaagacgaccgagagctcggaggagtcagaggtcatggccaagaagtgctctgtcctgaaagagaagctggattcccttctcaagaccttggacgatgagtcccaggcctcgtcctctctgcccaacccgccccccaccattgccgaggaggctgaagatggagatgggtcgggcagcatctgcggttccaccggagaccgcttggtggcatcagcttgcccggcccggccgcagatattccggcctcgagaacagctcatgctgagagccaacagcctgaagaaagcaattcgtcagatcatagaacacacagaaaaagctgtcgatgagcagaatgcccagacccaggagcaggagggcttcgtcctgggcctctctgagtcagaggagaagatggaccacagagtgtgcccaccactgtcccacagcgagagcttcggggtccccaaggggaggagccagcgcaaagtgtcgaaatctccgtgtgaaaagctgatcagcaaagggagtctgtccctaggcagttctgcttcccttccgccccagccgggaagccgggacggcctgcctgcgctcaacaccaagatcctgtacccaaatgtccgggctggaatgtctggttccttacccggtggctcagtcatcagtcgcctgttaattaatgctgatcccttcaactctgaaccagaaaccctagagtattacacggagaaatgtgtcatgaacaactattttggcattggcctggatgcgaagatatccctggactttaacaacaagcgcgatgagcacccagagaagtgcaggagccgaaccaagaacatgatgtggtatggagttcttggaaccaaagagttgctgcacagaacctacaagaacctggagcaaaaggtcttgctggagtgtgacggcgacccatcccccagtcttcagggaattgctgtccttaacattcccagctatgccggaggaaccaacttctgggggggtaccaaggaagatgatactttcgcagctccatcattcgatgacaagattctggaggtggtcgccgtgttcggcagcatgcagatggccgtctctcgagtcatcaggctacagcatcatcggatcgcccagtgtcgcacggtgaagatctccatccttggggatgagggcgtgcctgtgcaggtggacggagaggcctgggtccagccgccagggtacattcggattgtccacaagaaccgggcacagacactgaccagagacagggcatttgagagcaccctgaagtcctgggaagacaagcagaagtgcgagctgccccgccctccatcctgttccctgcacccggagatgctgtccgaggaggaggccacccagatggaccagtttgggcaggcagcaggggtcctcattcacagtatccgagaaatagctcagtctcaccgggacatggagcaggaactggcccacgccgtcaatgccagctccaagtccatggaccgtgtgtatggcaagcccagaaccacagaggggctcaactgcagcttcgtcctggaaatggtgaataacttcagagctctgcgcagtgagacggagctgctgctgtctgggaagatggccctgcagctggatccgcctcagaaggagcagctggggagtgctcttgccgagatggaccgacagctcaggaggctggcagacaccccgtggctctgccagtccgcagagcccggcgacgaagagagtgtgatgctggatcttgccaagcgcagtcgcagtggtaaattccgcctcgtgaccaagtttaaaaaggagaaaaacaacaagaacaaagaagctcacagtagcctgggagccccggttcacctctgggggacagaggaggttgctgcctggctggagcacctcagtctctgtgagtataaggacatcttcacacggcacgacatccggggctctgagctcctgcacctggagcggagggacctcaaggacctgggcgtgaccaaggtgggccacatgaagaggatcctgtgtggcatcaaggagctgagccgcagcgcccccgccgtcgaggcctagcctctgtcctctcagcctgtggcctccacatccccgccgccgaggcctagcctccgccctctcagcctgtggcctctgcgcctcctgccactgaggccctgggcagatgctgcagcccgcccccttctcatggtgctacttcctctgtcagctacagaaagcctccgtgacaccgtccaccagagctctggggtctcgaacataacaacacagctacctttgaaacaacactttctccagctcagagtcacctggggcacatgtgtcacggccactcagctctcgcccgcctgtgctgtgggccagggaatccagcggcgtctggcctcctgggcactgcttgcctggcctcgtgcttggattgtcccgggggctcctctccgtgtgtccttctgtggccgcaccgtgtggctccgcctcctggcccccagccagttctcagaaacgtggctggggcccagcacagcagcctgcaagggcccctgtttgttgatgcagcttttgttgaacaaaaatcgtgctctttcctggtttgaaagtagcatggatgtttccagtcttgttgattgtaatttgacgtgaagagaaaaaaaaattcctcctgcgtgagccaaggcagcgggtgctgtttcccaggcggggagcccctccctgggtgtcacagggcctgtgctcctccctcctccatcctctctcctcccgctcctccctccccccactgtgggctggggacgcctgcccttctgtctccggacgctctaggcgagttcagcttggggtgtgagtgagacagcttgccagctgcatccctgcagacagaggatgtgtgtccacatgagtgtttctgtgtgggaaatgcttcctggctctgggaaactttttctgcccattctgtggttcccagggagcgtggccctggtgggccaggggtggtttgacctcttcagcccgtccggtggcctggaggccggaggctctcctgagtgtctgcccctgcagtggcttcttgtcgcctgctgctgggcgtgatgtcgctggaggtgctggcagggactctgatttggtggtccgcgctgcccctgccctgcctctgtcctggctctgaactagtagatgatggtgccagagggcagggagctcgcctggggagagggctgtgccccgtagggacagtgcccaggtgaaggatgcccctggtcctccagggcactgactttgcccttttttcccgttgatagtcatggctcagaggtgcttgtaaatgtcttgggaagaggtttctgtaacccctgccctggtgtgaggaggaaatggctctggcctggctgcctggccgtggcttctctttggctcccaaagagaaggacagtgttgggagtatctgccgtggcttctctttggctcccaaagagaaggacagtgttgggagtatctgccggcgctgtccaggtcctttagtcagcgtcactccatctgatgtgcagaagctgggctgcacctgcgggggtgggcatagaccgggctgggtctgcagcagcccctggtcctgagcaggcggcagtgaacagcactggcccacctcccactcacagcccctctgtcccctctgcagtgcacccaggtgggcccctctgcgtgcctttgggtgctcccctctcgtggtcgttctggcccgaggcccttagagtatggaggctgagccaggccttgggtttccccagcacagcctcctgtcgctgcatgcgacgtgttgggatttttggatgaaagactctcccacgctctgttggtggacttagctgcctcactggaagtgatgtgggtggaaggtggttgtatgttaccttttccacctctcattgttttccccagaacattgtagatgggggttggcagagggagaaataagccagccacggcagtcgcttggtttcccaggtggaatgggctaacacaggagatgatgggaacctgtcccgcagtccctgcatgaccattggccctgctggcctggcgatgtgggcatcctggggttcttagggtcccagaacaagccccaggcaagctggaacttgggtggggaggggacatgaggaggataaacagctgactgtggcttcaaggacatcagggccaccccaagtcctcagtgtcctactcctggcaaggagttgggtttggatcaaaagtgtttaaaattaatatgttgtcagtgattagaacaacactgtttacataaaaaccatttttctaattctaacaagttagaatgtgaggaaggaatgaacatgagtgtttaggaacctgccctttggtgctgggctggcgtcccgcactggggtgtcctcgctgtctgggggctgctctgctgccccggcccaggtccccttgtggtgttgccagacgggcctcatggtctgctgtgcagagagaggcaggaaggatccctgaagagtcttggagaaaaggttctgtgccctcaggtggggcttaccccctcgtatttataatcttaatttatatagtgaccaccgtggaaacaaacgcctcttgtattgtcatgtacatagtccatacctgagtgctgtacataagttgttctgtgtataaataaaacaagcctgtttttgatcttc

SEQ ID NO: 126629 - DNA, 625 bp, Homo sapiens
  Payload ID: 4828
  Gene Symbol: DGKD
  Gene Name: diacylglycerol kinase, delta 130kDa
  ENST ID: ENST00000442524
  CDS Start-End: 1-490
gccgccgcccgaggagtcgtccgacagcgagcccgaggcggagcccggctccccacagaagctcatccgcaaggtgtccacgtcgggtcagatccgacagaagaccatcatcaaagaggggatgctgaccaaacagaacaattcattccagcgatcaaaaaggagatactttaagcttcgagggcgaacgctttactatgccaaaacggcaaagtcaatcatatttgatgaggtggatctgacagatgccagcgtagctgaatccagtaccaaaaacgtcaacaacagttttacggctgaagtgcggtggtgtgatctcggctcactgcaacctccgtctcccaggttcaagggatcctcatgcctcagcctccctagtagctgggattatagtcgtgcaccgttatgcccagataatcttcgtaattttagtagagatggggtttcaccatattggccaggctggtctcaaactcctggcctggagtgatctacccgcctgaaccttccaaagtactgggattacaggcatgagccactgtgcctggccctgggcattaatttagatgttcattttggtttcagttatttgcatatttcctaataaaaaaattattcttggtaa

SEQ ID NO: 126630 - DNA, 5379 bp, Homo sapiens; identical to SEQ ID NO: 126625
  Payload ID: 4828
  Gene Symbol: DGKD
  Gene Name: diacylglycerol kinase, delta 130kDa
  ENST ID: ENST00000630624
  CDS Start-End: 1-1355

SEQ ID NO: 126631 - DNA, 6222 bp, Homo sapiens; identical to SEQ ID NO: 126628
  Payload ID: 4828
  Gene Symbol: DGKD
  Gene Name: diacylglycerol kinase, delta 130kDa
  ENST ID: ENST00000629655
  CDS Start-End: 80-3586

SEQ ID NO: 126632 - DNA, 625 bp, Homo sapiens; identical to SEQ ID NO: 126629
  Payload ID: 4828
  Gene Symbol: DGKD
  Gene Name: diacylglycerol kinase, delta 130kDa
  ENST ID: ENST00000626849
  CDS Start-End: 1-490

SEQ ID NO: 126633 - DNA, 494 bp, Homo sapiens; identical to SEQ ID NO: 126626
  Payload ID: 4828
  Gene Symbol: DGKD
  Gene Name: diacylglycerol kinase, delta 130kDa
  ENST ID: ENST00000629742
  CDS Start-End: 1-494

SEQ ID NO: 126634 - DNA, 6297 bp, Homo sapiens; identical to SEQ ID NO: 126623
  Payload ID: 4828
  Gene Symbol: DGKD
  Gene Name: diacylglycerol kinase, delta 130kDa
  Uniprot ID: Q16760
  ENST ID: ENST00000628356
  CDS Start-End: 13-3657

SEQ ID NO: 126635 - DNA, 6228 bp, Homo sapiens; identical to SEQ ID NO: 126624
  Payload ID: 4828
  Gene Symbol: DGKD
  Gene Name: diacylglycerol kinase, delta 130kDa
  Uniprot ID: Q16760
  ENST ID: ENST00000628527
  CDS Start-End: 80-3592

SEQ ID NO: 126636 - DNA, 482 bp, Homo sapiens; identical to SEQ ID NO: 126627
  Payload ID: 4828
  Gene Symbol: DGKD
  Gene Name: diacylglycerol kinase, delta 130kDa
  ENST ID: ENST00000625865
  CDS Start-End: 12-482

SEQ ID NO: 126637 - DNA, 8660 bp, Homo sapiens
  Payload ID: 4829
  Gene Symbol: DGKE
  Gene Name: diacylglycerol kinase, epsilon 64kDa
  Uniprot ID: P52429
  ENST ID: ENST00000284061
  CDS Start-End: 181-1884
ctccagctcgcggccccgcgcgccggatcggcgtgcgtgcggctggagccttaagcgtttcccccgcccggcttcatccctgctggcggcccagcgtcgttctcctcctgcgcgaggcggccaaggcctgctggcccggagccgcgcctccacccgcgcgaggtatcgtccttggagaagatggaagcggagaggcggccggcgccgggctcgccctccgagggcctgtttgcggacgggcacctgatcttgtggacgctgtgctcggtcctgctgccggtgttcatcaccttctggtgtagcctccagcggtcgcgccggcagctgcaccgcagggacatcttccgcaagagcaagcacgggtggcgcgacacggacctgttcagccagcccacctactgctgcgtgtgcgcgcagcacattctgcagggcgccttctgcgactgctgcgggctccgcgtggacgagggctgcctcaggaaggccgacaagcgcttccagtgcaaggagattatgctcaagaatgacaccaaggtcctggacgccatgccccaccactggatccggggcaacgtgcccctgtgcagttactgtatggtttgcaagcagcagtgtggctgtcaacccaagctttgcgattacaggtgcatttggtgccagaaaacagtacatgatgagtgcatgaaaaatagtttaaagaatgaaaaatgtgattttggagaattcaaaaacctaatcattccaccaagttatttaacatccattaatcagatgcgtaaagacaaaaaaacagattatgaagtgctagcctctaagcttggaaagcagtggaccccattaataatcctggccaactctcgtagtggaactaatatgggagaaggactgttgggagaatttaggatcttgttgaatccagtccaggtttttgatgtaactaaaactcctcctatcaaagccctacaactctgtactcttctcccatattattcagctcgagtacttgtttgtggaggggatgggactgtagggtgggtcctggatgcagttgatgacatgaagattaagggacaagaaaagtacattccacaagttgcagttttgcctctgggaacaggcaacgatctatccaatacattgggttggggtacaggttatgctggagaaattccagttgcgcaggttttgcgaaatgtaatggaagcagatggaattaaactagatcgatggaaagttcaagtaacaaataaaggatactacaacttaagaaaacccaaggaattcacaatgaacaactatttttctgttggacctgatgctctcatggctctcaattttcatgctcatcgtgagaaggcaccatctctgttttctagcagaattcttaataaggcggtttacttattctatggaaccaaagattgtttagtgcaagaatgtaaagatttgaataaaaaagttgagctagaactggatggtgagcgagtagcactgcccagcttggaaggtattatagttctgaacatcggatactggggcggtggctgcagactatgggaagggatgggggacgagacttaccctctagccaggcatgacgatggtctgctggaagtcgttggagtatatgggtctttccactgtgctcagattcaagtaaaactggctaatccttttcgaataggacaggcacatacagtgaggctgattttgaagtgctccatgatgccaatgcaggtggatggggagccttgggcccaagggccctgcactgtcaccataactcacaagacacatgcaatgatgttatatttctctggagaacaaacagatgatgacatctctagtacttcggatcaagaagatataaaggcgactgaatagatggatgagggagtgaaaactttgcatagaatcctcacgcaagtagatacatgttcatccaaaagtattaatagaaattctctatcagctattcagtcttaatttcactagtagtataatgggtatacatttttgtaaatagcatccccaaaccagccagccttcagttatttacaaatgtttgttcttttttcagcaaaatacttcaaatgaatagtattaacttacaaaaagtcacaaaaacttacatgagagtgaaaatttgttatgactgttttgagagtgggactcactctgaagtatgtgctgtctcatgtcttatttttgaaccatgcatatgatggacacacaatggatggacacattatatctccaacaaggtgtgggtggaaagatcaaattaacctgcttttttgaaaggaaatgattactgtcaaaccagcatggttaattgtgagcatcctcctgcagcatgccccttaagattttctacaacccaaaccaagtgtatgtattgatttctaggaacccccaaaaggagaatagtaaaaaaagatcatacttaaaatttgtattacaatttttattttaggaacttattcagacacgtaaatgttgtttaattctgtaggtaaccatttgagctgcaattcaggatcttttttataacaccagtgtagccaaaagagaaacagataagtgaattggtaagaaataagattcagagcacttgggattgtaagttataggttctgagctgaactgtttatcagccgctctttttattaaaagacagtgtcaacacttcaaaaaacgtgcttaaaggagacaacggtgagattaattgcttagaaaaagctcaaggctgactgataagttttaaaaatttggtggtcttgtagtattttgaaatacagtagtcttttaacagaatttccccttagggaggtaagtggacagaaatctttgctaaaatgtttatatcatatttattttaaaatgagagagatatatttttaaattatttattatttaccttgtggtatggtacctgtgtttagtgtttacgttctgtagctttatttaataagttaaattgatcacataaattctgctagtcacaatcagatagaaatttagtctattaattaaaattctaatttaattctcctgacagaaatctagatattcttattcttcacaaatattcctcattgtattgaaaaatgaaggagggcatgaaaagcactagggaactacttttggataactgaaagctttgtttcattgttttatttgcccctcaattgccacaaacttactgaagggctagtttcatggttcccattagagggtgcttgttcgctgctgttgaccagcccaagggtcgtgacccacaggtcggctgacccagagggcatccagcctggtgtttttctgacacatggcccaggctttgtggtctttcatgacattaatctctgaaagatcagaatgtatcccccaaaataccattagctatctttgagggtctattatgaatctgtcatccatgaattgccataaacctaagtttgcctcacctcaggcccagaccatgttttcaaagagcaacttagtaatgtatacagtagtcagtacattttatgaaatactctattttgctaaattaacctcttgcagatctcctcaggtgatcttaaattctagtcttgagaaactttgtgagcagatctgttttcagcttctttatatacctttcatggtaagtaaccatggcagtgaggatggcagagttttgttttttttttttttaatgggccaatcatgttctgagtattatgaagtttatcctttcattcatgatcaaaattgttaaagacatcacattttataaatacactgttaaatccactttgctgtaggttatagtttacctgttatataattcgtagtgctaattgtagtagaagcaaatcaatttaggatgttggaacgaaaataatcacaataactaatacagctttttaattgtgaaaactacaattaaaaattataattttaataccaaccataatattacactgtatttagaacaggcttatgtaaaatgccctcatttatctaaataagttgattttttggttattgtaatctagtaaggtttttgcatcactactggtctgtcatgaagtttttctgctggcttattcacttatttagacttcatttagggaagctatttcagaataccatctcataaaatgtatcattatcttgtttttgcaaaattcacttactttttgggcacatttacccagcatttcaaataagtgtataggcatgtgccttgtttaagtacaatttataagacttcatgtttgcaagttacatattagggtagtgattgtttatattaccagggattctacactttaccaaaaaaaattgccataagattttcctgttccattttaaattgtcttgatatttaaaaaaataacttctacattctcaggaagaaatacatgaagtaaatcatatctccatgtctgtttccagatttctctaatctttttactatcccaatacattcctaattcctataaacgtagtggcttaaatactgaatacctggcagctcttaaagatcccttaggcagatgatgataattttcagtgtttcgtcatgtttaatagaaatcaaactgacttgtgttttaaaatacaagttgtctgctagtaaagttacatgatttaggtgtgttttaggttttctgcaacaattagctgtgaacccctaatgtagctaagtttatacaaattttataatcaaaattatttatttttatttttttagagtatgtcaaaaacatatagtgtttgctttgtgaaatacatttgcttagagttataaaatatactgtgactcagaaattgtaaagtcagtttgcgttgtaaaaatgaatactaccagcatgtcaaaagaaaaataatttacatttgtaatataaagtaaaattgtatttaatatatttattgaattttaaatttgcactaacttgaaaactttaaaggttatactaatttaatgattaatgtggacccaaatacataatttggccaaaaaagtcattagaatgggtaatggttttgtgtggttttccttcaaaatgataatattgaagcaagaaccagcattttatattgataatttttttaatatttctacccagttgaggacagtggaatataagtagatatatttaaaatatctagatatttaaaaagaaagaaaaggttgtttatcccaatctgaattcattctcagcaacaagacagaaaaggtggtttgggttttgcttttaaacagtgtccccctgtctttttcaatttttcccttgaagcctttctcttgttcttcagagtacgcgctgcaggctatctgcagcatcagaatgcctgggcaggctgttgaaagtatggattcctgagcccaacccttaacttaatgattccctgtctctggagatgcaacatagaaatctctgtttttattaacaagcgcctcaggcgattcttaagcatactgaaatttgaaagcttctggtctgaacctcatgtattcacctagggcttttgctaggtgggataccatgccgaaaaattgaattaattgtatgttcttaaaattgtttttcttctactccgctgtcctcttccctcaaaatcacttttctaaaagaactctatgaaaaacttatttgtatcatacccaaattgatatatttgtctgaactctgttacataaaaattggtatgattcatatgtggaatcagtttttggactgtgacccatgcagtgttgggggacaaggagttgcttcaggagttagtgcagtgcgcctccaaggggcagtgagccatggaggcgcctgccttctcactgcagtcaatgcagccacacttgtgtatactgagtgctgcttcagatctcagtagataaaataattccacatttaaaatgattctgctattttttataaagggtttgaaagccactactataatgactttgtcacctaattgattttctactaatttttacatattcagaaacttcgtgtttttttggtggacagaatattttggaggtctccgtcgctgtttagaatgtggccacttggctgtttcacagtttttaaagctattttattgaatagtaaagcagtgaacttagcctttgttctttgtgtttctaatttaagcatatagtctatttaatttttgatatgtaaatacacatcaatacatatatatttacccatgtggccctgtgtagtcagtgcatgaggcttgcatagcccagaaaggtacattccagggttctggggaaagaattttaaaatgccatcctctaatacagacgtttataaaacttaaatgaaatgattgggcttaaccatatgcaagaaagtctgcagaaaataaatcacctagaaactataaatagaaatgtgctgctgaggctgggcacggtggctcacacctgtaatcccagcacttggggggctaagggaggcgtatcacctgaggtcaggagtttgagacaagcctggtcaacatggtgaaacgccgtctctactaaaaatacaaaaaaaattagccaggtacattggcacatgcctttaatcccagctaatcaggaggctgaggcacgagaattgctcgaacccaggcggcagagcttgcagtgagcggagatcacatgactgcactccagcctgggcaacagagcaagactccatctcaaaaaaaaaaaggccgggcgtggtggctcacgcctgtaatcccagcactttgggaggctgaggcaggtggatcacgaggtcaggagatcgagactatcctggctaacacggtgacaccccgcctctactaaaaatccaaaaatttagccgggcatggtggcgggcacctgtagtcccagctactcgggaggctgaggcaggagaatggcgtgaacccgggaggcagagcttgcagggaggcggagcttgcagcgagccgagatagtgccactgcagtggggcctgggccaaagagtgagactccatctcaaaaaaaaaaaaaaagaaagaaatgtgttgctggtatcagatatcagaccaagaacacttcagtctctctaaggatgccctgagctacctcactgttaaaggacgacatcaacacagaatgcactaaacaggaaataagctgtaatctagagaatttccattatgtgttactttttggtgactaacatggaatgttgaaaaggaagagctggaaagctcagttgttttccttgttcctctgacattgtccaggcaagagggcatcctgatcagatgagtagatttggctgagaaaaaccctagagtaaggcaggcactttgtggaggtggatgatgatggctcataaaaacgtttgttctcagtccagttcagggctctgccagcagtctttcagatctgaactgcttaaacaaaccctacagataaattggcactctgatttgtaattctgtttgtacaagtttagagcagcctagctcgagtcctcaaccccagtcctcttagaagtgaactgattgcactggatccctaaacccacaatgttgaggacacatgtgatgactccacttgctcagccagctggcctcttgcactttcccctgcccaccacttgtaactaccacttaattatcttgtgttaattgcttttgttgtgttgggtctgtatttttgtggtcagtgcctgcaggcagaaatgtgaaagcatttggtatgttgaagatacttgcttcttttttaataaaattaaaagtgcagcacgtaagtatgatactgtgtagttttttgacacaaccatgagatacaataagcagctttgacttagtgtcccaaaaagtggttcttggtctacagcagggcaaacatatatgtggcaagttctgatcacatacttttagacagaaagaataaaaaattcatattgcatggcttttgtagcctaagagcacagaatcatacacgtgtgttaggagaaacattcattctcacgcatataaactggctcctggcagagtagagcagtaagtgggatcaaaggtgaattcaccttattttcagttggtagagtatggaaaaatgtatcacttatttgaaatacctgaatggaaacccagcctctactactgtaacttaacacttgttcttcctgagcctcaaattttctttctctgtaagaatgggaattaatgcccacctacgggttgcaagtgcttacaggagctgggcaagcaacgaaggtaagagttgtagagacttcggtaaactggagcacatgattcctgggaagcaggcctagtgtaaacaatttatttttctagaaaagacagaagtttagagtatatgaaatctaatttttaagtattggttggcaactaattgactatcgtctaccataaggttatatgataattattagggcaggagagtgaatgcatcttaatatgcatggcagaactgtgtgtttccttccatctggattttcataaagctttctgatttatcagtaacgatctgaaaaatgtactgtggcatgtaacatcttttattcattttattaggcattagaggaagaatattctgtagtcctgctttattctgccatctttacctggaaatccatttttataaaatttttgtaataaaaattcacttgatca

SEQ ID NO: 126638 - DNA, 5179 bp, Homo sapiens
  Payload ID: 4829
  Gene Symbol: DGKE
  Gene Name: diacylglycerol kinase, epsilon 64kDa
  ENST ID: ENST00000572944
  CDS Start-End: 1-1369
gagcaagcacgggtggcgcgacacggacctgttcagccagcccacctactgctgcgtgtgcgcgcagcacattctgcagggcgccttctgcgactgctgcgggctccgcgtggacgagggctgcctcaggaaggccgacaagcgcttccagtgcaaggagattatgctcaagaatgacaccaaggtcctggacgccatgccccaccactggatccggggcaacgtgcccctgtgcagttactgtatggtttgcaagcagcagtgtggctgtcaacccaagctttgcgattacaggtgcatttggtgccagaaaacagtacatgatgagtgcatgaaaaatagtttaaagaatgaaaaatgtgattttggagaattcaaaaacctaatcattccaccaagttatttaacatccattaatcagatgcgtaaagacaaaaaaacagattatgaagtgctagcctctaagcttggaaagcagtggaccccattaataatcctggccaactctcgtagtggaactaatatgggagaaggactgttgggagaatttaggatcttgttgaatccagtccaggtttttgatgtaactaaaactcctcctatcaaagccctacaactctgtactcttctcccatattattcagctcgagtacttgtttgtggaggggatgggactgtagggtgggtcctggatgcagttgatgacatgaagattaagggacaagaaaagtacattccacaagttgcagttttgcctctgggaacaggcaacgatctatccaatacattgggttggggtacaggttatgctggagaaattccagttgcgcaggttttgcgaaatgtaatggaagcagatggaattaaactagatcgatggaaagttcaagtaacaaataaaggatactacaacttaagaaaacccaaggaattcacaatgaacaactatttttctgttggacctgatgctctcatggctctcaattttcatgctcatcgtgagaaggcaccatctctgttttctagcagaattcttaataaggcggtttacttattctatggaaccaaagattgtttagtgcaagaatgtaaagatttgaataaaaaagttgagctagaactggatggtgagcgagtagcactgcccagcttggaaggtattatagttctgaacatcggatactggggcggtggctgcagactatgggaagggatgggggacgagacttaccctctagccaggcatgacgatggtctgctggaagtcgttggagtatatgggtctttccactgtgctcagattcaagtaaaactggctaatccttttcgaataggacaggcacatacagtgagggtaggtgaaatatagctgtaacaggctaatttgtcccaatccaattctaagctgttgatatgtaaaatatacatgctatacttttctttaaacagtggtttatggctcatgcagctggtcactgtacactagcggctagagtgggatgaggaagaaacagaaacatggctcaagatccatgagataaaacgttcacttgaaaaaagaattccttaatcaatgaataaaaacatattcagattaatattttctaaaaatgaaatgcataagggttaagggattgtggatggtattattaaggaagacctttctaaatttggggggactgacttttaaacattatttgttccctaatatcagctgattttgaagtgctccatgatgccaatgcaggtggatggggagccttgggcccaagggccctgcactgtcaccataactcacaagacacatgcaatgatgttatatttctctggagaacaaacagatgatgacatctctagtacttcggatcaagaagatataaaggcgactgaatagatggatgagggagtgaaaactttgcatagaatcctcacgcaagtagatacatgttcatccaaaagtattaatagaaattctctatcagctattcagtcttaatttcactagtagtataatgggtatacatttttgtaaatagcatccccaaaccagccagccttcagttatttacaaatgtttgttcttttttcagcaaaatacttcaaatgaatagtattaacttacaaaaagtcacaaaaacttacatgagagtgaaaatttgttatgactgttttgagagtgggactcactctgaagtatgtgctgtctcatgtcttatttttgaaccatgcatatgatggacacacaatggatggacacattatatctccaacaaggtgtgggtggaaagatcaaattaacctgcttttttgaaaggaaatgattactgtcaaaccagcatggttaattgtgagcatcctcctgcagcatgccccttaagattttctacaacccaaaccaagtgtatgtattgatttctaggaacccccaaaaggagaatagtaaaaaaagatcatacttaaaatttgtattacaatttttattttaggaacttattcagacacgtaaatgttgtttaattctgtaggtaaccatttgagctgcaattcaggatcttttttataacaccagtgtagccaaaagagaaacagataagtgaattggtaagaaataagattcagagcacttgggattgtaagttataggttctgagctgaactgtttatcagccgctctttttattaaaagacagtgtcaacacttcaaaaaacgtgcttaaaggagacaacggtgagattaattgcttagaaaaagctcaaggctgactgataagttttaaaaatttggtggtcttgtagtattttgaaatacagtagtcttttaacagaatttccccttagggaggtaagtggacagaaatctttgctaaaatgtttatatcatatttattttaaaatgagagagatatatttttaaattatttattatttaccttgtggtatggtacctgtgtttagtgtttacgttctgtagctttatttaataagttaaattgatcacataaattctgctagtcacaatcagatagaaatttagtctattaattaaaattctaatttaattctcctgacagaaatctagatattcttattcttcacaaatattcctcattgtattgaaaaatgaaggagggcatgaaaagcactagggaactacttttggataactgaaagctttgtttcattgttttatttgcccctcaattgccacaaacttactgaagggctagtttcatggttcccattagagggtgcttgttcgctgctgttgaccagcccaagggtcgtgacccacaggtcggctgacccagagggcatccagcctggtgtttttctgacacatggcccaggctttgtggtctttcatgacattaatctctgaaagatcagaatgtatcccccaaaataccattagctatctttgagggtctattatgaatctgtcatccatgaattgccataaacctaagtttgcctcacctcaggcccagaccatgttttcaaagagcaacttagtaatgtatacagtagtcagtacattttatgaaatactctattttgctaaattaacctcttgcagatctcctcaggtgatcttaaattctagtcttgagaaactttgtgagcagatctgttttcagcttctttatatacctttcatggtaagtaaccatggcagtgaggatggcagagttttgttttttttttttttaatgggccaatcatgttctgagtattatgaagtttatcctttcattcatgatcaaaattgttaaagacatcacattttataaatacactgttaaatccactttgctgtaggttatagtttacctgttatataattcgtagtgctaattgtagtagaagcaaatcaatttaggatgttggaacgaaaataatcacaataactaatacagctttttaattgtgaaaactacaattaaaaattataattttaataccaaccataatattacactgtatttagaacaggcttatgtaaaatgccctcatttatctaaataagttgattttttggttattgtaatctagtaaggtttttgcatcactactggtctgtcatgaagtttttctgctggcttattcacttatttagacttcatttagggaagctatttcagaataccatctcataaaatgtatcattatcttgtttttgcaaaattcacttactttttgggcacatttacccagcatttcaaataagtgtataggcatgtgccttgtttaagtacaatttataagacttcatgtttgcaagttacatattagggtagtgattgtttatattaccagggattctacactttaccaaaaaaaattgccataagattttcctgttccattttaaattgtcttgatatttaaaaaaataacttctacattctcaggaagaaatacatgaagtaaatcatatctccatgtctgtttccagatttctctaatctttttactatcccaatacattcctaattcctataaacgtagtggcttaaatactgaatacctggcagctcttaaagatcccttaggcagatgatgataattttcagtgtttcgtcatgtttaatagaaatcaaactgacttgtgttttaaaatacaagttgtctgctagtaaagttacatgatttaggtgtgttttaggttttctgcaacaattagctgtgaacccctaatgtagctaagtttatacaaattttataatcaaaattatttatttttatttttttagagtatgtcaaaaacatatagtgtttgctttgtgaaatacatttgcttagagttataaaatatactgtgactcagaaattgtaaagtcagtttgcgttgtaaaaatgaatactaccagcatgtcaaaagaaaaataatttacatttgtaatataaagtaaaattgtatttaatatatttattgaattttaaatttgcactaacttgaaaactttaaaggttatactaatttaatgattaatgtggacccaaatacataatttggccaaaaaagtcattagaatgggtaatggttttgtgtggttttccttcaaaatgataatattgaagcaagaaccagcattttatattgataatttttttaatatttctacccagttgaggacagtggaatataagtagatatatttaaaatatctagatattt

SEQ ID NO: 126639 - DNA, 1843 bp, Homo sapiens
  Payload ID: 4829
  Gene Symbol: DGKE
  Gene Name: diacylglycerol kinase, epsilon 64kDa
  Uniprot ID: P52429
  ENST ID: ENST00000572810
  CDS Start-End: 173-706
cgcggccccgcgcgccggatcggcgtgcgtgcggctggagccttaagcgtttcccccgcccggcttcatccctgctggcggcccagcgtcgttctcctcctgcgcgaggcggccaaggcctgctggcccggagccgcgcctccacccgcgcgaggtatcgtccttggagaagatggaagcggagaggcggccggcgccgggctcgccctccgagggcctgtttgcggacgggcacctgatcttgtggacgctgtgctcggtcctgctgccggtgttcatcaccttctggtgtagcctccagcggtcgcgccggcagctgcaccgcagggacatcttccgcaagagcaagcacgggtggcgcgacacggacctgttcagccagcccacctactgctgcgtgtgcgcgcagcacattctgcagggcgccttctgcgactgctgcgggctccgcgtggacgagggctgcctcaggaaggccgacaagcgcttccagtgcaaggagattatgctcaagaatgacaccaaggtcctggacgccatgccccaccactggatccggggcaacgtgcccctgtgcagttactgtatggtttgcaagcagcagtgtggctgtcaacccaagctttgcgattacaggtatggtcttcgtggacactcactgtcccagaatgcgccgtgggaatcaggatttcatagagtggtgtagaggcctgctttaatctctgctgatgacctaaactcattttgaggaaacaagctaataaataaacatccctgagtttgtgcaagcgtggcagctttgcagtagtcatttgctgagacgatgcatccagcctccactcctcagccagcctgcccttttgggtaataaaacttggctcctaacgttaatacagaggtttctaagtggtgcctgcttcatggccactgtatattttagcttttgttcctatcgattatctccttattttaaataaggaaaaatgaaatatggacaaattaacttttcccttcagccgcaaaactgatgggtcacaggttttgtactatgaatgtgcagtgaaaacaagtgtcattccaaggcagcacttttatgtcttttgctaatatagctgttggtaccatagcgaaatatactcaaaaagaacactgaaaggaatattccttttgacgcttggtctttcaggacatgtagaatcttagataagtgaccttgattaagccaagaatattttaatgtcttttatatacacactggacaacacatttttgtccttaaatattgtttgaaaataggtgaagatgtcctttgctgatgttggaaattggtaaaggagaatgctgctttgcaaatgatctattctaactcagttcacagttgagaaaattaaagcccgttaggtccactctggtaaaataggactggcctccaggatttccagctctggactaacacttagcctcctttgagccttaagtctggacatcttcattgtaatgggttttatttctgacaagtagaaaggcgcataaacatgcttaagaaatgaaataggcagtaaataggaagctgctttttaatttttttaattttttttgcagaaattctttcattagcatgaacgctattataatgtcaatacctgtttttaagtcttattttaaataattttacacattatcaaagaggcttaagaataaatgttcaaaataatgtattctagacaactacaaagttttgtaaccatgcatttttatttggtatctttaaaaattaaatgctgtccttctggcatcagtgagagccaagttagcagggactttaaataaatttcataatgaa

SEQ ID NO: 126640 - DNA, 711 bp, Homo sapiens
  Payload ID: 4829
  Gene Symbol: DGKE
  Gene Name: diacylglycerol kinase, epsilon 64kDa
  ENST ID: ENST00000570738
  CDS Start-End: 1-213
cactgtgctcagattcaagtaaaactggctaatccttttcgaataggacaggcacatacagtgagggtggatggggagccttgggcccaagggccctgcactgtcaccataactcacaagacacatgcaatgatgttatatttctctggagaacaaacagatgatgacatctctagtacttcggatcaagaagatataaaggcgactgaatagatggatgagggagtgaaaactttgcatagaatcctcacgcaagtagatacatgttcatccaaaagtattaatagaaattctctatcagctattcagtcttaatttcactagtagtataatgggtatacatttttgtaaatagcatccccaaaccagccagccttcagttatttacaaatgtttgttcttttttcagcaaaatacttcaaatgaatagtattaacttacaaaaagtcacaaaaacttacatgagagtgaaaatttgttatgactgttttgagagtgggactcactctgaagtatgtgctgtctcatgtcttatttttgaaccatgcatatgatggacacacaatggatggacacattatatctccaacaaggtgtgggtggaaagatcaaattaacctgcttttttgaaaggaaatgattactgtcaaaccagcatggttaattgtgagcatcctcctgcagcatgccccttaagattttctacaaccc

SEQ ID NO: 126641 - DNA, 17261 bp, Homo sapiens
  Payload ID: 4830
  Gene Symbol: DGKH
  Gene Name: diacylglycerol kinase, eta
  Uniprot ID: Q86XP1
  ENST ID: ENST00000261491
  CDS Start-End: 22-3516
tccccgcaggagtcggagaggatggcaggggccggaggccagcaccaccctccgggcgccgctggaggagcggccgccggagccggcgccgcggtcacctccgccgctgcctcggcggggccgggagaggattcgtctgacagcgaagcggagcaagagggaccccagaaactgatccgcaaagtgtctacctcggggcagatccggaccaagaccagtattaaagagggacagctattgaagcaaaccagttctttccaaaggtggaaaaagcgatacttcaaacttcgaggccgcaccctttactatgcaaaggactcaaagtctctgatatttgatgaagttgacctctcagatgctagtgtagctgaagcaagcacgaaaaatgctaacaacagcttcacgatcatcactccattcagaaggctaatgctgtgtgctgagaacagaaaggagatggaggattggatcagctcactgaagtctgtacagaccagagaaccctacgaggtggcccagtttaatgtggaacatttctcagggatgcacaactggtacgcctgctcccacgcccgacccaccttctgtaacgtgtgcagagagagtctttctggagtcacctcccatggcctgtcctgcgaagtgtgtaaattcaaggctcacaaaagatgtgcagtgagagcaacaaataactgtaaatggactaccctggcctccatcgggaaggacattatagaagatgaagatggcgtcgcgatgcctcaccagtggcttgagggcaacctgcctgtaagtgccaagtgtgctgtctgcgacaaaacatgtggcagtgttctccgtctacaggattggaaatgcctttggtgtaagacaatggtacacactgcctgcaaagatttataccatccaatatgtccacttggtcaatgtaaagtatctatcatacctccaattgcactaaacagcaccgattccgatggtttctgtagagcaacattttcgttctgtgttagtcctctattggtttttgtcaattctaagagtggagataatcagggagtaaagttcctccgtcgctttaaacagttgctaaatccggctcaggtgtttgatttaatgaatggaggtcctcatttaggtttaagattatttcagaagtttgacaatttccggattcttgtttgtggaggcgatggaagtgtaggttgggttttgtcagaaatcgataagctcaacttgaataaacagtgtcagctgggagtgttgcctttgggtacaggaaatgaccttgcccgagttcttggctggggaggttcatatgacgatgacacccaacttcctcagatcctagagaaactggaacgagccagtaccaaaatgttggacaggtggagtataatgacatatgaactcaaattgccaccaaaagcttccctacttccaggacctccagaagcatctgaagaattttatatgacgatttatgaagactcagttgcaacgcatcttacaaaaatcctcaattctgatgaacatgcagtggtcatatcttctgccaagacgctatgtgaaactgtaaaggacttcgttgccaaagtagaaaagacgtatgacaaaaccttggaaaatgccgttgtagctgatgccgtggccagtaaatgttcagtcctaaacgagaagctcgaacaactgctgcaggctttgcacacagattcccaggctgcgcctgttctccctggcctcagccctctcattgtggaagaagatgctgtggaatcgtccagtgaagagtccctgggtgaaagcaaagagcagcttggggatgacgttacaaaaccttcctcccagaaagccgtcaaaccaagggaaatcatgttgcgggcaaatagtttaaagaaagcagtgaggcaagtcattgaggaagccggaaaagttatggatgacccgacagttcacccctgtgaaccagctaatcagtcctctgattatgacagcacagaaacagatgaatctaaggaggaagctaaagatgatggtgccaaagaatcaataactgttaaaactgcacctcggtctccagatgcccgggcaagttatggccattcccaaactgattctgtccctggtccagctgtggcagccagcaaagaaaacctccctgtgctcaataccagaataatctgcccaggtttaagagcaggactggctgcctcaattgctgggagttcgattatcaacaaaatgttactggcaaacattgatccttttggtgccacgccgtttattgacccggatctagattccgtagatggatattcagaaaaatgtgtcatgaacaattactttgggattggattagatgcaaaaatttcattagaatttaataataaaagagaggagcaccctgaaaaatgcaggagccgaactaaaaacttgatgtggtatggagtccttggaacccgggagttattacagagatcgtacaagaatttagaacaaagggttcaacttgagtgtgatgggcagtatattcctcttcccagcttgcaaggcatagccgtgttgaacattcccagctatgctggaggcactaacttttggggtggaactaaagaggatgatatatttgctgcaccatcctttgatgacaagatcctggaagttgtagcaatatttgatagcatgcaaatggcagtttcaagggtcattaaactgcagcatcatcgaatagcccagtgccgtacagtgaaaatcactatatttggtgacgaaggagtcccagtgcaagtggatggtgaagcgtgggttcagcctccagggattatcaaaattgtgcacaaaaacagagcacaaatgctaacaagggacagagcctttgagagcactctgaaatcttgggaagataagcagaagtgtgattctggtaaaccagttctccgaacccatttgtacatccatcacgccattgacttggcaacagaagaggtgtcgcagatgcagctatgctcccaggctgcagaggagctcattactaggatatgtgacgcagccacaattcactgtcttttggagcaagaactggcccatgctgtgaatgcctgctcccatgccctgaataaagccaacccaaggtgcccggagagtcttacaagagacactgccactgaaatagccatcaatgtgaaggcgctgtataatgaaacagaatctttgctagttggcagggttcctttgcagctggaatcgccacatgaagagcgagtatccaatgccttacactctgtggaggtggaattacagaaactgacagagattccttggctttattatatcttacacccaaatgaggatgaggaacctcctatggattgcaccaaaaggaacaacagaagcaccgtatttcgaatagtgccaaagtttaaaaaggaaaaggttcagaagcagaagacaagttcacagcctggatctggggataccgaaagtgggtcatgtgaagcgaattctccagggaattaaagagcttggaaggagcactccacagtcggaggtgtaatcatattggtgctatttcttggaagagaagttattgccacttaatacaaagtccttggaagcaagtggctgttcttgtagttttctgcatagataagtaagcaccactgaagcacctctgtggcttgatattttgctgtgggtgaaattttgatttgaggtattagaaaatatttttgtgccgaacaatacattccacaaagccattttctttttgtgcaaacctgacatgttcaaatatattcacaatggtaataaggtaggaggaatctgagacgattgcattgtctaaacagtggaattgcaaaatgtttactttccatagatctggtctgatggaatgttcctactgtgcaactgcataacaatatgtggttaaaacttcctaggtttcattacgggggggcattggccattttcttaaaatcataggttaggagactaaaatataaattaagttgtgatttgaatgtagattggtatcacctccaactcctagtgcttagtggtcaaatatgttgaaaacctttccaatactatgaatgaatgcaaatcttaatgcacgatgttcctgcctgaaatgtctttctttttcttgcatgtcacatctaatactgtaacactttaaatagctttcatgtcagttttaatgttaatgggatttaatttattactaaagtacatttttgttggttaagggcactgcacttttctgttttttaatgtgggattttgcgtaaatattctgtacctaagactttgtgaaagtgtgtctgtgccataatcaacaaatgatatacatcacatgcaagtcaattttatttcaatctatcataagcagtaggcgtgcacgttaagaaaattctctggatattttcataaaattacatgctcccttacctgacaaaacttgttacagctttccaaaccaaaatttccacattttgtttctaatttttaatttcaatttaataattatttaatattctatttgaatttataatatagtaaagtgttgatatccaggaattccctgaggtgtcaactgagatttatatactgacagataacccagactcacccgctctctacagtgacttctgacacgatcttccaaacagaagggatttaaattttttcttaagggctttatgttgttattattattatctcacttaattcttaattcttatcaggtggatattattttcctttttctaaaccactgtacttcagtgtagcttattattagaagtcaacattacaatgatcaaatctttgaaagccaaaggcatacgtatcaaaaagtcacaaaaatatccttaaataagctttctttagccattatataccaaaacattaattataatattttaaaatttgtatataagagaaataaacagggtactgactcagtggtgacaatttttatgaagtagcctgctaggtgcttaatagatatatatacacacagatatatacatatacacatatatgtgtatatatacatacatacacatatacatttatatgtgtatatatatacctacatacatataaccttgtgatatggcatcattgatattttctagacaattatttccccagtgtttaaagagaaatactaataggcgagcatttaaaatgaactattgtcaggcatattatttaattacatcaaaggagtttaactgtttgacactttactcttgtttataacttgggtatttaactactagtaaaaatcacaaaattttaatgtctttaaaataaatgaccctgagggattcctgaccaagtatgtctgactatatattttacctaagttgtaaataaatggaaattttccaaagacagttatatcaagtagtttaaaaagtcatgaggcagggtgctgtggctcacgcctgtaatcccagcacttcgggaggtttaggtgggtagatcaccggaggtcaggagttcgagaccagcctgaccagtgtatgaaaccccatctctactaaaaatacaaaaattagccgggtgtggtggcacgcacctgtaatcccagctactcgggaggctgaggcaggagaattgcttgaacccaggagatggaggttgcagtgactgagatcacaccactgcactctactagcctgggtgacagagcaagactcccatctcaatctcaaaaaaaaatagtcatgaattatgcaattattctaattgtatctgcacttacgaagtcagaggtctcctttttcagtccctctgatagtcccacctaagtgctgtcctgctcctgtgaacactttcctgtgcaaccaaacaggaggtgccaggttcccagaactctctaacattacagatctctgtccatctttactaaaaaaaggaaatgtgagggaaagaaggggaagaactctagcataaataatgtattaatataaatatctatattgattttcaccccccattcccctttgctaatagaaaagagtctagctatgatgtgtcccaaatttaagagtgtgatgtgaaggactgaatttttgtttgttcgtttggtgagcttttcactcgtaggtgacatcttttgtatatgctgtaaagtctcagttaatggaatcctacagtgcatttctggctagctcggttggtagagcgtgagtctcttaatggaatccttaattagctagaattttcctgcaaatggctttggatgagggaaattctataaaatgacaatttggatatactttttgttaaatgagagcaattttctctgtatgctttgtctatgcatggctgtgcagggcccaaatgacttcactgacacctgtttccaggagggggtcttcagagcctccttaggctcttgtcagtatcataaataattcctcttcttatagcggatggggttaccaaaaaaaataaaaagtagggaagagcttctccatgggatcagatcacagctttggggagtgggatggggcctctatgctttgatctatgcatgagctggggtgagaagttcccacctgcacctgactgcaatgactgtaatggctggaattgtcacctcttctccctgataggctcttcctcacctggaggatcggggctggtgggagggcagggaaggggaggccatcagccagaatgtattttctttcagttccatttcctgaggaagaacttgcttttaaaggaggaaagggacagaatcagacctaaataaaattcctgagtatgcaatatttctctttagtgtctcttcacctccctttctgagtttctttcctacatcctggctcttcattttcccaatgcccaatataatcatggttgctgaaattctcactgccttctactttcctttccccatcaattaacccactacaaaatgacccctttcatttctcgcttaagcatacatggtgggtcatttaactaagtgttaggaagaaaacaatttaaagacactaattttacagtttgcgttctgtaaaaggatacttgctggataatctaagtgaattgatggattaggtcatttgggattgtgatatatattgttcttgctgacaagaaatgacccatgaatgtctagatctatcctgtccaatattgtagctacatgtggctatctaaatttaaatgtaatttaattaagccaggcataatggcacaagcctgtaattccggtgactcaggaggcttaggagggaagatggcttcaggccaggagtttgagaccagcctcggcaacatagtgagaccctgtctctgaaaaaaaatttttttaactagctaggcatggtggcatgcgcctgtagtcccagctattctgaaggctgaggtgggaggattgcttgagaccaggagttcaaggctgcagtgagccatgatcatgctactgccctccagcctgggcagcagagcaagacccctactctttaaaaaaattaatttaattagaaactccatttctcagttgcactaactacatttcaagtgttcagtaaccatagtggacagtgcagatgtagaaaatttccatcactgcaaaaattctattggacagcactggtgcagatcattgctactcaaaatgtgatccatgggccagcagcatcaatattacctgggagcttacagaaatgcagaatttcaggcccactgcagatctaccgaatcaaaatcttcctttagcaaaatttctcaaacgattagcactggcctacatccattttatccttccttagctattagggatgtgaggtccgagggcttcaaaaggtccccggaatagcttgttccttcatccactgtgtcctattcattcttcagctaactccagcaatgagctgaaactcattcatcacccttgctgagttttcttctcaatccttattcctaattctggttctagatgagccctacctacccagtggttgtatttttgtagccagtgtgggacacaggagattggcagaccaacacagctagcctctctctagccctccctccacctctaagtcactaacaatccatgtttgttcagtttgttgacatgtggcatgttcatttgttcacaacttaatcacgggggacatttcagaaaaatgtgtactaagttaaaaccatgtttagtctcctacaacttgtacattttcattttctcttatcagtagattgtccttgttgacatagctcatgcatgaggacacatagcagtacacacacattgaatgaattgttagtcatgcaaaaaaagaaaaggaatgaaccaagatgattgcaagttaatctcatttaagccctctaaaaaggcatgctttgctagatttagatctgttttccttacactcacttatcttgatgttcacatggttaataattccttaaaatagtgcctgaagaataatatttcatattcttgacccccaaataacagtttacttaattttataagatttttcccaatgagacttattttcaggaatccttctcttaataacttttacatattgatataatgtaccaaaacacaattgcctagagatgctttagctaatttttattaataaagaggacaatatttttgtcttcatggaacttatttttaacaggaatcaaggaagaaaatattcatgcagagctatgacttagaaagttataggggctgccactatacagcacttctaaagtaaaacatcttctatctccaactgggctgtcaacatagtggactttcatgttctatggatatgaattctttaaggatgtagcccttaattaagctgtaaaaacaatgcatctctcaaccttgacatttaggatctctcctgtctgccccctctacgccccactccaattaactcatcctacatctctcagatgtaagttggataagagtgggtttgaagtttggtaatacaagtggcagttttaaaacaccaaattctttagatcagctgaaaagaagagtgagaattgaaaattcctccactagtaattgttagccaatagaatagcctcccagagcagtccccacagcacttggttgccatgggtttctctcctctcactgcctgccccagtgccatgatgtctggggcttgtctcttctatggcatcccctgattgacttttgtatagcaacctctgtgtcaagtcagtaatatgatgccattgtaataggaggccttcctaaagaagtaactgcaacttttaaaacgtgatgattattggtttttataatacacaaagcattaattttttcttatcttattttctctttattatttctttccaacttttgtttggagacatttatgttagaagaaaaactataaagttttatcattgtagagaacagagagatcaaagacagctggactgtacctgtttgtgtaattatttctgatatttttaggaaaagaagtttaacagagtaactcagactgagactgttaaactctgttcatgataaactccatattacataatataggtgaacagattaattccctccatgtaactaagatactctatttacattatttatatactctcttagttttttatgcacttccaagttttagttggaaaaatgaaaaccaagctactacttaaaagttattaaaaacttcacataaaatatttcattttagctacaagttattcattgcataggattttataaatagtctgggtatttcataggaactgcatttcaaaagtgaattaaccaaacctaaaaaaagggttacttttaaaatgcattaaaataaagaagtttcatattcagttgataaggccattaaggtaggataatgcagttacatatacaaactaaaaaaggaaaaagaatatattttgtggtccttaatgtttgattgcactattgtttcccacagcttagccgtatctatttctgtataccaagtattaagctgatatgtagctaaatatttcttacagttctggtaactggtaactagtgctgtgaaaggttttggtattgtaacattcccagttttgtgagttatatattgtatattgaagatgactagtaaattcaagtaatatatttatctacagctgggaaaatataattattttcaaatcttcaagtaagttgtatcgaatgtttttcttcctcttaagtgagataaatctcacttttatgttaaaatgtctatttatacaacaggtttctccttttgctgttattttcatattaaaatttttcttatctttttatatcaaaataattatgctggctattcaaactgccaagatgtattttagtttgcaggatttttggcagacaaaatatttaataacaaatataaaagctttgtatattttgtggcattaggggcaagaattttacctttggatttctctatgtgaggcagtgctggtgtcagcaaagtcagtaacagacagtattacttgtaatcatcaaaagaaggtttccacaagttgtataaatcagtgcatttatttattatgttgtgaaacttaagctttatatgaaatacatattctagctcttttcctttttactgctgttgtttagagtgtgtagttctgttgatgatttacttatgtacttgaagtactcatttctgtcaaacagatgcccaactattttccttttaaaaaactgtattctttactgcaatagatagcggaatagtaatagacactttgttaaaaaaataagtttcatgtttaaaataaatatttttttaaaatataaagccaaaatgaattcaccaatattaaggatttaatgtagccaagggattcagtgtgttatattttgccaatatgtattttatcttcatgtcacaacttattttctgtagccaattctcagttttagttgaagagagatctcagtgattgtactgccaatatgacattcaaatgaacattaggaatcttgaaccatggctgagcgctgttgctcaggcctgtaatcccagcactttggaaagccgagggaggtagatcacctgaggtcaggagtttgagaccagcctggccaacttaatacaaaaattagccaggtgtggtggtgggtgcctgtaatcccagctactcaggaggctgaggcaggagaattgcttgaacccaggaggtggaggttgcagtgagccaagatctcgccactgcactccagcctgggcgacagagcgagactctgtctcagggggaaaaaaaagaattttgaaccccccaaaatatcacatatctagcagttctaggttccagggtggatatttttaacatatgtttgcatttggttctgggatagtaaccgttatggataattgtttgtttctgtcaagtcggtgagattttaattgtttgaattatttctatttaaaattactctcaatttaactgtttaaaaaactaaaaatttaaaacataatggcacaacatacgacacagaataaaacacatgttttcaaggaagaagaaaaaactgttttgacttaatgtgaagcaggggtttaccaaagaaaattgctttaataagccctaactttaactgttttcttctatgttacagtgttagcggttgatgtattgtgtactgtttaagaactcataggagactaataattaatttactataattttaaaggcaaagagttttatattaattttactgttgcacaagcagttattggaagtgggggaaaaaaagaaaactggtgagagaaattacatggaaattataggaaaaaggaacttgaattggtaatttggcaaagatttgggaacaaatagtttgaacatagatttctttcaccttatatgatagaaacacaaggcacacgtgagctgtatagtgtgctgagcacacccccagaaaacaaaaaatatcacattgatgaagtccgagactgtatctagatcttagcataactagtgaattcagggagcacatcctgctgctgaaattgagaagtcagtaagaaggtagttcagatgacctaatcattcaagacatttgatggagtccacacaagggtttatgatgtggggcaaatatctgtgctttctcatctcagtgattgatgtctggagaactagtcagacacacttagctggttcctatagaaaaacaccagtaaatgtggatcagaccataccctgcagaccaaggagattttcttaaacttgctaagcctttcttaaacttgccaagtattagcaatgataattgctaaatggattttttcctttcactgaaacaacaaaacaattattgaaattcacaatacctagagatgggaacatggtttaggtttatccagttctgtaactgactttggcattggctcattgtgtcctttctacaagttatgttttggtgacttggtgtccccagttagaaatggcacacaatattatcagttgttagtacttggtaacgtttcttttactaaaggaattatataagtatgaatcatacctaattttacaatttctttcccacggtcattttggatataaagatagacttcccagacagtgaggttagaaattagaagttcaaattgatatccctgatgtttaatttaaaaatgaaagtaaagttaaaattagtagcatttgtaccagagtagattatgggtattttcatctgttatattacatgttcatattattcattttaggataggccaaaactcacttctaaaatcttcaaaaattttgaatagtttcattttttcaatacttaagccaaatgacaattttatagatgtgaatatatgttttttaaagttaagtccttcatatcttttcttagtttaactccccaaagaggaaaatgtctctttaaaccagtagttaaaaagatggagtatgtgatgttcctttctctgtactgagttctgaatgtttaatccagagcatggatcactgactgcgttctctgactgtggaatggtattctttcatgcaaagtactttcaaaacttcccataaagaaactaaactagagattgtctttattaattaatggaactctgggtatgattaagggaattaaattagaaagtagaataacctagttaaaatcattatattagttatacatgagagtcagtgaacgatgacttgatttttacatgacatttgaattctgtcactatctgattcttgacctaaaggtttctttgctaaatctgatatttattatagtataatatgataatttggagctcctgttgcatctcactgccccaaaaatgttggaatgccatatgatacagggaaaagattggagttcatcaccgtggaattttgatctgtcttaatgacacaacttaattttcatgatgatagatctctgaatgattaatccagaatgatttggtacagtgactggaagaaattgtttttctgggaatttgcttcccataatgacctgatatacaggtgaccttagtataattgaaattaattataattttaattagaacatgctctgtttacagattataattgcgcagcattttaaaaaaatatacataattatgaggatgagagaattgcaaacttgaacagttcttttgttttctctccttttacttgaaaagctttcagaaagcttttgaaagatgacacagttttcatagcaacagtatgcaaattaggtttttctgccaagaaactcataaactaaagtatggaataacacaaatgcttaatcttaatcttggctttggattttgtaagcaaaagcattttctgcatcaatttttttcagtatgcagttgcatatttcattttttgattatgtcaaaagttgaattctcattttatgctgtgtttctcattagttgcagtaaagtgttgatttcattgctgcctttcaggccttcatcatacaaaccctcaccatttttcactcctgtgcttttgccataggtttttttttgtttttggtttttttccagcaactagtttttctactttcactctttcccaccagagtggtctctctaaaacaaatttgctaaagttcttaagtaggctcttttttctctaaattacagaatagcaaactaactcctaagcaagatgagtcagtgtctatgaccttgcctctttcttcctttttagtatcctcaccaaccttccctctgttgacttttgtaatccaggaatttggaactacttatgacttagtgccttggcataatcacatgccatagatgaacatgttcaagactcagttcaaatttaactttctgtgaagccctacctgacttccctaggcaggtattttctccatgcctatagtatattgaaactttttctgttaaaataacataacatttcaattacacacacacaacctgtctcttccactgaacttctctctccccctttgtattctcagtgtctagctacacataataggactttgataaatatttttgaatgaaggtaatagaaaacccgaacttctctatatttgtgtactttcacaaacaaaggcttagaattccacatgaaagtccacatgaggtaagtgtgcattcatgagcatgtgtgcactctgggcaaaccaacagaagataaacagcaaggaagagcagttgttttgtgaaaaataatcatctgttagctgtaaatcagaaatattggccaaatcagaattcttgtttctaaaatgaggcttctaaaattttcacataactgccaaactcttatttgtaattcttaaatatgccctaaagatcatctttctcttttatagacatttagtgtatacagtccacataaatacatatactgattacctacagacaataatgagacttcagaaagaatcaaaagcaatagtgatggtggaatttttaaataatattcagctggggggaaatagactgagtttgtgtgatttcaggttatttagagttattaatgtaaacataagaaggcttgtgactcttatcaccctctatagaatataaagactaaaaataaaaactattacctctgggcctgtttttctttgggattagataaagcctttctaccatatcaccaaatactcataaaggctaacacagaaagcttttccaagttaataatttctaaaattaaatatcagggccaggtgtggtggctgacacctgtaatcccagcactttgggaggccgaagtgggtggattacctgaggtcaggagctcgagacaagtcaacatggtgaaacctcatctctgctaaaaatacaaaaactagccaggcatggtgatgcacacctgtaatcccagctactcgggaggctgaggcaggagaattgcttgaacccaggaggcggaggttgcagtgagctgagattgcaccactgcactccagcctgggcgacagagtgagactctgtctcaaaaaaaagaaaaaaaatcaaaataattgtaattaactgaaatgccctgttccttcattcacttgatagacttttctacctgctctatacttggcactcaattagattctggggatacagataaaataagacaaagctcccatctggtagagtccaagtttgttttcacagttatttttccacagtctgtttaaggtattaggaggacttttataaaccgagtgtttttcaggttacttcagagaggagtctccttccacccaaaaaaactaaccaaattattttatcataaagaggtaatcccatttttatgtccacaatttttacatttttgtatcagccaccaataattttgactgttttgtcaagtacatatttcatcaatcctatttccacagccgtacatgtgatcccagtgactgatagatctgtagaatgtgaactcacatttaaagtttattttgggaaggcatatatgccttttgatgacacacacaccaaaatatataagagctgtgcatggtaaacccacagtagaagggaaaaagtaatgctttctggtatacttcagaggctccatttgaagatgtgcgttgatgtttccttgattattttgaatgaggagtaggcggtaatatttaacaggtagcatacgtatctaagcatatagtaaatattactagtacttgtgtgccatgaggcactaatacataggtgaaacaaaaatatttttagttctaaaaaattctctagatatttatggatggttaggcaatagggttccttcatgagaaggaaaaaactgtatctttattgtcagtaagtgtggaaaaaaacccgacttgtatgtgtattcacagtttgataggcatattttgaagtcattgttttccatcagtattaagtatcatccatttctatgttctctagcaaaagaaaattcttagtgtgatacagctttactctttgtttgactttgtacaaggtccacaaaaggaggaggctcaaaagattggacactttaccctgacattcagcacattcattttatctttcgataaagataaccagaaatcatttgcctcttgtttattatcatgttgaaaacacaacagtatagttccttttgtcccttacattggaaaaggtattttaaatttagccttgccgtattatttatagttaggaatttactacattttggtagtctgttttgaaactaagcacttgtgtctgaaagatgcagataatatctatctatttattacacagtgggctctgtttgctgcagaaaagagtgaaacttttaactgcttagcacacttgccagtgaaatatacctgacagagcagaggttataactttggctctaattacttttagtaatggtaagacaacgtgagttttgtttgtttacatgctgtttacaatggcataattttaaaaatatatacaattgagatatttattgcctactattttaaagatgttttatgtgttttcacctttggaatatattgttacatttccttgtacagataattttggtggctttgttaatgtagctagtaatttttatgactactaagtgaccagttttcggtgccttttattgtgggatgcatgattatgtatttattgtacggaagtcactgacgtgtgtatttttgtactttgctgaaagtaatggttgatcctgatgtacatgatgatgaaagacatctttcccaaagggcactgccttgagatcatccttctcaaataaaaagaatgcatttgaagaaa

SEQ ID NO: 126642 - DNA, 4246 bp, Homo sapiens
  Payload ID: 4830
  Gene Symbol: DGKH
  Gene Name: diacylglycerol kinase, eta
  Uniprot ID: Q86XP1
  ENST ID: ENST00000337343
  CDS Start-End: 22-3684
tccccgcaggagtcggagaggatggcaggggccggaggccagcaccaccctccgggcgccgctggaggagcggccgccggagccggcgccgcggtcacctccgccgctgcctcggcggggccgggagaggattcgtctgacagcgaagcggagcaagagggaccccagaaactgatccgcaaagtgtctacctcggggcagatccggaccaagaccagtattaaagagggacagctattgaagcaaaccagttctttccaaaggtggaaaaagcgatacttcaaacttcgaggccgcaccctttactatgcaaaggactcaaagtctctgatatttgatgaagttgacctctcagatgctagtgtagctgaagcaagcacgaaaaatgctaacaacagcttcacgatcatcactccattcagaaggctaatgctgtgtgctgagaacagaaaggagatggaggattggatcagctcactgaagtctgtacagaccagagaaccctacgaggtggcccagtttaatgtggaacatttctcagggatgcacaactggtacgcctgctcccacgcccgacccaccttctgtaacgtgtgcagagagagtctttctggagtcacctcccatggcctgtcctgcgaagtgtgtaaattcaaggctcacaaaagatgtgcagtgagagcaacaaataactgtaaatggactaccctggcctccatcgggaaggacattatagaagatgaagatggcgtcgcgatgcctcaccagtggcttgagggcaacctgcctgtaagtgccaagtgtgctgtctgcgacaaaacatgtggcagtgttctccgtctacaggattggaaatgcctttggtgtaagacaatggtacacactgcctgcaaagatttataccatccaatatgtccacttggtcaatgtaaagtatctatcatacctccaattgcactaaacagcaccgattccgatggtttctgtagagcaacattttcgttctgtgttagtcctctattggtttttgtcaattctaagagtggagataatcagggagtaaagttcctccgtcgctttaaacagttgctaaatccggctcaggtgtttgatttaatgaatggaggtcctcatttaggtttaagattatttcagaagtttgacaatttccggattcttgtttgtggaggcgatggaagtgtaggttgggttttgtcagaaatcgataagctcaacttgaataaacagtgtcagctgggagtgttgcctttgggtacaggaaatgaccttgcccgagttcttggctggggaggttcatatgacgatgacacccaacttcctcagatcctagagaaactggaacgagccagtaccaaaatgttggacaggtggagtataatgacatatgaactcaaattgccaccaaaagcttccctacttccaggacctccagaagcatctgaagaattttatatgacgatttatgaagactcagttgcaacgcatcttacaaaaatcctcaattctgatgaacatgcagtggtcatatcttctgccaagacgctatgtgaaactgtaaaggacttcgttgccaaagtagaaaagacgtatgacaaaaccttggaaaatgccgttgtagctgatgccgtggccagtaaatgttcagtcctaaacgagaagctcgaacaactgctgcaggctttgcacacagattcccaggctgcgcctgttctccctggcctcagccctctcattgtggaagaagatgctgtggaatcgtccagtgaagagtccctgggtgaaagcaaagagcagcttggggatgacgttacaaaaccttcctcccagaaagccgtcaaaccaagggaaatcatgttgcgggcaaatagtttaaagaaagcagtgaggcaagtcattgaggaagccggaaaagttatggatgacccgacagttcacccctgtgaaccagctaatcagtcctctgattatgacagcacagaaacagatgaatctaaggaggaagctaaagatgatggtgccaaagaatcaataactgttaaaactgcacctcggtctccagatgcccgggcaagttatggccattcccaaactgattctgtccctggtccagctgtggcagccagcaaagaaaacctccctgtgctcaataccagaataatctgcccaggtttaagagcaggactggctgcctcaattgctgggagttcgattatcaacaaaatgttactggcaaacattgatccttttggtgccacgccgtttattgacccggatctagattccgtagatggatattcagaaaaatgtgtcatgaacaattactttgggattggattagatgcaaaaatttcattagaatttaataataaaagagaggagcaccctgaaaaatgcaggagccgaactaaaaacttgatgtggtatggagtccttggaacccgggagttattacagagatcgtacaagaatttagaacaaagggttcaacttgagtgtgatgggcagtatattcctcttcccagcttgcaaggcatagccgtgttgaacattcccagctatgctggaggcactaacttttggggtggaactaaagaggatgatatatttgctgcaccatcctttgatgacaagatcctggaagttgtagcaatatttgatagcatgcaaatggcagtttcaagggtcattaaactgcagcatcatcgaatagcccagtgccgtacagtgaaaatcactatatttggtgacgaaggagtcccagtgcaagtggatggtgaagcgtgggttcagcctccagggattatcaaaattgtgcacaaaaacagagcacaaatgctaacaagggacagagcctttgagagcactctgaaatcttgggaagataagcagaagtgtgattctggtaaaccagttctccgaacccatttgtacatccatcacgccattgacttggcaacagaagaggtgtcgcagatgcagctatgctcccaggctgcagaggagctcattactaggatatgtgacgcagccacaattcactgtcttttggagcaagaactggcccatgctgtgaatgcctgctcccatgccctgaataaagccaacccaaggtgcccggagagtcttacaagagacactgccactgaaatagccatcaatgtgaaggcgctgtataatgaaacagaatctttgctagttggcagggttcctttgcagctggaatcgccacatgaagagcgagtatccaatgccttacactctgtggaggtggaattacagaaactgacagagattccttggctttattatatcttacacccaaatgaggatgaggaacctcctatggattgcaccaaaaggaacaacagaagcaccgtatttcgaatagtgccaaagtttaaaaaggaaaaggttcagaagcagaagacaagttcacagcctgttcagaaatggggcacagaggaagttgctgcttggctggatctgctcaatttgggagagtacaaagatatcttcatccgtcatgacatcagaggggctgaacttttgcatctggaaaggcgagatcttaaggatctggggataccgaaagtgggtcatgtgaagcgaattctccagggaattaaagagcttggaaggagcactccacagtcggaggtgtaatcatattggtgctatttcttggaagagaagttattgccacttaatacaaagtccttggaagcaagtggctgttcttgtagttttctgcatagataagtaagcaccactgaagcacctctgtggcttgatattttgctgtgggtgaaattttgatttgaggtattagaaaatatttttgtgccgaacaatacattccacaaagccattttctttttgtgcaaacctgacatgttcaaatatattcacaatggtaataaggtaggaggaatctgagacgattgcattgtctaaacagtggaattgcaaaatgtttactttccatagatctggtctgatggaatgttcctactgtgcaactgcataacaatatgtggttaaaacttcctaggtttcattacgggggggcattggccattttcttaaaatcataggttaggagactaaaatataaattaagttgtgatttgaatgtagattggtatcacctccaactcctagtgcttagtggtcaaatatgttgaaaacctttccaatactatgaatgaatgcaaatcttaatgca

SEQ ID NO: 126643 - DNA, 4202 bp, Homo sapiens
  Payload ID: 4830
  Gene Symbol: DGKH
  Gene Name: diacylglycerol kinase, eta
  Uniprot ID: Q86XP1
  ENST ID: ENST00000379274
  CDS Start-End: 104-3598
ttttgaacgtcacaaggaagaaacggtgcccggcgcagcttgccctggagcgtagctggagtgcggctgagttttcgctccgctgaagccggagtcggagaggatggcaggggccggaggccagcaccaccctccgggcgccgctggaggagcggccgccggagccggcgccgcggtcacctccgccgctgcctcggcggggccgggagaggattcgtctgacagcgaagcggagcaagagggaccccagaaactgatccgcaaagtgtctacctcggggcagatccggaccaagaccagtattaaagagggacagctattgaagcaaaccagttctttccaaaggtggaaaaagcgatacttcaaacttcgaggccgcaccctttactatgcaaaggactcaaagtctctgatatttgatgaagttgacctctcagatgctagtgtagctgaagcaagcacgaaaaatgctaacaacagcttcacgatcatcactccattcagaaggctaatgctgtgtgctgagaacagaaaggagatggaggattggatcagctcactgaagtctgtacagaccagagaaccctacgaggtggcccagtttaatgtggaacatttctcagggatgcacaactggtacgcctgctcccacgcccgacccaccttctgtaacgtgtgcagagagagtctttctggagtcacctcccatggcctgtcctgcgaagtgtgtaaattcaaggctcacaaaagatgtgcagtgagagcaacaaataactgtaaatggactaccctggcctccatcgggaaggacattatagaagatgaagatggcgtcgcgatgcctcaccagtggcttgagggcaacctgcctgtaagtgccaagtgtgctgtctgcgacaaaacatgtggcagtgttctccgtctacaggattggaaatgcctttggtgtaagacaatggtacacactgcctgcaaagatttataccatccaatatgtccacttggtcaatgtaaagtatctatcatacctccaattgcactaaacagcaccgattccgatggtttctgtagagcaacattttcgttctgtgttagtcctctattggtttttgtcaattctaagagtggagataatcagggagtaaagttcctccgtcgctttaaacagttgctaaatccggctcaggtgtttgatttaatgaatggaggtcctcatttaggtttaagattatttcagaagtttgacaatttccggattcttgtttgtggaggcgatggaagtgtaggttgggttttgtcagaaatcgataagctcaacttgaataaacagtgtcagctgggagtgttgcctttgggtacaggaaatgaccttgcccgagttcttggctggggaggttcatatgacgatgacacccaacttcctcagatcctagagaaactggaacgagccagtaccaaaatgttggacaggtggagtataatgacatatgaactcaaattgccaccaaaagcttccctacttccaggacctccagaagcatctgaagaattttatatgacgatttatgaagactcagttgcaacgcatcttacaaaaatcctcaattctgatgaacatgcagtggtcatatcttctgccaagacgctatgtgaaactgtaaaggacttcgttgccaaagtagaaaagacgtatgacaaaaccttggaaaatgccgttgtagctgatgccgtggccagtaaatgttcagtcctaaacgagaagctcgaacaactgctgcaggctttgcacacagattcccaggctgcgcctgttctccctggcctcagccctctcattgtggaagaagatgctgtggaatcgtccagtgaagagtccctgggtgaaagcaaagagcagcttggggatgacgttacaaaaccttcctcccagaaagccgtcaaaccaagggaaatcatgttgcgggcaaatagtttaaagaaagcagtgaggcaagtcattgaggaagccggaaaagttatggatgacccgacagttcacccctgtgaaccagctaatcagtcctctgattatgacagcacagaaacagatgaatctaaggaggaagctaaagatgatggtgccaaagaatcaataactgttaaaactgcacctcggtctccagatgcccgggcaagttatggccattcccaaactgattctgtccctggtccagctgtggcagccagcaaagaaaacctccctgtgctcaataccagaataatctgcccaggtttaagagcaggactggctgcctcaattgctgggagttcgattatcaacaaaatgttactggcaaacattgatccttttggtgccacgccgtttattgacccggatctagattccgtagatggatattcagaaaaatgtgtcatgaacaattactttgggattggattagatgcaaaaatttcattagaatttaataataaaagagaggagcaccctgaaaaatgcaggagccgaactaaaaacttgatgtggtatggagtccttggaacccgggagttattacagagatcgtacaagaatttagaacaaagggttcaacttgagtgtgatgggcagtatattcctcttcccagcttgcaaggcatagccgtgttgaacattcccagctatgctggaggcactaacttttggggtggaactaaagaggatgatatatttgctgcaccatcctttgatgacaagatcctggaagttgtagcaatatttgatagcatgcaaatggcagtttcaagggtcattaaactgcagcatcatcgaatagcccagtgccgtacagtgaaaatcactatatttggtgacgaaggagtcccagtgcaagtggatggtgaagcgtgggttcagcctccagggattatcaaaattgtgcacaaaaacagagcacaaatgctaacaagggacagagcctttgagagcactctgaaatcttgggaagataagcagaagtgtgattctggtaaaccagttctccgaacccatttgtacatccatcacgccattgacttggcaacagaagaggtgtcgcagatgcagctatgctcccaggctgcagaggagctcattactaggatatgtgacgcagccacaattcactgtcttttggagcaagaactggcccatgctgtgaatgcctgctcccatgccctgaataaagccaacccaaggtgcccggagagtcttacaagagacactgccactgaaatagccatcaatgtgaaggcgctgtataatgaaacagaatctttgctagttggcagggttcctttgcagctggaatcgccacatgaagagcgagtatccaatgccttacactctgtggaggtggaattacagaaactgacagagattccttggctttattatatcttacacccaaatgaggatgaggaacctcctatggattgcaccaaaaggaacaacagaagcaccgtatttcgaatagtgccaaagtttaaaaaggaaaaggttcagaagcagaagacaagttcacagcctggatctggggataccgaaagtgggtcatgtgaagcgaattctccagggaattaaagagcttggaaggagcactccacagtcggaggtgtaatcatattggtgctatttcttggaagagaagttattgccacttaatacaaagtccttggaagcaagtggctgttcttgtagttttctgcatagataagtaagcaccactgaagcacctctgtggcttgatattttgctgtgggtgaaattttgatttgaggtattagaaaatatttttgtgccgaacaatacattccacaaagccattttctttttgtgcaaacctgacatgttcaaatatattcacaatggtaataaggtaggaggaatctgagacgattgcattgtctaaacagtggaattgcaaaatgtttactttccatagatctggtctgatggaatgttcctactgtgcaactgcataacaatatgtggttaaaacttcctaggtttcattacgggggggcattggccattttcttaaaatcataggttaggagactaaaatataaattaagttgtgatttgaatgtagattggtatcacctccaactcctagtgcttagtggtcaaatatgttgaaaacctttccaatactatgaatgaatgcaaatcttaatgcacgatg

SEQ ID NO: 126644 - DNA, 3957 bp, Homo sapiens
  Payload ID: 4830
  Gene Symbol: DGKH
  Gene Name: diacylglycerol kinase, eta
  Uniprot ID: Q86XP1
  ENST ID: ENST00000536612
  CDS Start-End: 90-3392
ggggccttcaagaagagagttctcagagcagactcagctttaggtgctgaaatgaatttctcaagatcatcactccattcagaaggctaatgctgtgtgctgagaacagaaaggagatggaggattggatcagctcactgaagtctgtacagaccagagaaccctacgaggtggcccagtttaatgtggaacatttctcagggatgcacaactggtacgcctgctcccacgcccgacccaccttctgtaacgtgtgcagagagagtctttctggagtcacctcccatggcctgtcctgcgaagtgtgtaaattcaaggctcacaaaagatgtgcagtgagagcaacaaataactgtaaatggactaccctggcctccatcgggaaggacattatagaagatgaagatggcgtcgcgatgcctcaccagtggcttgagggcaacctgcctgtaagtgccaagtgtgctgtctgcgacaaaacatgtggcagtgttctccgtctacaggattggaaatgcctttggtgtaagacaatggtacacactgcctgcaaagatttataccatccaatatgtccacttggtcaatgtaaagtatctatcatacctccaattgcactaaacagcaccgattccgatggtttctgtagagcaacattttcgttctgtgttagtcctctattggtttttgtcaattctaagagtggagataatcagggagtaaagttcctccgtcgctttaaacagttgctaaatccggctcaggtgtttgatttaatgaatggaggtcctcatttaggtttaagattatttcagaagtttgacaatttccggattcttgtttgtggaggcgatggaagtgtaggttgggttttgtcagaaatcgataagctcaacttgaataaacagtgtcagctgggagtgttgcctttgggtacaggaaatgaccttgcccgagttcttggctggggaggttcatatgacgatgacacccaacttcctcagatcctagagaaactggaacgagccagtaccaaaatgttggacaggtggagtataatgacatatgaactcaaattgccaccaaaagcttccctacttccaggacctccagaagcatctgaagaattttatatgacgatttatgaagactcagttgcaacgcatcttacaaaaatcctcaattctgatgaacatgcagtggtcatatcttctgccaagacgctatgtgaaactgtaaaggacttcgttgccaaagtagaaaagacgtatgacaaaaccttggaaaatgccgttgtagctgatgccgtggccagtaaatgttcagtcctaaacgagaagctcgaacaactgctgcaggctttgcacacagattcccaggctgcgcctgttctccctggcctcagccctctcattgtggaagaagatgctgtggaatcgtccagtgaagagtccctgggtgaaagcaaagagcagcttggggatgacgttacaaaaccttcctcccagaaagccgtcaaaccaagggaaatcatgttgcgggcaaatagtttaaagaaagcagtgaggcaagtcattgaggaagccggaaaagttatggatgacccgacagttcacccctgtgaaccagctaatcagtcctctgattatgacagcacagaaacagatgaatctaaggaggaagctaaagatgatggtgccaaagaatcaataactgttaaaactgcacctcggtctccagatgcccgggcaagttatggccattcccaaactgattctgtccctggtccagctgtggcagccagcaaagaaaacctccctgtgctcaataccagaataatctgcccaggtttaagagcaggactggctgcctcaattgctgggagttcgattatcaacaaaatgttactggcaaacattgatccttttggtgccacgccgtttattgacccggatctagattccgtagatggatattcagaaaaatgtgtcatgaacaattactttgggattggattagatgcaaaaatttcattagaatttaataataaaagagaggagcaccctgaaaaatgcaggagccgaactaaaaacttgatgtggtatggagtccttggaacccgggagttattacagagatcgtacaagaatttagaacaaagggttcaacttgagtgtgatgggcagtatattcctcttcccagcttgcaaggcatagccgtgttgaacattcccagctatgctggaggcactaacttttggggtggaactaaagaggatgatatatttgctgcaccatcctttgatgacaagatcctggaagttgtagcaatatttgatagcatgcaaatggcagtttcaagggtcattaaactgcagcatcatcgaatagcccagtgccgtacagtgaaaatcactatatttggtgacgaaggagtcccagtgcaagtggatggtgaagcgtgggttcagcctccagggattatcaaaattgtgcacaaaaacagagcacaaatgctaacaagggacagagcctttgagagcactctgaaatcttgggaagataagcagaagtgtgattctggtaaaccagttctccgaacccatttgtacatccatcacgccattgacttggcaacagaagaggtgtcgcagatgcagctatgctcccaggctgcagaggagctcattactaggatatgtgacgcagccacaattcactgtcttttggagcaagaactggcccatgctgtgaatgcctgctcccatgccctgaataaagccaacccaaggtgcccggagagtcttacaagagacactgccactgaaatagccatcaatgtgaaggcgctgtataatgaaacagaatctttgctagttggcagggttcctttgcagctggaatcgccacatgaagagcgagtatccaatgccttacactctgtggaggtggaattacagaaactgacagagattccttggctttattatatcttacacccaaatgaggatgaggaacctcctatggattgcaccaaaaggaacaacagaagcaccgtatttcgaatagtgccaaagtttaaaaaggaaaaggttcagaagcagaagacaagttcacagcctgttcagaaatggggcacagaggaagttgctgcttggctggatctgctcaatttgggagagtacaaagatatcttcatccgtcatgacatcagaggggctgaacttttgcatctggaaaggcgagatcttaagaacacagtaggagaaaaaagagacaccaaagaaaatggtaaacatatggatctggggataccgaaagtgggtcatgtgaagcgaattctccagggaattaaagagcttggaaggagcactccacagtcggaggtgtaatcatattggtgctatttcttggaagagaagttattgccacttaatacaaagtccttggaagcaagtggctgttcttgtagttttctgcatagataagtaagcaccactgaagcacctctgtggcttgatattttgctgtgggtgaaattttgatttgaggtattagaaaatatttttgtgccgaacaatacattccacaaagccattttctttttgtgcaaacctgacatgttcaaatatattcacaatggtaataaggtaggaggaatctgagacgattgcattgtctaaacagtggaattgcaaaatgtttactttccatagatctggtctgatggaatgttcctactgtgcaactgcataacaatatgtggttaaaacttcctaggtttcattacgggggggcattggccattttcttaaaatcataggttaggagactaaaatataaattaagttgtgatttgaatgtagattggtatcacctccaactcctagtgcttagtggtcaaatatgttgaaaacctttccaatactatgaatgaatgcaaatcttaatgcacga

SEQ ID NO: 126645 - DNA, 777 bp, Homo sapiens
  Payload ID: 4830
  Gene Symbol: DGKH
  Gene Name: diacylglycerol kinase, eta
  ENST ID: ENST00000611224
  CDS Start-End: 1-189
gcggccgccggagccggcgccgcggtcacctccgccgctgcctcggcggggccgggagaggattcgtctgacagcgaagcggagcaagagggaccccagaaactgatccgcaaagtgtctacctcggggcagatccggaccaagggtttcatcatgttggccaggctggtcacttctgagctcaagtgatccgcccacctgggcctcccaaagtgctgggattacaggtgtgagccaccgcgcccagccgaaaacaatacaattgtgaagcagttctacaccatgttcgtagcagcgttattcataggagccaaaaagtggaagcaacccaactgttcactgatggatgaatggataaacaaaatgtggcacacacatataataatgggacattattcagccttgaactggagggaaattctgacaggtcactgtgaggtgaaaggtcgcattttcaggtgtcagggaatctttactgcaatttgctgacattattgaacaccaccacatttagcatattttcacataacaaaaaacactacatgtatgtacttaacattttatagggtcgatcttccttattcatggtttcagtatttgctaatttacctactcactaacatttatttgtgactccaaaatcaatacttgtatgtaatttttcacatgtgaaaaattggagttgcccaatgtgcacattcgcagctaaggttgaacctggctgtgctctgtcttcttgttttagctctcatgcaataaacaagcaccctttcatga

SEQ ID NO: 126646 - DNA, 3449 bp, Homo sapiens
  Payload ID: 4830
  Gene Symbol: DGKH
  Gene Name: diacylglycerol kinase, eta
  Uniprot ID: Q86XP1
  ENST ID: ENST00000628433
  CDS Start-End: 133-3387
attattagaaatctttagtcatctcattccctgtgagctgaaaggggccttcaagaagagagttctcagagcagactcagctttaggtgctgaaatgaatttctcaagatcatcactccattcagaaggctaatgctgtgtgctgagaacagaaaggagatggaggattggatcagctcactgaagtctgtacagaccagagaaccctacgaggtggcccagtttaatgtggaacatttctcagggatgcacaactggtacgcctgctcccacgcccgacccaccttctgtaacgtgtgcagagagagtctttctggagtcacctcccatggcctgtcctgcgaagtgtgtaaattcaaggctcacaaaagatgtgcagtgagagcaacaaataactgtaaatggactaccctggcctccatcgggaaggacattatagaagatgaagatggcgtcgcgatgcctcaccagtggcttgagggcaacctgcctgtaagtgccaagtgtgctgtctgcgacaaaacatgtggcagtgttctccgtctacaggattggaaatgcctttggtgtaagacaatggtacacactgcctgcaaagatttataccatccaatatgtccacttggtcaatgtaaagtatctatcatacctccaattgcactaaacagcaccgattccgatggtttctgtagagcaacattttcgttctgtgttagtcctctattggtttttgtcaattctaagagtggagataatcagggagtaaagttcctccgtcgctttaaacagttgctaaatccggctcaggtgtttgatttaatgaatggaggtcctcatttaggtttaagattatttcagaagtttgacaatttccggattcttgtttgtggaggcgatggaagtgtaggttgggttttgtcagaaatcgataagctcaacttgaataaacagtgtcagctgggagtgttgcctttgggtacaggaaatgaccttgcccgagttcttggctggggaggttcatatgacgatgacacccaacttcctcagatcctagagaaactggaacgagccagtaccaaaatgttggacaggtggagtataatgacatatgaactcaaattgccaccaaaagcttccctacttccaggacctccagaagcatctgaagaattttatatgacgatttatgaagactcagttgcaacgcatcttacaaaaatcctcaattctgatgaacatgcagtggtcatatcttctgccaagacgctatgtgaaactgtaaaggacttcgttgccaaagtagaaaagacgtatgacaaaaccttggaaaatgccgttgtagctgatgccgtggccagtaaatgttcagtcctaaacgagaagctcgaacaactgctgcaggctttgcacacagattcccaggctgcgcctgttctccctggcctcagccctctcattgtggaagaagatgctgtggaatcgtccagtgaagagtccctgggtgaaagcaaagagcagcttggggatgacgttacaaaaccttcctcccagaaagccgtcaaaccaagggaaatcatgttgcgggcaaatagtttaaagaaagcagtgaggcaagtcattgaggaagccggaaaagttatggatgacccgacagttcacccctgtgaaccagctaatcagtcctctgattatgacagcacagaaacagatgaatctaaggaggaagctaaagatgatggtgccaaagaatcaataactgttaaaactgcacctcggtctccagatgcccgggcaagttatggccattcccaaactgattctgtccctggtccagctgtggcagccagcaaagaaaacctccctgtgctcaataccagaataatctgcccaggtttaagagcaggactggctgcctcaattgctgggagttcgattatcaacaaaatgttactggcaaacattgatccttttggtgccacgccgtttattgacccggatctagattccgtagatggatattcagaaaaatgtgtcatgaacaattactttgggattggattagatgcaaaaatttcattagaatttaataataaaagagaggagcaccctgaaaaatgcaggagccgaactaaaaacttgatgtggtatggagtccttggaacccgggagttattacagagatcgtacaagaatttagaacaaagggttcaacttgagtgtgatgggcagtatattcctcttcccagcttgcaaggcatagccgtgttgaacattcccagctatgctggaggcactaacttttggggtggaactaaagaggatgatatatttgctgcaccatcctttgatgacaagatcctggaagttgtagcaatatttgatagcatgcaaatggcagtttcaagggtcattaaactgcagcatcatcgaatagcccagtgccgtacagtgaaaatcactatatttggtgacgaaggagtcccagtgcaagtggatggtgaagcgtgggttcagcctccagggattatcaaaattgtgcacaaaaacagagcacaaatgctaacaagggacagagcctttgagagcactctgaaatcttgggaagataagcagaagtgtgattctggtaaaccagttctccgaacccatttgtacatccatcacgccattgacttggcaacagaagaggtgtcgcagatgcagctatgctcccaggctgcagaggagctcattactaggatatgtgacgcagccacaattcactgtcttttggagcaagaactggcccatgctgtgaatgcctgctcccatgccctgaataaagccaacccaaggtgcccggagagtcttacaagagacactgccactgaaatagccatcaatgtgaaggcgctgtataatgaaacagaatctttgctagttggcagggttcctttgcagctggaatcgccacatgaagagcgagtatccaatgccttacactctgtggaggtggaattacagaaactgacagagattccttggctttattatatcttacacccaaatgaggatgaggaacctcctatggattgcaccaaaaggaacaacagaagcaccgtatttcgaatagtgccaaagtttaaaaaggaaaaggttcagaagcagaagacaagttcacagcctgttcagaaatggggcacagaggaagttgctgcttggctggatctgctcaatttgggagagtacaaagatatcttcatccgtcatgacatcagaggggctgaacttttgcatctggaaaggcgagatcttaaggatctggggataccgaaagtgggtcatgtgaagcgaattctccagggaattaaagagcttggaaggagcactccacagtcggaggtgtaatcatattggtgctatttcttggaagagaagttattgccacttaatacaaagtccttggaagc

SEQ ID NO: 126647 - DNA, 3045 bp, Homo sapiens
  Payload ID: 4830
  Gene Symbol: DGKH
  Gene Name: diacylglycerol kinase, eta
  ENST ID: ENST00000626247
  CDS Start-End: 93-362
aaaggggccttcaagaagagagttctcagagcagactcagctttaggtgctgaaatgaatttctcaagatcatcactccattcagaaggctaatgctgtgtgctgagaacagaaaggagatggaggattggatcagctcactgaagtctgtacagaccagagaaccctacgaggtggcccagtttaatgtggaacatttctcagggatgcacaactggtacgcctgctcccacgcccgacccaccttctgtaacgtgtgcagagagagtctttctggagtcacctcccatggcctgtcctgcgaaggtacacactgcctgcaaagatttataccatccaatatgtccacttggtcaatgtaaagtatctatcatacctccaattgcactaaacagcaccgattccgatggtttctgtagagcaacattttcgttctgtgttagtcctctattggtttttgtcaattctaagagtggagataatcagggagtaaagttcctccgtcgctttaaacagttgctaaatccggctcaggtgtttgatttaatgaatggaggtcctcatttaggtttaagattatttcagaagtttgacaatttccggattcttgtttgtggaggcgatggaagtgtaggttgggttttgtcagaaatcgataagctcaacttgaataaacagtgtcagctgggagtgttgcctttgggtacaggaaatgaccttgcccgagttcttggctggggaggttcatatgacgatgacacccaacttcctcagatcctagagaaactggaacgagccagtaccaaaatgttggacaggtggagtataatgacatatgaactcaaattgccaccaaaagcttccctacttccaggacctccagaagcatctgaagaattttatatgacgatttatgaagactcagttgcaacgcatcttacaaaaatcctcaattctgatgaacatgcagtggtcatatcttctgccaagacgctatgtgaaactgtaaaggacttcgttgccaaagtagaaaagacgtatgacaaaaccttggaaaatgccgttgtagctgatgccgtggccagtaaatgttcagtcctaaacgagaagctcgaacaactgctgcaggctttgcacacagattcccaggctgcgcctgttctccctggcctcagccctctcattgtggaagaagatgctgtggaatcgtccagtgaagagtccctgggtgaaagcaaagagcagcttggggatgacgttacaaaaccttcctcccagaaagccgtcaaaccaagggaaatcatgttgcgggcaaatagtttaaagaaagcagtgaggcaagtcattgaggaagccggaaaagttatggatgacccgacagttcacccctgtgaaccagctaatcagtcctctgattatgacagcacagaaacagatgaatctaaggaggaagctaaagatgatggtgccaaagaatcaataactgttaaaactgcacctcggtctccagatgcccgggcaagttatggccattcccaaactgattctgtccctggtccagctgtggcagccagcaaagaaaacctccctgtgctcaataccagaataatctgcccaggtttaagagcaggactggctgcctcaattgctgggagttcgattatcaacaaaatgttactggcaaacattgatccttttggtgccacgccgtttattgacccggatctagattccgtagatggatattcagaaaaatgtgtcatgaacaattactttgggattggattagatgcaaaaatttcattagaatttaataataaaagagaggagcaccctgaaaaatgcaggagccgaactaaaaacttgatgtggtatggagtccttggaacccgggagttattacagagatcgtacaagaatttagaacaaagggttcaacttgagtgtgatgggcagtatattcctcttcccagcttgcaaggcatagccgtgttgaacattcccagctatgctggaggcactaacttttggggtggaactaaagaggatgatatatttgctgcaccatcctttgatgacaagatcctggaagttgtagcaatatttgatagcatgcaaatggcagtttcaagggtcattaaactgcagcatcatcgaatagcccagtgccgtacagtgaaaatcactatatttggtgacgaaggagtcccagtgcaagtggatggtgaagcgtgggttcagcctccagggattatcaaaattgtgcacaaaaacagagcacaaatgctaacaagggacagagcctttgagagcactctgaaatcttgggaagataagcagaagtgtgattctggtaaaccagttctccgaacccatttgtacatccatcacgccattgacttggcaacagaagaggtgtcgcagatgcagctatgctcccaggctgcagaggagctcattactaggatatgtgacgcagccacaattcactgtcttttggagcaagaactggcccatgctgtgaatgcctgctcccatgccctgaataaagccaacccaaggtgcccggagagtcttacaagagacactgccactgaaatagccatcaatgtgaaggcgctgtataatgaaacagaatctttgctagttggcagggttcctttgcagctggaatcgccacatgaagagcgagtatccaatgccttacactctgtggaggtggaattacagaaactgacagagattccttggctttattatatcttacacccaaatgaggatgaggaacctcctatggattgcaccaaaaggaacaacagaagcaccgtatttcgaatagtgccaaagtttaaaaaggaaaaggttcagaagcagaagacaagttcacagcctggatctggggataccgaaagtgggtcatgtgaagcgaattctccagggaattaaagagcttggaaggagcactccacagtcggaggtgtaatcatattggtgctatttcttggaagagaagttattgccacttaatacaaagtccttggaagc

SEQ ID NO: 126648 - DNA, 3517 bp, Homo sapiens
  Payload ID: 4830
  Gene Symbol: DGKH
  Gene Name: diacylglycerol kinase, eta
  ENST ID: ENST00000627777
  CDS Start-End: 99-3185
gagctgaaaggggccttcaagaagagagttctcagagcagactcagctttaggtgctgaaatgaatttctcaagatcatcactccattcagaaggctaatgctgtgtgctgagaacagaaaggagatggaggattggatcagctcactgaagtctgtacagaccagagaaccctacgaggtggcccagtttaatgtggaacatttctcagggatgcacaactggtacgcctgctcccacgcccgacccaccttctgtaacgtgtgcagagagagtctttctggagtcacctcccatggcctgtcctgcgaagtgtgtaaattcaaggctcacaaaagatgtgcagtgagagcaacaaataactgtaaatggactaccctggcctccatcgggaaggacattatagaagatgaagatggcgtcgcgatgcctcaccagtggcttgagggcaacctgcctgtaagtgccaagtgtgctgtctgcgacaaaacatgtggcagtgttctccgtctacaggattggaaatgcctttggtgtaagacaatggtacacactgcctgcaaagatttataccatccaatatgtccacttggtcaatgtaaagtatctatcatacctccaattgcactaaacagcaccgattccgatggtttctgtagagcaacattttcgttctgtgttagtcctctattggtttttgtcaattctaagagtggagataatcagggagtaaagttcctccgtcgctttaaacagttgctaaatccggctcaggtgtttgatttaatgaatggaggtcctcatttaggtttaagattatttcagaagtttgacaatttccggattcttgtttgtggaggcgatggaagtgtaggttgggttttgtcagaaatcgataagctcaacttgaataaacagtgtcagctgggagtgttgcctttgggtacaggaaatgaccttgcccgagttcttggctggggaggttcatatgacgatgacacccaacttcctcagatcctagagaaactggaacgagccagtaccaaaatgttggacaggtggagtataatgacatatgaactcaaattgccaccaaaagcttccctacttccaggacctccagaagcatctgaagaattttatatgacgatttatgaagactcagttgcaacgcatcttacaaaaatcctcaattctgatgaacatgcagtggtcatatcttctgccaagacgctatgtgaaactgtaaaggacttcgttgccaaagtagaaaagacgtatgacaaaaccttggaaaatgccgttgtagctgatgccgtggccagtaaatgttcagtcctaaacgagaagctcgaacaactgctgcaggctttgcacacagattcccaggctgcgcctgttctccctggcctcagccctctcattgtggaagaagatgctgtggaatcgtccagtgaagagtccctgggtgaaagcaaagagcagcttggggatgacgttacaaaaccttcctcccagaaagccgtcaaaccaagggaaatcatgttgcgggcaaatagtttaaagaaagcagtgaggcaagtcattgaggaagccggaaaagttatggatgacccgacagttcacccctgtgaaccagctaatcagtcctctgattatgacagcacagaaacagatgaatctaaggaggaagctaaagatgatggtgccaaagaatcaataactgttaaaactgcacctcggtctccagatgcccgggcaagttatggccattcccaaactgattctgtccctggtccagctgtggcagccagcaaagaaaacctccctgtgctcaataccagaataatctgcccaggtttaagagcaggactggctgcctcaattgctgggagttcgattatcaacaaaatgttactggcaaacattgatccttttggtgccacgccgtttattgacccggatctagattccgtagatggatattcagaaaaatgtgtcatgaacaattactttgggattggattagatgcaaaaatttcattagaatttaataataaaagagaggagcaccctgaaaaatgcaggagccgaactaaaaacttgatgtggtatggagtccttggaacccgggagttattacagagatcgtacaagaatttagaacaaagggttcaacttgagtgtgatgggcagtatattcctcttcccagcttgcaaggcatagccgtgttgaacattcccagctatgctggaggcactaacttttggggtggaactaaagaggatgatatatttgctgcaccatcctttgatgacaagatcctggaagttgtagcaatatttgatagcatgcaaatggcagtttcaagggtcattaaactgcagcatcatcgaatagcccagtgccgtacagtgaaaatcactatatttggtgacgaaggagtcccagtgcaagtggatggtgaagcgtgggttcagcctccagggattatcaaaattgtgcacaaaaacagagcacaaatgctaacaagggacagagcctttgagagcactctgaaatcttgggaagataagcagaagtgtgattctggtaaaccagttctccgaacccatttgtacatccatcacgccattgacttggcaacagaagaggtgtcgcagatgcagctatgctcccaggctgcagaggagctcattactaggatatgtgacgcagccacaattcactgtcttttggagcaagaactggcccatgctgtgaatgcctgctcccatgccctgaataaagccaacccaaggtgcccggagagtcttacaagagacactgccactgaaatagccatcaatgtgaaggcgctgtataatgaaacagaatctttgctagttggcagggttcctttgcagctggaatcgccacatgaagagcgagtatccaatgccttacactctgtggaggtggaattacagaaactgacagagattccttggctttattatatcttacacccaaatgaggatgaggaacctcctatggattgcaccaaaaggaacaacagaagcaccgtatttcgaatagtgccaaagtttaaaaaggaaaaggttcagaagcagaagacaagttcacagcctgcactgccgctgcactctgttttgcatcttctttggccaacctttgctttgtaatgcattgagcatgtagaaattaagggggttttgctcttaactttggtagttcagaaatggggcacagaggaagttgctgcttggctggatctgctcaatttgggagagtacaaagatatcttcatccgtcatgacatcagaggggctgaacttttgcatctggaaaggcgagatcttaaggatctggggataccgaaagtgggtcatgtgaagcgaattctccagggaattaaagagcttggaaggagcactccacagtcggaggtgtaatcatattggtgctatttcttggaagagaagttattgccacttaatacaaagtccttggaagc

SEQ ID NO: 126649 - DNA, 5805 bp, Homo sapiens
  Payload ID: 4831
  Gene Symbol: DGKG
  Gene Name: diacylglycerol kinase, gamma 90kDa
  Uniprot ID: P49619
  ENST ID: ENST00000265022
  CDS Start-End: 541-2916
gccgcagtgccgtagtagcgggccacggagatagacagctttggagctgctgaactccgagcacagggtgaagaccccggcgctaccaaccacagcctggcagcctggtctccgcggcacccactggggctgcatccccctcccccgagagggctgcgcaggcgggaagacgcccagaggccagcttcggtcccccttctgtctctcggttcctctttcctcccaagtaagggaataaaccgcgaagaaggagcgccccgggccaccgcgcaaccaagtgttgcctggtgaggaagagccaggacttctgaatttaccttgaatacagacaggaggatgttgcctaaggaatagcagagatcttgtctcatcttctgagaggtgcctgctgctgctgtatacacttgagtgctcccagaagtctcctgaaaggcttacatcgcaaacctgcaatgagccaggccctgggctgggcctccacttcagcctagtgaacaaaactccatcactgccctttagccactcacataaagtttaaaaatgggtgaagaacggtgggtctccctcactccagaagaatttgaccaactccagaaatattcagaatattcctccaagaagataaaagatgccttgactgaatttaatgagggtgggagcctcaaacaatatgacccacatgagccgattagctatgatgtcttcaagctgttcatgagggcgtacctggaggtggaccttccccagccactgagcactcacctcttcctggccttcagccagaagcccagacacgagacctctgaccacccgacggagggagccagcaacagtgaggccaacagcgcagatactaatatacagaatgcagataatgccaccaaagcagacgaggcctgtgcccctgatactgaatcaaatatggctgagaagcaagcaccagctgaagaccaagtggctgcgacccccctggaaccccccgtccctcggtcttcaagctcggaatccccagtggtatacctgaaggatgttgtgtgctacctgtccctgctggagacggggaggcctcaggataagctggagttcatgtttcgcctctatgattcagatgagaacggtctcctggaccaagcggagatggattgcattgtcaaccaaatgctgcatattgcccagtacctggagtgggatcccacagagctgaggcctatattgaaggagatgctgcaagggatggactacgaccgggacggctttgtgtctctacaggaatgggtccatggagggatgaccaccatcccattgctggtcctcctggggatggatgactctggctccaagggggatgggcggcacgcctggaccatgaagcacttcaagaaaccaacctactgcaacttctgccatatcatgctcatgggcgtccgcaagcaaggcctgtgctgcacttactgtaaatacactgtccacgaacgctgtgtgtccagaaacattcctggttgtgtcaaaacgtactcaaaagccaaaaggagtggtgaggtgatgcagcacgcatgggtggaagggaactcctccgtcaagtgtgaccggtgccacaaaagtatcaagtgctaccagagtgtcaccgcgcggcactgcgtgtggtgccggatgacgtttcaccgcaaatgtgaattatcaacgttgtgtgacggtggggaactcagagaccacatcttactgcccacctccatatgccccatcacccgggacaggccaggtgagaagtctgatggctgcgtgtccgccaagggcgaacttgtcatgcagtataagatcatccccaccccgggtacccaccccctgctggtcttggtgaaccccaagagtggagggagacaaggagaaagaattcttcggaaattccactatctgctcaaccccaaacaagttttcaacctggacaatggggggcctactccagggttgaactttttccgtgatactccagacttccgtgttttggcctgtggtggagatgggacagttggctggattttggattgcattgataaggccaactttgcaaagcatccaccagtggctgtcctgcctcttggaacaggaaatgaccttgcccgttgtctccgctggggaggaggttatgaagggggcagcttgacaaaaatcctgaaagacattgagcagagccccttggtgatgctggaccgctggcatctggaagtcatccccagagaggaagtggaaaacggggaccaggtcccatacagcatcatgaacaactatttctccattggtgtggacgcttccattgcacacagattccatgtgatgagagagaaacatcctgaaaaattcaacagcaggatgaagaacaagctgtggtactttgaatttggcacctcggagacttttgcagcgacctgcaagaaactccacgaccacattgagttggagtgtgatggggttggggtggacctgagcaacatcttcctggaaggcattgccattctcaacattcccagcatgtacggaggcaccaatctctggggagaaaacaagaagaaccgggctgtgatccgggaaagcaggaagggtgtcactgaccccaaagaactgaaattctgcgttcaagacctcagtgaccagctccttgaagtggtggggctagaaggagccatggagatggggcagatctacaccggcctgaagagtgcaggcaggaggctggcccagtgcgcctctgtcaccatcaggacaaacaagctgctgccaatgcaagtggatggagaaccctggatgcagccatgttgcacgattaaaattactcacaagaaccaagcgcccatgatgatggggcctccccagaagagcagcttcttctcgttgagaaggaagagccgttcaaaagactaaacagtgtgccaaacaccagctaaaccaagagagaaagcaagaaactataatgcacactcacacacaatttatgtgcacactcacacatgcacacacacacacacatacacactcttctctaaccagtggaagcaaagccacccttcgggaagaaaacgtcaccttgccatacattctgtttcaacagtgggtacacccctaacagagccagtgccaacaaaacattttgaatggacttagggcccatgaggttgtggctggcttaggcagcaacctccacattcccacaggccttgagcagaattttctgagactgaagggaaatccccctttctttctaccagccctgcaagtttcctcatggacgctcgcgaggagcaggctgcaggtttcctgcctatggtgagatcagatgtggccaagggaaggagctctggttccagagaatttgcacaaagttccctctgtacagagacaaaacggcctccggctctcagagcataatccttggcagggctcagcaggcgcacgttggtttcttggtcgtcctttgagtgacaacttctccgtgaacctgctgaagaggcagaaaggctgtggaaagctgtatttccattcttgggtttctgcgccgtcggtgggcacttgttattttccaggaaccttctcctggtgtctacatgtttgcttagaggcggctccaagagcccccagagctgcctgcatagcacaccttagatgtggtatttattttcttagttctgtgaacacctgggagggagagcggagaaactgggatttatttttcaaattggtgtcataatattgtgtaaaaagggaaggaaaaaaaaaaccacccccagcttctttctttttcaagccaaagcgtgtttcctgtttgagttccaagccctggtggcagactattcctgaaggcagaaaagatgggaaggaaggaactttgctggggaaaccaggagacggttccctcctgcttctttgcactcaccactcccagagtatgacctgaaggaccttctgatggtcttaacgtgtgtgcgcgcgtgtgtgtgtgtgtgtgcgtgtatatatatatatttagcctatatatttatatatatatatatataaatatttatttactgatggacttttcctcattggaaaaaaaaaacataggtagtatgagacagaaagtggtaaggaaaaagaaggttctcactcccccactccaccgtttcattgtcaggacgcatctccctgtggtgatcacaagggttaaggggaatgaaagtagctccctattatgaacgaagagaccgagaactcctattctggatcctcaaaacaagcatgaaagacctgctgggctggatttactctcccatttgtcagataagaaaattgagtctcagaaaagttcagagacttttccatggtgtcttggctaatgcagcttgagagtaggtgccgttacaaagatatttaatggagaaaagaacccacacatctcagagtagggtcatttctggtcactgaaaagtgagtccacttggatccaggttgccagggaggaacaaacgtacagcacatgcgtggatgggatatccccacacaagaaaacgagcgcctcatgctgcttcccagaggttctctctgacctgaatggaaaagaagttggtctgagatcgaaggtactaaacagatcatcagactgaactctccacatgtcacctcatcatggtcatcatagtctcttagtttggaaacaaccttggctgcagggatgacctcagtggagagtcacaagaaggactgaggcgtcttctgcaagatactgccagccaggacagaggggtctcagcagagctcagtgggcttcattcagcaagtgccagcattaccatcctttcccaagggcaaggccatgcagagcttcattgggcctccatccctctctgagatttatcagtggaaacttggacccacttgatatcgttccactgagctgcctctaatcttgcattggacaggagctttggacaaagaagggaatattaagattgtgtgtacaaatggcacttaactgtgaaggaccacctaggagcaagatcttggaccattctgctcaacctaacagtgcagaatgctaagtaaggggaaaaccaggccacctgaagaatatctttaatgatggtattcttggtgatgggaccaacaagctccagaattactacaggtactatcttggaagccacttgtttctgaaactgaggcaggttcaggtttggggtcactgattctaagacatttacagaagttcgtgcatgtgtttcagccatgatccccaagattgaggctattgagacatggcactatcaacaggtgaaattgattctcagagactcacaggtctcatgaaggggcagtgcagaaaatggcccttacctgctgcaccctagtgcacaggacttgcaatgttgcttgagagacatatcccaagtccttcttagaggcatggagtataacaacttcagtggaattgcacttccagtttggtaaccttagtaaatcttgtgttgttgtttaatcgtgccttgcaaatcatcctttaaacactatgactgtggtttcttgtggtggagtccctcatcatagtgaccctcatagcaacctctgaggttagcagagaaggtattattatctcgatctcaatgaggagaacaaggcttaatgaggtttagtgacttctcaaagccacatggttagtcaggggagaacctaatcccttatttcttatcttattctgattctggccatgctacaaacatgttctcacctgccccccatgcttctaccccaacagcaataaaaactgtaaagcaggaa

SEQ ID NO: 126650 - DNA, 3445 bp, Homo sapiens
  Payload ID: 4831
  Gene Symbol: DGKG
  Gene Name: diacylglycerol kinase, gamma 90kDa
  Uniprot ID: P49619
  ENST ID: ENST00000344484
  CDS Start-End: 292-2592
ggagcgccccgggccaccgcgcaaccaagtgttgcctggtgaggaagagccaggacttctgaatttaccttgaatacagacaggaggatgttgcctaaggaatagcagagatcttgtctcatcttctgagaggtgcctgctgctgctgtatacacttgagtgctcccagaagtctcctgaaaggcttacatcgcaaacctgcaatgagccaggccctgggctgggcctccacttcagcctagtgaacaaaactccatcactgccctttagccactcacataaagtttaaaaatgggtgaagaacggtgggtctccctcactccagaagaatttgaccaactccagaaatattcagaatattcctccaagaagataaaagatgccttgactgaatttaatgagggtgggagcctcaaacaatatgacccacatgagccgattagctatgatgtcttcaagctgttcatgagggcgtacctggaggtggaccttccccagccactgagcactcacctcttcctggccttcagccagaagcccagacacgagacctctgaccacccgacggagggagccagcaacagtgaggccaacagcgcagatactaatatacagaatgcagataatgccaccaaagcagacgaggcctgtgcccctgatactgaatcaaatatggctgagaagcaagcaccagctgaagaccaagtggctgcgacccccctggaaccccccgtccctcggtcttcaagctcggaatccccagtggtatacctgaaggatgttgtgtgctacctgtccctgctggagacggggaggcctcaggataagctggagttcatgtttcgcctctatgattcagatgagaacggtctcctggaccaagcggagatggattgcattgtcaaccaaatgctgcatattgcccagtacctggagtgggatcccacagagctgaggcctatattgaaggagatgctgcaagggatggactacgaccgggacggctttgtgtctctacaggaatgggtccatggagggatgaccaccatcccattgctggtcctcctggggatggatgactctggctccaagggggatgggcggcacgcctggaccatgaagcacttcaagaaaccaacctactgcaacttctgccatatcatgctcatgggcgtccgcaagcaaggcctgtgctgcacttactgtaaatacactgtccacgaacgctgtgtgtccagaaacattcctggttgtgtcaaaacgtactcaaaagccaaaaggagtggtgaggtgatgcagcacgcatgggtggaagggaactcctccgtcaagtgtgaccggtgccacaaaagtatcaagtgctaccagagtgtcaccgcgcggcactgcgtgtggtgccggatgacgtttcaccgcaaatgtgaattatcaacgttgtgtgacggtggggaactcagagaccacatcttactgcccacctccatatgccccatcacccgggacaggccaggtgagaagtctgatggctgcgtgtccgccaagggcgaacttgtcatgcagtataagatcatccccaccccgggtacccaccccctgctggtcttggtgaaccccaagagtggagggagacaaggagaaaggttgaactttttccgtgatactccagacttccgtgttttggcctgtggtggagatgggacagttggctggattttggattgcattgataaggccaactttgcaaagcatccaccagtggctgtcctgcctcttggaacaggaaatgaccttgcccgttgtctccgctggggaggaggttatgaagggggcagcttgacaaaaatcctgaaagacattgagcagagccccttggtgatgctggaccgctggcatctggaagtcatccccagagaggaagtggaaaacggggaccaggtcccatacagcatcatgaacaactatttctccattggtgtggacgcttccattgcacacagattccatgtgatgagagagaaacatcctgaaaaattcaacagcaggatgaagaacaagctgtggtactttgaatttggcacctcggagacttttgcagcgacctgcaagaaactccacgaccacattgagttggagtgtgatggggttggggtggacctgagcaacatcttcctggaaggcattgccattctcaacattcccagcatgtacggaggcaccaatctctggggagaaaacaagaagaaccgggctgtgatccgggaaagcaggaagggtgtcactgaccccaaagaactgaaattctgcgttcaagacctcagtgaccagctccttgaagtggtggggctagaaggagccatggagatggggcagatctacaccggcctgaagagtgcaggcaggaggctggcccagtgcgcctctgtcaccatcaggacaaacaagctgctgccaatgcaagtggatggagaaccctggatgcagccatgttgcacgattaaaattactcacaagaaccaagcgcccatgatgatggggcctccccagaagagcagcttcttctcgttgagaaggaagagccgttcaaaagactaaacagtgtgccaaacaccagctaaaccaagagagaaagcaagaaactataatgcacactcacacacaatttatgtgcacactcacacatgcacacacacacacacatacacactcttctctaaccagtggaagcaaagccacccttcgggaagaaaacgtcaccttgccatacattctgtttcaacagtgggtacacccctaacagagccagtgccaacaaaacattttgaatggacttagggcccatgaggttgtggctggcttaggcagcaacctccacattcccacaggccttgagcagaattttctgagactgaagggaaatccccctttctttctaccagccctgcaagtttcctcatggacgctcgcgaggagcaggctgcaggtttcctgcctatggtgagatcagatgtggccaagggaaggagctctggttccagagaatttgcacaaagttccctctgtacagagacaaaacggcctccggctctcagagcataatccttggcagggctcagcaggcgcacgttggtttcttggtcgtcctttgagtgacaacttctccgtgaacctgctgaagaggcagaaaggctgtggaaagctgtatttccattcttgggtttctgcgccgtcggtgggcacttgttattttccaggaaccttctcctggtgtctacatgtttgcttagaggcggctccaagagcccccagagctgcctgcatagcacaccttagatgtggtatttattttcttagttctgtgaacacctgggagggagagcggagaaactgggatttatttttcaaattggtgtcataatattgtgtaaaaagggaaggaaaaaaaaaa

SEQ ID NO: 126651 - DNA, 3152 bp, Homo sapiens
  Payload ID: 4831
  Gene Symbol: DGKG
  Gene Name: diacylglycerol kinase, gamma 90kDa
  Uniprot ID: P49619
  ENST ID: ENST00000382164
  CDS Start-End: 261-2519
ttgcctggtgaggaagagccaggacttctgaatttaccttgaatacagacaggaggatgttgcctaaggaatagcagagatcttgtctcatcttctgagaggtgcctgctgctgctgtatacacttgagtgctcccagaagtctcctgaaaggcttacatcgcaaacctgcaatgagccaggccctgggctgggcctccacttcagcctagtgaacaaaactccatcactgccctttagccactcacataaagtttaaaaatgggtgaagaacggtgggtctccctcactccagaagaatttgaccaactccagaaatattcagaatattcctccaagaagataaaagatgccttgactgaatttaatgagggtgggagcctcaaacaatatgacccacatgagccgattagctatgatgtcttcaagctgttcatgagggcgtacctggaggtggaccttccccagccactgagcactcacctcttcctggccttcagccagaagcccagacacgagacctctgaccacccgacggagggagccagcaacagtgaggccaacagcgcagatactaatatacagaatgcagataatgccaccaaagcagacgaggcctgtgcccctgatactgaatcaaatatggctgagaagcaagcaccagctgaagaccaagtggctgcgacccccctggaaccccccgtccctcggtcttcaagctcggaatccccagtggtatacctgaaggatgttgtgtgctacctgtccctgctggagacggggaggcctcaggataagctggagttcatgtttcgcctctatgattcagatgagaacggtctcctggaccaagcggagatggattgcattgtcaaccaaatgctgcatattgcccagtacctggagtgggatcccacagagctgaggcctatattgaaggagatgctgcaagggatggactacgaccgggacggctttgtgtctctacaggaatgggtccatggagggatgaccaccatcccattgctggtcctcctggggatggatgactctggctccaagggggatgggcggcacgcctggaccatgaagcacttcaagaaaccaacctactgcaacttctgccatatcatgctcatgggcgtccgcaagcaaggcctgtgctgcacttactgtaaatacactgtccacgaacgctgtgtgtccagaaacattcctggttgtgtcaaaacgtactcaaaagccaaaaggagtggtgagtttcaccgcaaatgtgaattatcaacgttgtgtgacggtggggaactcagagaccacatcttactgcccacctccatatgccccatcacccgggacaggccaggtgagaagtctgatggctgcgtgtccgccaagggcgaacttgtcatgcagtataagatcatccccaccccgggtacccaccccctgctggtcttggtgaaccccaagagtggagggagacaaggagaaagaattcttcggaaattccactatctgctcaaccccaaacaagttttcaacctggacaatggggggcctactccagggttgaactttttccgtgatactccagacttccgtgttttggcctgtggtggagatgggacagttggctggattttggattgcattgataaggccaactttgcaaagcatccaccagtggctgtcctgcctcttggaacaggaaatgaccttgcccgttgtctccgctggggaggaggttatgaagggggcagcttgacaaaaatcctgaaagacattgagcagagccccttggtgatgctggaccgctggcatctggaagtcatccccagagaggaagtggaaaacggggaccaggtcccatacagcatcatgaacaactatttctccattggtgtggacgcttccattgcacacagattccatgtgatgagagagaaacatcctgaaaaattcaacagcaggatgaagaacaagctgtggtactttgaatttggcacctcggagacttttgcagcgacctgcaagaaactccacgaccacattgagttggagtgtgatggggttggggtggacctgagcaacatcttcctggaaggcattgccattctcaacattcccagcatgtacggaggcaccaatctctggggagaaaacaagaagaaccgggctgtgatccgggaaagcaggaagggtgtcactgaccccaaagaactgaaattctgcgttcaagacctcagtgaccagctccttgaagtggtggggctagaaggagccatggagatggggcagatctacaccggcctgaagagtgcaggcaggaggctggcccagtgcgcctctgtcaccatcaggacaaacaagctgctgccaatgcaagtggatggagaaccctggatgcagccatgttgcacgattaaaattactcacaagaaccaagcgcccatgatgatggggcctccccagaagagcagcttcttctcgttgagaaggaagagccgttcaaaagactaaacagtgtgccaaacaccagctaaaccaagagagaaagcaagaaactataatgcacactcacacacaatttatgtgcacactcacacatgcacacacacacacacatacacactcttctctaaccagtggaagcaaagccacccttcgggaagaaaacgtcaccttgccatacattctgtttcaacagtgggtacacccctaacagagccagtgccaacaaaacattttgaatggacttagggcccatgaggttgtggctggcttaggcagcaacctccacattcccacaggccttgagcagaattttctgagactgaagggaaatccccctttctttctaccagccctgcaagtttcctcatggacgctcgcgaggagcaggctgcaggtttcctgcctatggtgagatcagatgtggccaagggaaggagctctggttccagagaatttgcacaaagttccctctgtacagagacaaaacggcctccggctctcagagcataatccttggcagggctcagcaggcgcacgttggtttcttggtcgtcctttgagtgacaacttctccgtgaacctgctgaagaggcagaaaggctgtggaaagctgtatttccattcttgggtttctgcgcc

SEQ ID NO: 126652 - DNA, 462 bp, Homo sapiens
  Payload ID: 4831
  Gene Symbol: DGKG
  Gene Name: diacylglycerol kinase, gamma 90kDa
  ENST ID: ENST00000437018
  CDS Start-End: 1-462
catattgcccagtacctggagtgggatcccacagagctgaggcctggctccaagggggatgggcggcacgcctggaccatgaagcacttcaagaaaccaacctactgcaacttctgccatatcatgctcatgggcgtccgcaagcaaggcctgtgctgcacttactgtaaatacactgtccacgaacgctgtgtgtccagaaacattcctggttgtgtcaaaacgtactcaaaagccaaaaggagtggtgaggtgatgcagcacgcatgggtggaagggaactcctccgtcaagtgtgaccggtgccacaaaagtatcaagtgctaccagagtgtcaccgcgcggcactgcgtgtggtgccggatgacgtttcaccgcaaatgtgaattatcaacgttgtgtgacggtggggaactcagagaccacatcttactgcccacctccatatgccccatcacccgg

SEQ ID NO: 126653 - DNA, 3895 bp, Homo sapiens
  Payload ID: 4832
  Gene Symbol: DGKI
  Gene Name: diacylglycerol kinase, iota
  Uniprot ID: O75912
  ENST ID: ENST00000288490
  CDS Start-End: 2-3199
gatggatgctgcgggaaggggctgccatttgctgcccctgccagcggcgcgcggacctgcccgcgctcctgcagccgccgccgccgccgccgccagcccgcccggcccctgcagcggcgccgcctgcgctccctccgcggccgccggagcgggcgccatgaaccccagctcctcggcgggagaggagaaaggggcgacgggcggcagcagcagcagcggaagcggcgccgggagctgctgcctgggcgccgagggcggcgcggacccgcggggcgcagggtcagccgcggcggcgggggccgctgccctggacgagcccgcggccgccggccagaaggagaaggacgaagcgctggaggagaagctgaggaacttaactttccggaagcaggtctcgtacaggaaagcaatctcccgggcaggcctccagcatctggctcctgcacatcccctcagccttcctgtggcaaatggtccagccaaggagcccagagcgactttggactggagtgagaatgccgtgaatggagaacacctgtggctggagaccaacgtctcgggagacctctgctaccttggagaggagaactgccaagtcagatttgcaaaatcagctctcaggaggaagtgtgcagtctgtaaaatcgtcgtccacaccgcctgcattgagcagctagaaaagattaatttcagatgtaaaccaacatttcgagaaggaggctcaaggtcaccaagagaaaattttgtacgtcatcactgggtgcacaggcgtcggcaggaggggaaatgtaagcagtgtggtaagggcttccagcaaaagttctccttccacagtaaagagattgtggctatcagctgttcctggtgcaagcaggcgtttcacaataaggtgacctgcttcatgctgcatcacattgaagaaccctgctccctgggggctcatgctgctgttattgtcccgcccacttggatcattaaggtgaagaaacctcagaactccctgaaggcttcaaatcggaagaagaagagaacaagctttaaaagaaaagccagtaaaagagggatggaacaggaaaacaaaggtcgtccttttgtgataaaacccatctcttctcctctcatgaaacccttgcttgtatttgtgaatcccaagagtggaggcaaccagggaaccaaagtcctgcagatgttcatgtggtacctgaatccacggcaagtctttgatctttctcaggaagggccaaaagatgcgcttgaattgtataggaaagtaccaaatctgcgaattctggcctgtggtggggatggaacggtgggctggatcctttccatcctggatgaactgcagctgagccctcagcctcctgtgggggtccttcctctggggactgggaatgacctggctcgaactctcaactggggagggggctacactgatgaacctgtttctaagatcctgtgtcaagtggaagatgggacagttgtacagctagatcgctggaacctccatgtggaaagaaaccccgacttgcctccagaagaacttgaagatggcgtatgtaagctccctctgaatgttttcaataactacttcagccttggatttgatgcccatgtcacactggagttccatgaatccagagaagcaaatccagagaaattcaacagtcgttttcgaaataaaatgttctatgcaggggcagctttttctgacttcctacagagaagttctagagatctatccaaacatgttaaagttgtttgtgatggaacagatctcaccccaaagattcaggaactgaagttccagtgtatagtatttttaaatatacccagatattgtgctggcacaatgccctggggaaacccaggtgatcaccatgatttcgaacctcagcgtcatgatgatggttatattgaagtcattggatttaccatggcctctttggcagccctgcaagttgggggccatggagagaggctacaccagtgtcgagaagtcatgcttctaacttacaaatccatccccatgcaagtggatggggagccctgtaggttggccccagctatgattcggatctccctgaggaatcaggccaacatggtacagaagagcaagaggagaacatccatgcctttactcaatgatccccagtctgtcccagatcgtctgaggatccgggtgaacaaaatcagtttacaagactatgaaggattccactatgacaaggagaaactccgagaagcttctatttcagactggttaagaaccattgctggggaactagtgcagtcatttggagcgatacctctgggtattctagttgtgcgtggagactgtgatttggagacttgccgtatgtacatagaccgcctacaggaggacctacagtcagtttcttctggctcccagagagttcattaccaggaccatgaaacctccttccccagggctctctcagcacagaggctctctcctcggtggtgcttcctagatgacagatctcaggaacatttgcactttgtgatggagatttcccaagatgagatttttattctggacccagatatggtggtgtcacagccggcggggacacctccgggcatgcctgacctggtggtggaacaagcctcggggatctcagactggtggaatcctgccctgcggaaacgcatgctgagtgacagtgggctggggatgatagctccctattatgaggactcagatctgaaagatctcagccactcccgcgtgctacagtcaccagtctcttcagaagatcatgcaattttgcaggcagtaatagctggtgatcttatgaagctaatagaaagctataaaaatggaggcagtctgctaattcagggaccagaccactgttcactccttcactacgcagctaaaaccggcaacggggagattgtgaaatatatccttgaccacggaccttccgagttattggatatggcagacagtgaaacgggtgagactgcactgcacaaggctgcctgccagcggaaccgggctgtgtgccagcttctggtggatgcaggagcatctctgagaaagacggactccaagggtaagacacctcaagaaagagcacagcaggctggggacccagacttggctgcttacctagaaagccgtcagaactataaggtcattggccatgaggacctggaaactgctgtttgaccctggtattcgggcaaagaggacatgagcaagcgtatcacatctgccctccctgcaattgggcagctcccctggaagaagctgatggaattcatatatctgtctctctcctgcaagaatctacctgagaccatgccactagcttttaagggctaccaagatgtacaacagaacatgatagcccattgagaaggaggcaggatacctggagatttgtggaatacagtacgagttccacaaaatttgatccttattgcttccagcaagtagcatgaacttctgtgttcacctgtataatttattttaaagattcaaaggatgttcgtataaatggcactgctccatcctccccctatgcattggtttttttccctgtaccatacaattctactgtaactacccatcaacttaaagaaaaatattatctcttctctttacattcagtcttggaagaccacaagattgtctgaaggccttctaaaaccttctgaatgtcctgcagaaatataactgtaaaaccacttccatttctaagactaaatatatcaagactatttagtgactctctctgcatgtccccctcacccgccaaccctccgtttcattatataggagctgggaagtgccacatggataatgtcaacttgtgtgctatatctctgaggaatggtgaggtggcatgggagatgtctgtgc

SEQ ID NO: 126654 - DNA, 12928 bp, Homo sapiens
  Payload ID: 4832
  Gene Symbol: DGKI
  Gene Name: diacylglycerol kinase, iota
  ENST ID: ENST00000453654
  CDS Start-End: 541-2745
cggccagaaggagaaggacgaagcgctggaggagaagctgaggaacttaactttccggaagcaggtctcgtacagaatctgcacccctagagcaaatagtctctgtcgactgtaaagctgaaggtttgaaaaggcagtgcgagtgagctggagaatgccgtgaatggagaacacctgtggctggagaccaacgtctcgggagacctctgctaccttggagaggagaactgccaagtcagatttgcaaaatcagctctcaggaggaagtgtgcagtctgtaaaatcgtcgtccacaccgcctgcattgagcagctagaaaagattaatttcagatgtaaaccaacatttcgagaaggaggctcaaggtcaccaagagaaaattttgtacgtcatcactgggtgcacaggcgtcggcaggaggggaaatgtaagcagtgtggtaagggcttccagcaaaagttctccttccacagtaaagagattgtggctatcagctgttcctggtgcaagcaggcgtttcacaataaggtgacctgcttcatgctgcatcacattgaagaaccctgctccctgggggctcatgctgctgttattgtcccgcccacttggatcattaaggtgaagaaacctcagaactccctgaaggcttcaaatcggaagaagaagagaacaagctttaaaagaaaagccagtaaaagagggatggaacaggaaaacaaaggtcgtccttttgtgataaaacccatctcttctcctctcatgaaacccttgcttgtatttgtgaatcccaagagtggaggcaaccagggaaccaaagtcctgcagatgttcatgtggtacctgaatccacggcaagtctttgatctttctcaggaagggccaaaagatgcgcttgaattgtataggaaagtaccaaatctgcgaattctggcctgtggtggggatggaacggtgggctggatcctttccatcctggatgaactgcagctgagccctcagcctcctgtgggggtccttcctctggggactgggaatgacctggctcgaactctcaactggggagggggctacactgatgaacctgtttctaagatcctgtgtcaagtggaagatgggacagttgtacagctagatcgctggaacctccatgtggaaagaaaccccgacttgcctccagaagaacttgaagatggcgtatgtaagctccctctgaatgttttcaataactacttcagccttggatttgatgcccatgtcacactggagttccatgaatccagagaagcaaatccagagaaattcaacagtcgttttcgaaataaaatgttctatgcaggggcagctttttctgacttcctacagagaagttctagagatctatccaaacatgttaaagttgtttgtgatggaacagatctcaccccaaagattcaggaactgaagttccagtgtatagtatttttaaatatacccagatattgtgctggcacaatgccctggggaaacccaggtgatcaccatgatttcgaacctcagcgtcatgatgatggttatattgaagtcattggatttaccatggcctctttggcagccctgcaagttgggggccatggagagaggctacaccagtgtcgagaagtcatgcttctaacttacaaatccatccccatgcaagtggatggggagccctgtaggttggccccagctatgattcggatctccctgaggaatcaggccaacatggtacagaagagcaagaggagaacatccatgcctttactcaatgatccccagtctgtcccagatcgtctgaggatccgggtgaacaaaatcagtttacaagactatgaaggattccactatgacaaggagaaactccgagaagcttctatttcagactggttaagaaccattgctggggaactagtgcagtcatttggagcgatacctctgggtattctagttgtgcgtggagactgtgatttggagacttgccgtatgtacatagaccgcctacaggaggacctacagtcagtttcttctggctcccagagagttcattaccaggaccatgaaacctccttccccagggctctctcagcacagaggctctctcctcggtggtgcttcctagatgcaacttctgctgatcgcttttatcgaatagacagatctcaggaacatttgcactttgtgatggagatttcccaagatgagatttttattctggacccagatatggtggtgtcacagccggcggggacacctccgggcatgcctgacctggtggtggaacaagcctcggggtcaccagtctcttcagaagatcatgcaattttgcaggcagtaatagctggtgatcttatgaagctaatagaaagctataaaaatggaggcagtctgctaattcagggaccagaccactgttcactccttcactacgcagctaaaaccggcaacggggagattgtgaaatatatccttgaccacggaccttccgagttattggatatggcagacagtgaaacgggtgagactgcactgcacaaggctgcctgccagcggaaccgggctgtgtgccagcttctggtggatgcaggagcatctctgagaaagacggactccaagggtaagacacctcaagaaagagcacagcaggctggggacccagacttggctgcttacctagaaagccgtcagaactataaggtcattggccatgaggacctggaaactgctgtttgaccctggtattcgggcaaagaggacatgagcaagcgtatcacatctgccctccctgcaattgggcagctcccctggaagaagctgatggaattcatatatctgtctctctcctgcaagaatctacctgagaccatgccactagcttttaagggctaccaagatgtacaacagaacatgatagcccattgagaaggaggcaggatacctggagatttgtggaatacagtacgagttccacaaaatttgatccttattgcttccagcaagtagcatgaacttctgtgttcacctgtataatttattttaaagattcaaaggatgttcgtataaatggcactgctccatcctccccctatgcattggtttttttccctgtaccatacaattctactgtaactacccatcaacttaaagaaaaatattatctcttctctttacattcagtcttggaagaccacaagattgtctgaaggccttctaaaaccttctgaatgtcctgcagaaatataactgtaaaaccacttccatttctaagactaaatatatcaagactatttagtgactctctctgcatgtccccctcacccgccaaccctccgtttcattatataggagctgggaagtgccacatggataatgtcaacttgtgtgctatatctctgaggaatggtgaggtggcatgggagatgtctgtgcttggaggtacctcagagaggtaacccaggggtcagcccaggctgctgggctgtagccaatagccatgcaggactggttcagcttgggctgtctgtacagctccgtactgcctatgtgtagccatctttgccttttgctgcaatagaagatgagcaaaggattaaacagaggcccacagctagtttgcagaaccactcaattttaagtgctgtttaaattgcagagcaaataatcctgtgtgggaactgtggttacaggaaatggagcactctaacaatgtttacttctaaactttgttgaatgataatagaaagcaccctaattgacttggaaaaaaaaaacagcaaaagcaaaagtagcaacatatgtcaacatatgtcactgaaataggaaacagtcattggaatgttgcacagaggctaataactatagactgttggatacagtggtgagaggagccccattttaggtctttcttttaggtttttggttttcattactccaagtaatccttgacccaagaacaaaggcttgttgtatgagttccactgccagatttatgggatgcctggatcattcagaaggatgcttcaactattatttgtcaggtccaaaggtcgtacttaataaccccattttctatgtatggggtagtctaatatattattttatctactttatttttcccttttcagaaagtccttagtgcaaaccaccattggaatctagccagaaatgtctgtcagatagttagaattgtaacatctaaacctgccacggatcgaatggtacttacaggtacctctcttagggactctgtgatccctaaaatatcagaagaaaatgtctgtctttctgtccaaatatctacttgacttgggggtaagtcaaaaataaaagtaggtgtccaaggattttacttttggcgaaatctgacgtctcctgagcttattttcattttgtccttggacatagcatagtgcttccctaatgtttctacatatgaccatgaatgatagtgtctctacatttaatttaaaagtctaatggtgacattttgcttatctgagtcacatttcggtaacatatcatcattttgaaagtgcggctatgacgtgctatattaaacaggaacagcctttcagtggatggggattttattaccacagtctttccatagtcatttcaaaatcaaattgttggtgggaggatggattgggttgtgagtaatctacttccatatatcagcctcagaaatggaactatcctttggatattacaggagacactgcagcagattgtttccagaagctggaaaaatatgctccaggagaatttaatcactgggcttttgctgggggatttttagttggcgggactgtcaaggaaatgtgatgacagaaatataatccttaacacaaactggaatctggctttgaatggcatcttccattccctggattgagtcaaatgtttggccaagcagtcagttatctagctgttactgttgggatgaagaactctgttttcatcaactaccatctcacatttctctaaatacttccaagtagcccagagaaaatttagggtacaggtggctatgggccaatttctaaatagctccaattgaagacataaatctgtgttatgaaaaatgatgagttggtactgtaagattcctgatgcatttggaaattttttcaaaccaaaaaaaaaaaaggcattagagtcctgtgttattcatggagaccaatatttgatatatcgctttgaaaaaagcaagtaccactaggacttgggatttccaaaataaagtgagcagaataaccacatgtttaatggcttcaacattaaaccacctcctgtagcatgttttaaaaattggtcctgggctttggaaagagctaaggccttatggtctaggagtttccatctcagcttaagtatattgtatccctactattaggacatcaggaaagcaagtgatctagtcctggtctgaagtgccatgtaactttaacagacataaaaatatgtacctatagaaatatcatttctacaaagcctactgagacagcactgaagaggcagctagcttggctgactcctctgtgtttgtttctttgtgtcatggcactgactgctttgagattccatttttagatgtggttgatagaggaatggaaaatgaagagttattaaaagacaacattctgtaacctgaaaggtagtcatttttgcaagcttatattttaatattgtgcatttaacaaaatagaacacagttaaactgtgctttatcgtattcaaggacttcataaagaataagagagaagattagtaagccaagaatggaataaataccatgactaggaattttgctttcagagcttatgtttcctctgtagatgtgataaccaaaaaccagtgcaagttttgaaacataatttagctggcaaatgcacagtgatggaaattagtaatgactgatggagagccgtacatacctgttgctccttatcctttcagaatggctgctttggcagatctgcctgtgctgggagctactcaacatcacttcattttcatctggacctagtgagagtccctttgcctaacgaatttctgaaatttatttatttactagaccccttataatattcatggctttaaaaaatgacacagcatctttattttattacatgtcaattttattaataatatttaggggtttttttaaattataaaaatggcacatgctttttataaaatgttttaataccacagatgagtatcacatccacagtcaaggcatccctttgttctggtgttgtgtcccacttcccaaaaataaatacggttaacactgatgaacactgttgcttgtatgtgatgtcagaaataccccatccgttcatgcacaagtatgtatgtatatacgcatatacatttacacacatatatagacatttatttatatacacatgcaagtatgtatactatattcatgtatattgcataggtttagaaaagagcaaacattttaaaagcatgctgatcatttgtatatgtctagtgaacaccagtaggcaaagacaggttaaacagagaagttccatttatttttttgtttccaccattgctaggcttagatctgttatggcattactacaattgcacttagcattttctattacctgtgtcataaaattcatgaccaagagttcctgtaattgtttatgttgccttccatgaagcatgaaacctaccatagccccaagacttatctatgctatgtttgtatttcaagtaaaggagagttctttcctctgtgatgcttacaccactttacaaggctgtttgtaacactaacactcagtaggttgcctagtgatatttaattagggcaggctacttccgggaaggtgtaacttcagtgtagtatgggggtctgagcagcttgtcttccttccagaaggagtagctaatgaaatcactgagaacagcatattttattcaattatgctatttaaaaatgggactttgttaaaatggctcatcataaccatcaaataaaactactaattgttctatttaaatgaattatattcattttaggaaaagaagtagaaaaacatctaataaattagctttctgattaatctttaacacttatttaatataaaatggcttctgcctgcatcttaattgaaccacctttgaatctctcaactcctttcactctgaatctcatactcagctgattagaagtcctacaggtccttctctgccaggtctgtcagatcgacttggaccctacccttttctgtgtccccagtcatccattatctcttgtctctctaagttttgggccatagcggcagtcctgtccctgaactttctgcctactactgtcaataattttgtcacgcagttgcaaaaatcttccccagatattatgctcaaaatacatcaaaatgaaattaccctctgggacaagtataccttttactcaaaggacacatggatgtccactgaccttgatcatcttatagaattatggcaagcatgattctgaaaatctatcaggtttagcaaatatctgtcttagtcccatgagggtacacaatcacggctgctgcttcctcattcaacaatgtaagccacatgcctctttgacggcacctggaggactaggttatagattttacactgctgagggccatctttggttttacactgtctcctcacagcttaatgagaaacctgaaaataagaaccaagaaaagagtcatgcccttggacaacctcctctcccaggacactgagatttactgaccaggtcccagaaagaaagcagaaaaataattcttaggctcttgtagcatggattttaaaatagaaacgtgaaaattgaatggtatcttcataatgcatagactccagagtctatttacatatgtattcagttatgcatgtaatcatatgtccatgaatcaatcataagtgcatgtatttaatcattatttgaaaaatatttgtcactctgaggcaggcatcatactaaggatataacaatgaatgtaatagacaaaactcttgatttcatgaagctggcatctagaagaaaagacaaattccaatgtgataagtgcagtgcaggagaaccccagggtgtccagcatgggctggaaattcaaccaaggctttattgtaccagccactcattagccagcaatgttttggttcaatgaaaacataagtaggaagagaataatattttgcatttccattttactggagtcatagtagatttctaaaaatgtatctgaaactaagattttaaaacaagacttagaaacactattaaaatgaaagctaagactgatttattctagctctcaggatagaactaggaaaaataagcagagttttcagtgggttttgactaaatataaagaagatgaagtacaaataatatgtaatagtggagtggatatcacagttataaactttcagcctctgttagcatttaaacagaggatacctgaccactctgaggggtgttgtgattaggaatatgtgatttgagggggctaaaattagatgctgtgatttttcaaaagatattttttaatggctttgttgaatggcaggattttattttaaaaactcatgaaaatcttgatttttgatttgttaaactttgctttataactgagaattttaaaaatatctaggggaatggccgttagttatcatttaaaaaattttaaactaagcatgaatttaagagctagtcaaaagaaaacatactaaaaggtgtaatttaattaaaaatacttctggaagcttataaattttgatcagtattcttagtcattgtcaagtaaaattctattagaaatctgtcttactgtccatccaatataaaaaagtgctgtggtttgatattctaagagttaagtgtaatctagtataaccacagaagaaaattctgcctgtaaggtatttgggagccaagtaaatgtacatgaaaggcaatcatggaaaactctttggcttctgccaccagcgtggcaaccacaagggaggtcctacccatggaaataagaaaatagtgatccaagttttcacccaacttttgaaatttcaatattttgagccaaatgccttctgaaatgggaggctttgatagtgggaaatactgaaattatcttttccctcagacctttagtgaaacacacatatagttttcactctatgacagtataaacaactcaaatctatactgtttgttaagaacagtttcaagaattaaaaagtgctttagcgttatgatgtattgacatgtttgagcttcagttggggttcaaaacaaccccaacgaggtgaataatgcatataatacattttagatgaatgcactgaatctcagagcagtgaattcagcctgtgcagattcatatagcaaatgatagtgctgcagccagaactgggtctttagaaattacatattaacatgttttctaagtaagtcattttccatcattgccttcaaggatgttttatatcaattgttcagatttccataatatagaagttgcctccatgaaaaaaaaatgtttacctaagtttccacggaaagaatgagttagaaataagggagaatgtgaaatcaaaaagtcagagtttttgctgtcggagagaggcttgtcagcttgtacatagttcaagcaaagaaaagtctaatgtttgcataccagggtggatttcaagagaagaaattaacagtgagcgttaatggcttctttaacttatttgtgattctcagcatttaaaaaatgttagtcctatttttcttcctttgaagtcactattaggatgatataatttctgaatgctgcaacaaaaaatgttaaaaatggccctgacatccaagactctattgctctaagtttatgggtgggtatgcaagctaagtgttatgataatacatagtcatatacatagaggtttaatacacctatgggaaattccggcatatttgaagtagagaaaaacaaacaggcttgaaatgtccttcagttcagaatctcatactttacaagggacatttatgggcagattggtgaatatgtagaaggaggatgtttgatctggaaagaagacaaaattggattaggaataagaatatgtagaggagttaggttaagtaggactgttagtttcaaattctgcagggaagatgatttgtagaataaaataaggaaagaaaagagcagtaacacatgaaaaggagttagctttattacttataaggatttatttttcctaaacattgcatccagaaaaacagtttgggctttctgaaaaacagtgaagttgttatcactgtttcttctagtagttaagtgaagattgaacaactaactcagagatcaaaggcatatctttaattgtgagagatcttggactagaaaaactctgtgagattttcttggtttaaatgtctataattttagactggaacagaactcaatttgagcctatttttttcccccaggttcctgccaactagatagcaatgaaggcattttttaaaaaagcttccatcattgcaaatatatcccaaatcacttagcagcggggatttcatgaccctaaaaagttgccttgcttacacaaacacacctatgctttagtagaaacatatcttttttaggagatttgggaattggctagcatttttgccaattgttagccaatttaggagatttggaaattggctagcaattttgccaattgttagccaattcccaaatctcctaaaaaagatatgtttctactaaagcaaaaaggtcacagattcaggagtcaaagtgaaaacaaaggatttagtgttctttcccctacttactacccatttgttgtttgggatgtagagtcaggactggagaagagggtgggaaattctatatcctctgccaatacagaggcatggaggcactttctataactttgtgtcatgaaacaagacttaaccccatatcagtagactaatgtttctgtcatatttctgtctaggtggattacagttttaattgcccatcatcccttaattctgtaatacagcttgagttcctagatttcaggttgactgggtgagggaggaagtcacttgaggtaattttaagaaatgaatccatatccagagtcttgcagaaaagacctgcttctactccaccttctttcttgttctacttcttgcctctggtttgggggcataaaagaggggcagagttgtgaggaaaggaaaaaagattctcaaaagtagtacaataagaagaccctagtagtaacacaaattctcatggtaatctcaaacaactgatagtgttagcagatattgaaaatcaaactcaggaaacatacagaaagattaaatttgttcaaagtggcttcaaggggtattagttgtgaaaatttcagtttatgcagcatagaagaattagattgtgtgtggaacttgggggaagtagggtcagctaatagaagaactttttaatggagctttccaaaggacgaggtggtttttggaaggagtttgtccaacctcttataatacattatgcctgtccacaaacttgttctggtccctgataaagtttgaaaaaaataaggaatatttagggttttttcccacaaatctcaatatattcacttaaaaattcagagactgtgaccttgttattttgggtttaaatatacattttcctcttaaaaatgatagatatatgtttacaaattgtctttactcttcacttataaaacacacacatacagataggatagtcctgtcagtttaccctattttttgtttcaaatttataggtaatttcaaatttataggtgttggtgagatttatcacttttaagataccatctagccttgatatttgttgtaccttctatatgcaaccaaatggctcctgatctcctgatcttctggagatcaaagaatttttattcgccactctccccacccatcattggttggattgagactctaattacatacaagcataatttccaatgcaagtagaactttgatgctctccctgacttaccgattataagttgggaaagtttggattcttgccatcctggggaaggagatttagaactctcatagacaaaatattctaacacaacagaatattttgcaaaacacatctttgaaaagtcaggggccaaaatagtctcagcaaaggttagcttggctgttttttaaaattaccaatagttaagtgggcaaccatgaatctgaatattatacagaccaccactgactgaaactgaggaaaaccattcttgtgaaaaactaaggaatagaggacaatctcagttctaaaagaatgaatatatttgatttaatttgatttctgagtgggaaaacgttcccaggcatccagggtacccttggctgtgggtattccactcgcaaaggctacatctgtatgaagagttgcagtcacattataaagggctttttcatgatttctgattctgccctatcacatcccagagccatgcttttgcaaagctgccagctggcaggtggaatccataaacaagtagcagctgtggcagtagaaagattaaagttttatttccaggtaaaggaggattcagataatacgaagtggagggagggtgggtgggggggggggggtgggatgggaaagggaagaatgaagttttttgtaacaaagtcataaagtatttttccctaattttcttgcatttcctatttatataaagtatcttgatcactgtgttgcactacagagattttcaatggagttaatttgggagactgaactaatctctgaaaaagaaattgactagttacagttactttttggacactttttctgtattgtgaattgtgtggaaatgtacagaataaaaatgaagaaatgta

SEQ ID NO: 126655 - DNA, 4163 bp, Homo sapiens
  Payload ID: 4832
  Gene Symbol: DGKI
  Gene Name: diacylglycerol kinase, iota
  ENST ID: ENST00000424189
  CDS Start-End: 231-3467
gggtcgcagcctgtcctcctctctctccccctccgccgcagcccgtcgcctccgggcagagttcatgttcagcttgggctttcgctcgggatttaggaagaggccggcggggctggagggtgcgggccggcgcgggagggcgcgggaggcggggagcggcggcctctgattggccggggcgggggagtgagcggagtttcccacaatgccccggtgcggtgcagccgcggatggatgctgcgggaaggggctgccatttgctgcccctgccagcggcgcgcggacctgcccgcgctcctgcagccgccgccgccgccgccgccagcccgcccggcccctgcagcggcgccgcctgcgctccctccgcggccgccggagcgggcgccatgaaccccagctcctcggcgggagaggagaaaggggcgacgggcggcagcagcagcagcggaagcggcgccgggagctgctgcctgggcgccgagggcggcgcggacccgcggggcgcagggtcagccgcggcggcgggggccgctgccctggacgagcccgcggccgccggccagaaggagaaggacgaagcgctggaggagaagctgaggaacttaactttccggaagcaggtctcgtacaggaaagcaatctcccgggcaggcctccagcatctggctcctgcacatcccctcagccttcctgtggcaaatggtccagccaaggagcccagagcgactttggactggagtgagaatgccgtgaatggagaacacctgtggctggagaccaacgtctcgggagacctctgctaccttggagaggagaactgccaagtcagatttgcaaaatcagctctcaggaggaagtgtgcagtctgtaaaatcgtcgtccacaccgcctgcattgagcagctagaaaagattaatttcagatgtaaaccaacatttcgagaaggaggctcaaggtcaccaagagaaaattttgtacgtcatcactgggtgcacaggcgtcggcaggaggggaaatgtaagcagtgtggtaagggcttccagcaaaagttctccttccacagtaaagagattgtggctatcagctgttcctggtgcaagcaggcgtttcacaataaggtgacctgcttcatgctgcatcacattgaagaaccctgctccctgggggctcatgctgctgttattgtcccgcccacttggatcattaaggtgaagaaacctcagaactccctgaaggcttcaaatcggaagaagaagagaacaagctttaaaagaaaagccagtaaaagagggatggaacaggaaaacaaaggtcgtccttttgtgataaaacccatctcttctcctctcatgaaacccttgcttgtatttgtgaatcccaagagtggaggcaaccagggaaccaaagtcctgcagatgttcatgtggtacctgaatccacggcaagtctttgatctttctcaggaagggccaaaagatgcgcttgaattgtataggaaagtaccaaatctgcgaattctggcctgtggtggggatggaacggtgggctggatcctttccatcctggatgaactgcagctgagccctcagcctcctgtgggggtccttcctctggggactgggaatgacctggctcgaactctcaactggggagggggctacactgatgaacctgtttctaagatcctgtgtcaagtggaagatgggacagttgtacagctagatcgctggaacctccatgtggaaagaaaccccgacttgcctccagaagaacttgaagatggcgtatgtaagctccctctgaatgttttcaataactacttcagccttggatttgatgcccatgtcacactggagttccatgaatccagagaagcaaatccagagaaattcaacagtcgttttcgaaataaaatgttctatgcaggggcagctttttctgacttcctacagagaagttctagagatctatccaaacatgttaaagttgtttgtgatggaacagatctcaccccaaagattcaggaactgaagttccagtgtatagtatttttaaatatacccagatattgtgctggcacaatgccctggggaaacccaggtgatcaccatgatttcgaacctcagcgtcatgatgatggttatattgaagtcattggatttaccatggcctctttggcagccctgcaagttgggggccatggagagaggctacaccagtgtcgagaagtcatgcttctaacttacaaatccatccccatgcaagtggatggggagccctgtaggttggccccagctatgattcggatctccctgaggaatcaggccaacatggtacagaagagcaagaggagaacatccatgcctttactcaatgatattcatcaggtgcaaactgcggacctgcggcgagtgtctgctccccccggctccttcaccattccccagtctgtcccagatcgtctgaggatccgggtgaacaaaatcagtttacaagactatgaaggattccactatgacaaggagaaactccgagaagcttcgatacctctgggtattctagttgtgcgtggagactgtgatttggagacttgccgtatgtacatagaccgcctacaggaggacctacagtcagtttcttctggctcccagagagttcattaccaggaccatgaaacctccttccccagggctctctcagcacagaggctctctcctcggtggtgcttcctagatgcaacttctgctgatcgcttttatcgaatagacagatctcaggaacatttgcactttgtgatggagatttcccaagatgagatttttattctggacccagatatggtggtgtcacagccggcggggacacctccgggcatgcctgacctggtggtggaacaagcctcggggatctcagactggtggaatcctgccctgcggaaacgcatgctgagtgacagtgggctggggatgatagctccctattatgaggactcagatctgaaagatctcagccactcccgcgtgctacagtcaccagtctcttcagaagatcatgcaattttgcaggcagtaatagctggtgatcttatgaagctaatagaaagctataaaaatggaggcagtctgctaattcagggaccagaccactgttcactccttcactacgcagctaaaaccggcaacggggagattgtgaaatatatccttgaccacggaccttccgagttattggatatggcagacagtgaaacgggtgagactgcactgcacaaggctgcctgccagcggaaccgggctgtgtgccagcttctggtggatgcaggagcatctctgagaaagacggactccaagggtaagacacctcaagaaagagcacagcaggctggggacccagacttggctgcttacctagaaagccgtcagaactataaggtcattggccatgaggacctggaaactgctgtttgaccctggtattcgggcaaagaggacatgagcaagcgtatcacatctgccctccctgcaattgggcagctcccctggaagaagctgatggaattcatatatctgtctctctcctgcaagaatctacctgagaccatgccactagcttttaagggctaccaagatgtacaacagaacatgatagcccattgagaaggaggcaggatacctggagatttgtggaatacagtacgagttccacaaaatttgatccttattgcttccagcaagtagcatgaacttctgtgttcacctgtataatttattttaaagattcaaaggatgttcgtataaatggcactgctccatcctccccctatgcattggtttttttccctgtaccatacaattctactgtaactacccatcaacttaaagaaaaatattatctcttctctttacattcagtcttggaagaccacaagattgtctgaaggccttctaaaaccttctgaatgtcctgcagaaatataactgtaaaaccacttccatttctaagactaaatatatcaagactatttagtgactctctctgcatgtccccctcacccgccaaccctccgtttcattatataggagctgggaagtgccacatggataatgtcaacttgtgtgctatatctctgaggaatggtgaggtggcatgggagatgtctgtgc

SEQ ID NO: 126656 - DNA, 4070 bp, Homo sapiens
  Payload ID: 4832
  Gene Symbol: DGKI
  Gene Name: diacylglycerol kinase, iota
  ENST ID: ENST00000446122
  CDS Start-End: 231-3374
gggtcgcagcctgtcctcctctctctccccctccgccgcagcccgtcgcctccgggcagagttcatgttcagcttgggctttcgctcgggatttaggaagaggccggcggggctggagggtgcgggccggcgcgggagggcgcgggaggcggggagcggcggcctctgattggccggggcgggggagtgagcggagtttcccacaatgccccggtgcggtgcagccgcggatggatgctgcgggaaggggctgccatttgctgcccctgccagcggcgcgcggacctgcccgcgctcctgcagccgccgccgccgccgccgccagcccgcccggcccctgcagcggcgccgcctgcgctccctccgcggccgccggagcgggcgccatgaaccccagctcctcggcgggagaggagaaaggggcgacgggcggcagcagcagcagcggaagcggcgccgggagctgctgcctgggcgccgagggcggcgcggacccgcggggcgcagggtcagccgcggcggcgggggccgctgccctggacgagcccgcggccgccggccagaaggagaaggacgaagcgctggaggagaagctgaggaacttaactttccggaagcaggtctcgtacaggaaagcaatctcccgggcaggcctccagcatctggctcctgcacatcccctcagccttcctgtggcaaatggtccagccaaggagcccagagcgactttggactggagtgagaatgccgtgaatggagaacacctgtggctggagaccaacgtctcgggagacctctgctaccttggagaggagaactgccaagtcagatttgcaaaatcagctctcaggaggaagtgtgcagtctgtaaaatcgtcgtccacaccgcctgcattgagcagctagaaaagattaatttcagatgtaaaccaacatttcgagaaggaggctcaaggtcaccaagagaaaattttgtacgtcatcactgggtgcacaggcgtcggcaggaggggaaatgtaagcagtgtggtaagggcttccagcaaaagttctccttccacagtaaagagattgtggctatcagctgttcctggtgcaagcaggcgtttcacaataaggtgacctgcttcatgctgcatcacattgaagaaccctgctccctgggggctcatgctgctgttattgtcccgcccacttggatcattaaggtgaagaaacctcagaactccctgaaggcttcaaatcggaagaagaagagaacaagctttaaaagaaaagccagtaaaagagggatggaacaggaaaacaaaggtcgtccttttgtgataaaacccatctcttctcctctcatgaaacccttgcttgtatttgtgaatcccaagagtggaggcaaccagggaaccaaagtcctgcagatgttcatgtggtacctgaatccacggcaagtctttgatctttctcaggaagggccaaaagatgcgcttgaattgtataggaaagtaccaaatctgcgaattctggcctgtggtggggatggaacggtgggctggatcctttccatcctggatgaactgcagctgagccctcagcctcctgtgggggtccttcctctggggactgggaatgacctggctcgaactctcaactggggagggggctacactgatgaacctgtttctaagatcctgtgtcaagtggaagatgggacagttgtacagctagatcgctggaacctccatgtggaaagaaaccccgacttgcctccagaagaacttgaagatggcgtatgtaagctccctctgaatgttttcaataactacttcagccttggatttgatgcccatgtcacactggagttccatgaatccagagaagcaaatccagagaaattcaacagtcgttttcgaaataaaatgttctatgcaggggcagctttttctgacttcctacagagaagttctagagatctatccaaacatgttaaagttgtttgtgatggaacagatctcaccccaaagattcaggaactgaagttccagtgtatagtatttttaaatatacccagatattgtgctggcacaatgccctggggaaacccaggtgatcaccatgatttcgaacctcagcgtcatgatgatggttatattgaagtcattggatttaccatggcctctttggcagccctgcaagttgggggccatggagagaggctacaccagtgtcgagaagtcatgcttctaacttacaaatccatccccatgcaagtggatggggagccctgtaggttggccccagctatgattcggatctccctgaggaatcaggccaacatggtacagaagagcaagaggagaacatccatgcctttactcaatgatccccagtctgtcccagatcgtctgaggatccgggtgaacaaaatcagtttacaagactatgaaggattccactatgacaaggagaaactccgagaagcttcgatacctctgggtattctagttgtgcgtggagactgtgatttggagacttgccgtatgtacatagaccgcctacaggaggacctacagtcagtttcttctggctcccagagagttcattaccaggaccatgaaacctccttccccagggctctctcagcacagaggctctctcctcggtggtgcttcctagatgacagatctcaggaacatttgcactttgtgatggagatttcccaagatgagatttttattctggacccagatatggtggtgtcacagccggcggggacacctccgggcatgcctgacctggtggtggaacaagcctcggggatctcagactggtggaatcctgccctgcggaaacgcatgctgagtgacagtgggctggggatgatagctccctattatgaggactcagatctgaaagatctcagccactcccgcgtgctacagtcaccagtctcttcagaagatcatgcaattttgcaggcagtaatagctggtgatcttatgaagctaatagaaagctataaaaatggaggcagtctgctaattcagggaccagaccactgttcactccttcactacgcagctaaaaccggcaacggggagattgtgaaatatatccttgaccacggaccttccgagttattggatatggcagacagtgaaacgggtgagactgcactgcacaaggctgcctgccagcggaaccgggctgtgtgccagcttctggtggatgcaggagcatctctgagaaagacggactccaagggtaagacacctcaagaaagagcacagcaggctggggacccagacttggctgcttacctagaaagccgtcagaactataaggtcattggccatgaggacctggaaactgctgtttgaccctggtattcgggcaaagaggacatgagcaagcgtatcacatctgccctccctgcaattgggcagctcccctggaagaagctgatggaattcatatatctgtctctctcctgcaagaatctacctgagaccatgccactagcttttaagggctaccaagatgtacaacagaacatgatagcccattgagaaggaggcaggatacctggagatttgtggaatacagtacgagttccacaaaatttgatccttattgcttccagcaagtagcatgaacttctgtgttcacctgtataatttattttaaagattcaaaggatgttcgtataaatggcactgctccatcctccccctatgcattggtttttttccctgtaccatacaattctactgtaactacccatcaacttaaagaaaaatattatctcttctctttacattcagtcttggaagaccacaagattgtctgaaggccttctaaaaccttctgaatgtcctgcagaaatataactgtaaaaccacttccatttctaagactaaatatatcaagactatttagtgactctctctgcatgtccccctcacccgccaaccctccgtttcattatataggagctgggaagtgccacatggataatgtcaacttgtgtgctatatctctgaggaatggtgaggtggcatgggagatgtctgtgc

SEQ ID NO: 126657 - DNA, 2799 bp, Homo sapiens
  Payload ID: 4832
  Gene Symbol: DGKI
  Gene Name: diacylglycerol kinase, iota
  ENST ID: ENST00000614521
  CDS Start-End: 1-2799
aggaaagcaatctcccgggcaggcctccagcatctggctcctgcacatcccctcagccttcctgtggcaaatggtccagccaaggagcccagagcgactttggactggagtgagaatgccgtgaatggagaacacctgtggctggagaccaacgtctcgggagacctctgctaccttggagaggagaactgccaagtcagatttgcaaaatcagctctcaggaggaagtgtgcagtctgtaaaatcgtcgtccacaccgcctgcattgagcagctagaaaagattaatttcagatgtaaaccaacatttcgagaaggaggctcaaggtcaccaagagaaaattttgtacgtcatcactgggtgcacaggcgtcggcaggaggggaaatgtaagcagtgtggtaagggcttccagcaaaagttctccttccacagtaaagagattgtggctatcagctgttcctggtgcaagcaggcgtttcacaataaggtgacctgcttcatgctgcatcacattgaagaaccctgctccctgggggctcatgctgctgttattgtcccgcccacttggatcattaaggtgaagaaacctcagaactccctgaaggcttcaaatcggaagaagaagagaacaagctttaaaagaaaagccagtaaaagagggatggaacaggaaaacaaaggtcgtccttttgtgataaaacccatctcttctcctctcatgaaacccttgcttgtatttgtgaatcccaagagtggaggcaaccagggaaccaaagtcctgcagatgttcatgtggtacctgaatccacggcaagtctttgatctttctcaggaagggccaaaagatgcgcttgaattgtataggaaagtaccaaatctgcgaattctggcctgtggtggggatggaacggtgggctggatcctttccatcctggatgaactgcagctgagccctcagcctcctgtgggggtccttcctctggggactgggaatgacctggctcgaactctcaactggggagggggctacactgatgaacctgtttctaagatcctgtgtcaagtggaagatgggacagttgtacagctagatcgctggaacctccatgtggaaagaaaccccgacttgcctccagaagaacttgaagatggcgtatgtaagctccctctgaatgttttcaataactacttcagccttggatttgatgcccatgtcacactggagttccatgaatccagagaagcaaatccagagaaattcaacagtcgttttcgaaataaaatgttctatgcaggggcagctttttctgacttcctacagagaagttctagagatctatccaaacatgttaaagttgtttgtgatggaacagatctcaccccaaagattcaggaactgaagttccagtgtatagtatttttaaatatacccagatattgtgctggcacaatgccctggggaaacccaggtgatcaccatgatttcgaacctcagcgtcatgatgatggttatattgaagtcattggatttaccatggcctctttggcagccctgcaagttgggggccatggagagaggctacaccagtgtcgagaagtcatgcttctaacttacaaatccatccccatgcaagtggatggggagccctgtaggttggccccagctatgattcggatctccctgaggaatcaggccaacatggtacagaagagcaagaggagaacatccatgcctttactcaatgatccccagtctgtcccagatcgtctgaggatccgggtgaacaaaatcagtttacaagactatgaaggattccactatgacaaggagaaactccgagaagcttctatttcagactggttaagaaccattgctggggaactagtgcagtcatttggagcgatacctctgggtattctagttgtgcgtggagactgtgatttggagacttgccgtatgtacatagaccgcctacaggaggacctacagtcagtttcttctggctcccagagagttcattaccaggaccatgaaacctccttccccagggctctctcagcacagaggctctctcctcggtggtgcttcctagatgacagatctcaggaacatttgcactttgtgatggagatttcccaagatgagatttttattctggacccagatatggtggtgtcacagccggcggggacacctccgggcatgcctgacctggtggtggaacaagcctcggggatctcagactggtggaatcctgccctgcggaaacgcatgctgagtgacagtgggctggggatgatagctccctattatgaggactcagatctgaaagatctcagccactcccgcgtgctacagtcaccagtctcttcagaagatcatgcaattttgcaggcagtaatagctggtgatcttatgaagctaatagaaagctataaaaatggaggcagtctgctaattcagggaccagaccactgttcactccttcactacgcagctaaaaccggcaacggggagattgtgaaatatatccttgaccacggaccttccgagttattggatatggcagacagtgaaacgggtgagactgcactgcacaaggctgcctgccagcggaaccgggctgtgtgccagcttctggtggatgcaggagcatctctgagaaagacggactccaagggtaagacacctcaagaaagagcacagcaggctggggacccagacttggctgcttacctagaaagccgtcagaactataaggtcattggccatgaggacctggaaactgctgtttga

SEQ ID NO: 126658 - DNA, 7407 bp, Homo sapiens
  Payload ID: 4833
  Gene Symbol: DGKK
  Gene Name: diacylglycerol kinase, kappa
  Uniprot ID: Q5KSL6
  ENST ID: ENST00000611977
  CDS Start-End: 61-3876
gtactttagccttccaggcttagggactcaggctgcccagacctgaagcggtgtgcggccatggaccgcggagctgccgcagcccagggcactgccccgcctcaggatggagagcagcccgctgagtctccagagcctccgccgccttggccgccgccgccaccaccaccggctccgccgccggctccgccgctgctctccgaggcttcgccagaacccataccagagccctgtccagagcttgctccaggtccctgtccagaggcgacctcagaatcagccacagaactgtacacagaaccgaccccagaaccagccacagagccggcctcagaaccggccccagaacctgccacagagccggccccagaacctgccacagagccggccccagaaccggccccagaacctgccacagagtctgccccagagccgactccagaacctgccctagagtcggtcccagagccggccccagagctgactccagaagttgccccagagctggccccagagccgaccccagaacctgtgacagagctggccccagagttctgccctgaggcggctccagagttccgtccaagtccagcaccatgtctattgcaatgtccggtggacactcgagagagaggtctaaagacctcgccatcgccatcgccatcgccatcgcccagaacgccaatgtcgtggtccagaataaagaaaatattgaaggaaggacctatgctgaagaactgtaactctttcaagagatggaagcttagatattttctggttcaaggacagaagctctactttgcacaccatcccgcgtttgcacactttgaaacgattgatctgtctcaagccactgtggcagaaagcagctgtagaaacctttgccacagtttttgtgttattacaccacaacgaaaaatcactctggctgcacccaaccggaaagacatggaagaatggattaacatcataaaaaccatccaacagggagaaatttataagatacctgcagcagaaaacaacccttttcttgttggaatgcattgttggtactccagttacagccaccggacccagcactgcaatgtttgtcgagagagcattcctgccttatctagagatgccatcatctgtgaagtgtgcaaagtgaaatctcacagattgtgtgctttgagagcaagcaaagactgcaagtggaatacattgtctatcactgatgacctccttctgcctgcagatgaagtaaacatgccccatcaatgggtagaaggaaacatgcctgtcagctctcagtgtgcagtgtgtcatgagagctgtggcagttatcaaagacttcaagacttccgctgcctgtggtgtaattctacggtgcatgatgactgtaggagacggttttccaaggaatgttgcttcagaagccatcgctcatcagtcattcctcccactgctctaagcgaccccaaaggcgatggccaattagtagtatcttcagacttctggaatcttgattggtcatcagcctgttcatgtcccttgctcatcttcatcaactccaaaagtggcgatcatcaggggatcgtcttcctccgaaaattcaagcaataccttaacccatctcaagtgttcgacttattgaagggtggacctgaagcagggctgtctatgttcaagaactttgctcgctttcgcattctggtttgtggtggagatggcagcgtgagctgggtcttatctctgattgatgcctttggattacatgaaaagtgtcagttggcagtcatcccacttggaaccggcaatgatctggctcgtgttctgggctggggtgcattctggaacaaaagcaagtcacctctggacatcctcaacagagtggagcaggctagtgtgaggatcctagacagatggagtgtgatgattcgtgagactcccagacaaaccccgctgctaaaaggacaggttgaaatggatgtaccacgatttgaggctgctgccatccaacacttagaatctgcagccaccgagttgaacaaaatcctgaaggccaagtaccccacagagatgatcatcgcaaccagattcttgtgttcagctgtggaagattttgtggttgatattgtaaaggcctggggtcagataaaacagaacaacactgcaatagtgtctgtgattttgaaaagtgacttaatgtatgataggctcagtgtcctgatcgatgtcctggctgaggaggcagcagctacttctgctgaaaaaagtgctacagaatatgcagacagcagcaaggcagataggaagcccttcattcctcaaatagaccacatagccaagtgcaagttggagctggctacaaaggcccagagtctccagaaatccttgaaactcatcatatttcaagttgaacaagctctggatgaggaaagcagacagacaatatctgttaagaactttagttcaactttcttcctggaagatgacccagaagatattaaccagacaagcccacgacgccgttctcgtcgtggcactttgtcttctatatcttctctcaaaagtgaggacctggacaaccttaacttggatcacttacattttacacctgaatctatacgcttcaaagaaaaatgtgtcatgaacaactacttcggaattggactggatgctaaaatttctctggacttcaacaccagaagagatgaacacccagggcaatacaatagccgccttaagaacaagatgtggtatggccttctgggaaccaaagaacttttgcagcgctcttacaggaaactggaagaacgagtgcatttggagtgtgatggagaaaccatctccttgccaaacctgcaaggcattgtagtgctcaacattaccagctatgctggaggtatcaacttctggggaagcaacacagcaaccacggaatatgaggctcctgcaatcgatgatgggaaactggaggtggtggcaatctttggttctgtgcagatggcaatgtcccgtatcatcaacctgcatcatcatcgcattgcccagtgccatgaggtgatgataaccattgatggtgaagaaggtatcccagtgcaggtggatggggaggcctggattcagagaccaggccttatcaaaattagatacaagaacgctgcccagatgctgacaagagatcgggactttgagaactcaatgaaaatgtgggaatacaagcatactgaaattcaagctgcccctcaaccccagctggacttccaggactctcaagagagcctctctgacgaggagtatgcccagatgcagcacttagctcggcttgcagaaaacctcatcagcaaacttaatgacctgagcaagatccaccagcatgtgtctgtcctcatgggttctgtgaatgccagcgctaacatcctgaatgatatattttacggccaagacagtggcaatgagatgggtgcagcttcctgtattcccattgaaactctaagcagaaatgatgccgtagatgttacatttagtcttaaaggtctctacgatgacaccacagctttcctggatgaaaagctgctgagaagtgctgaggatgagactgcactacaaagcgccctggatgccatgaataaggagttcaaaaagctatctgagattgactggatgaatccaatctttgttccagaggaaaaatcttcggacactgacagtagaagcctcaggctgaaaattaagttccccaaattgggaaagaaaaaggtagaagaggaacgcaagcctaaatcaggccagagtgtccagagttttattggcaatttatggcaccgcagacatcgtgaagatgaagcagagggtgatgatcctctaacaccatcgagatctcaactgtagcccttgaaagctggaagaactcacaacattgagaattctactaaaaaaactctcaaaacctcaatacaggctagactaaatcatttcagaacaaacatgagcaccaccaagaaagaccctccaattcttttcactaatgcattttcctggacttaatctggtctccttagaggtttacatttcctcattggccaaaggttcttgttccgagttgtcttgttcagttctccttctctttgtgcatcttgagcaactacagtatttattgggataagctctttatgaatggcctgggatctataaaggattcaagggagttcacctcttcagggagttttggaatggttttctctgaccagcagagaaactatcaatgctaaggaatgaatgaaagacacacagactcccagggagatgaagagaagggggcaggcaggacagccagacttggttgtgtgtctctccgaatccctgccaactgcaacttgcaccttcaggagatctcttctagttggctcattaaaatgagaactagatcctgggggcttgtccactttcctgttaagatgaccatgtgaaatctctttttgtagatatggtaacctctctctctctctgcaaaccctttgcgtttttctatgtgtgcttgtatgtctgcatatgtccaggtggtgctctggtgggctcattggttggaactcacccctcatggcaaccatacaggctcccctcctgctgccttgatcctagcctgcatgcctccacggagtgtttgcctgcattcttgctggattttttaactaaatgttttgccgctgtgctgcagtatagattatgtatagagacataaagatgtatatatatatacatacgcatatatatttttaagagctgaaaatacaactcgacctctaagtgaccctataatttattgtgctaatccaggaatcccttcccactcccccttactctacataacaataacacatacacctctaccaactgccctatttcttggtggagcttctaaatcttttggtgcattttcagcgtcttagaggtggctgggatctatggcccagctgattctgacgcccccttaaaattctgagccaggccatggaaaggggaacaaaaacaccaatgccctaaagaaggggtttaagctggcatgctgcctttttttgctctatctgtcctagactcttcatcagcaactgtgcccttccccaataaaaagactatatggagcaaccaggccttgagctctgtgacttagatgcctgaactagggactgcctgacaattaagtcacagcctaggcccttccccacaagctccatcttggcctgatcttctggacaggctgttgggtcagtcctcaagtcaccttcaaatctcccatcttgcccttttcccttgagtacagaggggcattgaagtgatcagaaaaaacatgggcctggagaaatgaaggctagaagcctgtgctttcctgtggttcttcttgcaaatttctcatgaaaacaaactattcctaaatcgctccaaatactaattcacatttttcaaaaatgccttctcccagtcagggcaaatctaatcaaaccccaatgcccagagaggttctctctggtcagccttgcatcttcaccccacccttgactcatacctttagttaactgtcccttcccacttatcaagagaaaactggcctctccctacttctcagacaaacttagcgtgctcaattacctgattcagtccaatggctggttcattgaggtgcacaattcagattccaagcactggttctcaactctggaactccaccagcctaacccacttaaaccagccacctgtgctccacctccgcaggggtgaggagaaaaatattaacaaggggatagtccccaaatgtctgattgctgtgccaaactaagtcctagctctacaactagagaagaaagtcaatggaaaaagatgacagaaaacatttaaaacttatttaagcatcagaatgtgttagcttgttgtacatatttgagtagtgagtgtgctgttgttgtgtctttgactttctctgttattagtctttcttcccaggaggaggtattagatgaaatcagcaagctcactattgcagcctgacttggctcctctatggctgcatgcattgacacctgcacacacactcacagagtgggaaccaagttgcattttcttcagaagagctttttccgaaggggaaaatgtccaaatgagcaaatttaggactacagaaggaagtcctgggagaagatagctttatcttggcagtgactaagcagggctgtgtcttataattatttttatcactgatgatagtaaactgtaataagactccatctcttgtgcttactttgctgcaataattaggtctttgtgcacagtgatgctgctgttgctctgttgtgccatgtggattccctttcacctaccctgtcctcccactctgagtcagaatgatattgactgaaaccactagtatttggggctagagtcagctcatggagcacagttgatagatgacaaggcccaggagcaggtgtggcttgctcaatccctcagttacctcctaaattgctaagttaccagtagtttcccaaaaaggaagatagcttgccaagcacctgttcttgcatatgctcacttggaaacaaagcaagaagtgatgcctcaagggagttgtcttagctctgggagtgtgagctcctttaaggactttgttaaccacttgcagtaattaatacaattgcttgggtggtgggaccaaacaccaaatatccatctcaattatgttcagacatcattaagacccaaagctctagggtttggttgtatctttggtagcactttctgacgaattggttgggtaggcaattcctggccagaagaatagtggagaagaaaaagccgatacatttgaactgccaccaactgcttctggtgtcaatactataggaggtaaacagttatgggtccccttctccagaaaggccctgtgctgtgtccataagagcaggttaagaataagaaagagattttttaccttaataaaactgggccagaagaaacagtcagggtcaacgtcatcttccctcaggacacaaatggaagaatttttctttcacgagaggtggaaaataataccaaagcaaccaaacccattagcaccattccatcctatatgagaccttgcttggctatatgatttgtggaattgcatttgtctatttgtcagtgaatctgtaacccattgttgttttctgctctgtgttttttatttcctcagaggcccctgcaaataagcagcagggccaggggctggttgggggaggaagctggggtatttacatggtaacaggaaaaagcagaaaaaaaagatccacaaagtgtgcctattcctctccccccgccaaatggaacaccagtcctcaatgttaataaagtattgcttctttaaatattttaataaatggataaacataa

SEQ ID NO: 126659 - DNA, 4636 bp, Homo sapiens
  Payload ID: 4834
  Gene Symbol: DGKQ
  Gene Name: diacylglycerol kinase, theta 110kDa
  Uniprot ID: P52824
  ENST ID: ENST00000273814
  CDS Start-End: 75-2903
gtaccgggccgtggagcggcggctcctgtacccccggcgcggacctaaaggggctcgggccgctcgggccgggaatggcggcggcggccgagcccggggcccgcgcctggctgggcggcggctccccgcgccccggcagcccggcctgcagccccgtgctgggctcaggaggccgcgcgcgcccggggccggggccggggccgggacccgagcgggcgggcgtcagagccccgggccccgctgccgcgccgggacacagcttccggaaggtgacgctcaccaagcccaccttctgccacctctgctccgacttcatctgggggctggccggcttcctgtgcgacgtctgcaatttcatgtctcatgagaagtgcctgaagcacgtgaggatcccgtgcacgagtgtggcacccagcctggtccgggttcctgtagcccactgcttcggcccccgggggctccacaagcgcaagttctgtgctgtctgccgcaaggtcctggaggcaccggcgctccactgcgaagtgtgtgagctgcacctccacccagactgtgtgcccttcgcctgcagtgactgccgccagtgccaccaggatgggcaccaggatcacgacacccatcaccaccactggcgggaggggaacctgccctcgggagcgcgctgcgaggtctgcaggaagacgtgcggctcctctgacgtgctggccggcgtgcgctgcgagtggtgcggggtccaggcgcactccctctgctccgcggcgctggctcccgagtgtggcttcgggcgtctgcgctccctggtcctgcctcccgcgtgcgtgcgccttctgcccggcggcttcagcaagacgcagagcttccgcatcgtggaggccgcggagccgggcgaggggggcgacggcgccgacgggagcgctgccgtgggtccaggcagagagacacaggcaactccggagtccgggaagcaaacgctgaagatctttgatggcgacgacgcggtgagaagaagccagttccgcctcgtcacggtgtcccgcctggccggtgccgaggaggtgctggaggccgcactgcgggcccaccacatccccgaggaccctggccacctggagctgtgccggctgcccccttcctctcaggcctgtgacgcctgggctgggggcaaggctgggagtgctgtgatctcggaggagggcagaagccccgggtccggcgaggccacgccagaggcctgggtcatccgggctctgccgcgggcccaggaggtcctgaagatctaccctggctggctcaaggtgggcgtggcctacgtgtccgtgcgagtgaccccgaagagcacggcccgctctgtggtgctggaggtcctgccgctgctcggccgccaggccgagagtcccgagagcttccagctggtggaggtggcgatgggctgcaggcacgtccagcggacgatgctgatggacgaacagcccctgctggaccggctacaggacatccggcagatgtctgtgcggcaggtgagccagacgcggttctacgtggcagagagcagggatgtagccccgcacgtctccctgtttgttggcggcctgcctcccggcctgtctcccgaggagtacagcagcctgctgcatgaggccggggctaccaaagccaccgtggtgtccgtgagtcacatctactcctcccaaggcgcggtagtgttggacgttgcctgctttgcggaggccgagcggctgtacatgctgctgaaggacatggctgtgcggggccggctgctcactgccctggtgctccccgacctgctgcacgcgaagctgcccccagacagctgtcccctccttgtgttcgtgaaccccaagagtggaggcctcaagggccgagacctgctctgcagcttccggaagctactgaaccctcatcaggtcttcgacctgaccaacggaggtcctcttcccgggctccacctgttctcccaggtgccctgcttccgggtgctggtgtgtggtggcgatggcactgtgggctgggtgcttggcgccctggaggagacacggtaccgactggcctgcccggagccttctgtggccatcctgcccctgggcacagggaatgaccttggtcgagtcctccgctggggggcgggctacagcggcgaggacccgttctccgtactgctgtctgtggacgaggccgacgccgtgctcatggaccgctggaccatcctgctggatgcccacgaggctggcagtgcagagaacgacacggcagacgcagagccccccaagatcgtgcagatgagtaactactgtggcattggcatcgacgcggagctgagcctggacttccaccaggcacgggaagaggagcctggcaagttcacaagcaggctgcacaacaagggtgtgtacgtgcgggtggggctgcagaagatcagtcactctcggagcctgcacaagcagatccggctgcaggtggagcggcaggaggtggagctgcccagtattgaaggcctcatcttcatcaacatccccagctggggctcgggggccgacctgtggggctccgacagcgacaccaggtttgagaagccacgcatggacgacgggctgctggaggttgtgggcgtgacgggcgtcgtgcacatgggccaggtccagggtgggctgcgctccggaatccggattgcccagggttcctacttccgagtcacgctcctcaaggccaccccggtgcaggtggacggggagccctgggtccaggccccggggcacatgatcatctcagctgctggccctaaggtgcacatgctgaggaaggccaagcagaagccgaggagggccgggaccaccagggatgcccgggcggatgctgcgcctgcccctgagagcgatcctaggtaggggtggctggggcagcccaagggctcgagccatctctgctcccgccagccttgttttcaggtggtctggaggcagctccacgtccacacagtggccggccctgtggtcggacctggctacagccctgaccacagcatcttcccagtgacggagcgggacccgccctcatcccattggtgacacatgttggtgtcacagccctcatcccactggagactggtgtgcgggtggcagtgttaccccgtgtcccgggtgggcgcagggctctggatggtgagccctctgccctgtgggggcctggtcctctcctcaggggtgggcacccatccctctccccactgagccccttgagctggacagtgctggatgcaggccgtccaggtgggtctgatctcactttgtgcccctcgggccgtccccctggccagtccttaagagcagcaggctccctggtgtgtccctgccccagcagacacaggctgccagtccctccagcctcacctccccgccctgggcagcaggtgtgggcagcgtgtgaggctgccgggtggtggtgactggtgacttccttgtgttcagggaagggagaaggtgccttcccttgttttctggccttgttatatacagatggcagcttggatctcaggtacagctccaggggcaggcagtgcccagctggacctggtggccctttcctagtgcctctgcttggggaggagaacctctgtccacgtggaggctaggaggtctcaggtgctgccctggcagcaccagagtgtgggccgggcccgagtgtctgcccctcggccctcagggtggggcacttagcacccagaagggaccaaaagcagggcatggcggtgcagaggagtttgggaggtgtaaacagcccatgcacgtggaggaggagctggctttcagccccagaccccacgctagcactttccacgctgcttgcccgctgttgatgtgcagttcccagtgcctgtgtgagccgacatctgctcagtcctatccctcgtcagcgtgtggagacccagctcctgcagccctcctgctcccacgcccccagacagcttggtggagggtcctgcatctgggccaggctggggtgcacccagccaaagacaaagctgcctccacgtgcccaaggattcagatggtgcactggccccgggaggagtctgaccaaaaatggagcccgctctgtggggaagccccgactcccccacgagaaacggtcccacggtgcggatctcccccttcccttgtggggcacagctggcctgggcctccaatcctgcggagctttcctgggtgtggctttgacctcagaagtggctctggtttggcctcaggagtgtggcctggcccagcctgctgcagcctcctggggggcccttgatgccactaatcccccgaccccccgcatctgccaaactgcacagacacacgcattgtaaggccgcttgtggcctccagcgtgcactcttgtttacgtcattgtcatcttcaagaccagtcctttgtgattagttttgcttcgcgagccctggtgtggactgtggtctgtatgaatcgtgtgtaactgtggtgaggggcttgtcctgtatgtgagtctgtacccaggtggggtctgtgccctgcacaccgggcccctctgtatttatcgctgcctgaatgcaacagtaatttatatccaggacaaatacagtctgggcgtcactatccta

SEQ ID NO: 126660 - DNA, 479 bp, Homo sapiens
  Payload ID: 4834
  Gene Symbol: DGKQ
  Gene Name: diacylglycerol kinase, theta 110kDa
  ENST ID: ENST00000515182
  CDS Start-End: 1-474
cccaagatcgtgcagatgagtaactactgtggcattggcatcgacgcggagctgagcctggacttccaccaggcacgggaagaggagcctggcaagttcacaagcagctggggctcgggggccgacctgtggggctccgacagcgacaccaggtttgagaagccacgcatggacgacgggctgctggaggttgtgggcgtgacgggcgtcgtgcacatgggccaggtccagggtgggctgcgctccggaatccggattgcccagggttcctacttccgagtcacgctcctcaaggccaccccggtgcaggtggacggggagccctgggtccaggccccggggcacatgatcatctcagctgctggccctaaggtgcacatgctgaggaaggccaagcagaagccgaggagggccgggaccaccagggatgcccgggcggatgctgcgcctgcccctgagagcgatcctaggtaggggtg

SEQ ID NO: 126661 - DNA, 4362 bp, Homo sapiens
  Payload ID: 4834
  Gene Symbol: DGKQ
  Gene Name: diacylglycerol kinase, theta 110kDa
  ENST ID: ENST00000509465
  CDS Start-End: 1-2630
gccccgctgccgcgccgggacacagcttccggaaggtgacgctcaccaagcccaccttctgccacctctgctccgacttcatctgggggctggccggcttcctgtgcgacgtctgcaatttcatgtctcatgagaagtgcctgaagcacgtgaggatcccgtgcacgagtgtggcacccagcctggtccgggttcctgtagcccactgcttcggcccccgggggctccacaagcgcaagttctgtgctgtctgccgcaaggtcctggaggcaccggcgctccactgcgaagtgtgtgagctgcacctccacccagactgtgtgcccttcgcctgcagtgactgccgccagtgccaccaggatgggcaccaggatcacgacacccatcaccaccactggcgggaggggaacctgccctcgggagcgcgctgcgaggtctgcaggaagacgtgcggctcctctgacgtgctggccggcgtgcgctgcgagtggtgcggggtccaggcgcactccctctgctccgcggcgctggctcccgagtgtggcttcgggcgtctgcgctccctggtcctgcctcccgcgtgcgtgcgccttctgcccggcggcttcagcaagacgcagagcttccgcatcgtggaggccgcggagccgggcgaggggggcgacggcgccgacgggagcgctgccgtgggtccaggcagagagacacaggcaactccggagtccgggaagcaaacgctgaagatctttgatggcgacgacgcggtgagaagaagccagttccgcctcgtcacggtgtcccgcctggccggtgccgaggaggtgctggaggccgcactgcgggcccaccacatccccgaggaccctggccacctggagctgtgccggctgcccccttcctctcaggcctgtgacgcctgggctgggggcaaggctgggagtgctgtgatctcggaggagggcagaagccccgggtccggcgaggccacgccagaggcctgggtcatccgggctctgccgcgggcccaggaggtcctgaagatctaccctggctggctcaaggtgggcgtggcctacgtgtccgtgcgagtgaccccgaagagcacggcccgctctgtggtgctggaggtcctgccgctgctcggccgccaggccgagagtcccgagagcttccagctggtggaggtggcgatgggctgcaggcacgtccagcggacgatgctgatggacgaacagcccctgctggaccggctacaggacatccggcagatgtctgtgcggcaggtgagccagacgcggttctacgtggcagagagcagggatgtagccccgcacgtctccctgtttgttggcggcctgcctcccggcctgtctcccgaggagtacagcagcctgctgcatgaggccggggctaccaaaggcgcggtagtgttggacgttgcctgctttgcggaggccgagcggctgtacatgctgctgaaggacatggctgtgcggggccggctgctcactgccctggtgctccccgacctgctgcacgcgaagctgcccccagacagctgtcccctccttgtgttcgtgaaccccaagagtggaggcctcaagggccgagacctgctctgcagcttccggaagctactgaaccctcatcaggtcttcgacctgaccaacggaggtcctcttcccgggctccacctgttctcccaggtgccctgcttccgggtgctggtgtgtggtggcgatggcactgtgggctgggtgcttggcgccctggaggagacacggtaccgactggcctgcccggagccttctgtggccatcctgcccctgggcacagggaatgaccttggtcgagtcctccgctggggggcgggctacagcggcgaggacccgttctccgtactgctgtctgtggacgaggccgacgccgtgctcatggaccgctggaccatcctgctggatgcccacgaggctggcagtgcagagaacgacacggcagacgcagagccccccaagatcgtgcagatgagtaactactgtggcattggcatcgacgcggagctgagcctggacttccaccaggcacgggaagaggagcctggcaagttcacaagcaggctgcacaacaagggtgtgtacgtgcgggtggggctgcagaagatcagtcactctcggagcctgcacaagcagatccggctgcaggtggagcggcaggaggtggagctgcccagtattgaaggcctcatcttcatcaacatccccagctggggctcgggggccgacctgtggggctccgacagcgacaccaggtttgagaagccacgcatggacgacgggctgctggaggttgtgggcgtgacgggcgtcgtgcacatgggccaggtccagggtgggctgcgctccggaatccggattgcccagggttcctacttccgagtcacgctcctcaaggccaccccggtgcaggtggacggggagccctgggtccaggccccggggcacatgatcatctcagctgctggccctaaggtgcacatgctgaggaaggccaagcagaagccgaggagggccgggaccaccagggatgcccgggcggatgctgcgcctgcccctgagagcgatcctaggtaggggtggctggggcagcccaagggctcgagccatctctgctcccgccagccttgttttcaggtggtctggaggcagctccacgtccacacagtggccggccctgtggtcggacctggctacagccctgaccacagcatcttcccagtgacggagcgggacccgccctcatcccattggtgacacatgttggtgtcacagccctcatcccactggagactggtgtgcgggtggcagtgttaccccgtgtcccgggtgggcgcagggctctggatggtgagccctctgccctgtgggggcctggtcctctcctcaggggtgggcacccatccctctccccactgagccccttgagctggacagtgctggatgcaggccgtccaggtgggtctgatctcactttgtgcccctcgggccgtccccctggccagtccttaagagcagcaggctccctggtgtgtccctgccccagcagacacaggctgccagtccctccagcctcacctccccgccctgggcagcaggtgtgggcagcgtgtgaggctgccgggtggtggtgactggtgacttccttgtgttcagggaagggagaaggtgccttcccttgttttctggccttgttatatacagatggcagcttggatctcaggtacagctccaggggcaggcagtgcccagctggacctggtggccctttcctagtgcctctgcttggggaggagaacctctgtccacgtggaggctaggaggtctcaggtgctgccctggcagcaccagagtgtgggccgggcccgagtgtctgcccctcggccctcagggtggggcacttagcacccagaagggaccaaaagcagggcatggcggtgcagaggagtttgggaggtgtaaacagcccatgcacgtggaggaggagctggctttcagccccagaccccacgctagcactttccacgctgcttgcccgctgttgatgtgcagttcccagtgcctgtgtgagccgacatctgctcagtcctatccctcgtcagcgtgtggagacccagctcctgcagccctcctgctcccacgcccccagacagcttggtggagggtcctgcatctgggccaggctggggtgcacccagccaaagacaaagctgcctccacgtgcccaaggattcagatggtgcactggccccgggaggagtctgaccaaaaatggagcccgctctgtggggaagccccgactcccccacgagaaacggtcccacggtgcggatctcccccttcccttgtggggcacagctggcctgggcctccaatcctgcggagctttcctgggtgtggctttgacctcagaagtggctctggtttggcctcaggagtgtggcctggcccagcctgctgcagcctcctggggggcccttgatgccactaatcccccgaccccccgcatctgccaaactgcacagacacacgcattgtaaggccgcttgtggcctccagcgtgcactcttgtttacgtcattgtcatcttcaagaccagtcctttgtgattagttttgcttcgcgagccctggtgtggactgtggtctgtatgaatcgtgtgtaactgtggtgaggggcttgtcctgtatgtgagtctgtacccaggtggggtctgtgccctgcacaccgggcccctctgtatttatcgctgcctgaatgcaacagtaatttatatccaggacaaatacagtctgggcgtcactatcct

SEQ ID NO: 126662 - DNA, 473 bp, Homo sapiens
  Payload ID: 4834
  Gene Symbol: DGKQ
  Gene Name: diacylglycerol kinase, theta 110kDa
  ENST ID: ENST00000510286
  CDS Start-End: 45-473
gagccccgcttccttgcgggcctcaggggctgctctgaggaccgatgactcggaaagcgctcagaagaacgcttcgcccgttggtgctattctgcaatttcatgtctcatgagaagtgcctgaagcacgtgaggatcccgtgcacgagtgtggcacccagcctggtccgggttcctgtagcccactgcttcggcccccgggggctccacaagcgcaagttctgtgctgtctgccgcaaggtcctggaggcaccggcgctccactgcgaagtgtgtgagctgcacctccacccagactgtgtgcccttcgcctgcagtgactgccgccagtgccaccaggatgggcaccaggatcacgacacccatcaccaccactggcgggaggggaacctgccctcgggagcgcgctgcgaggtctgcaggaagacgtgcggctcctctgacgtgctggccggcgtgcgctgcgagtggtgc

SEQ ID NO: 126663 - DNA, 3213 bp, Homo sapiens
  Payload ID: 4835
  Gene Symbol: DGKZ
  Gene Name: diacylglycerol kinase, zeta
  Uniprot ID: Q13574
  ENST ID: ENST00000318201
  CDS Start-End: 73-2793
gtgctgagccccggccgccggcccggcatgggcgtctcccgcgggccctccgccggccggggctagggccggatggagccgcgggacggtagccccgaggcccggagcagcgactccgagtcggcttccgcctcgtccagcggctccgagcgcgacgccggtcccgagccggacaaggcgccgcggcgactcaacaagcggcgcttcccggggctgcggctcttcgggcacaggaaagccatcaccaagtcgggcctccagcacctggccccccctccgcccacccctggggccccgtgcagcgagtcagagcggcagatccggagtacagtggactggagcgagtcagcgacatatggggagcacatctggttcgagaccaacgtgtccggggacttctgctacgttggggagcagtactgtgtagccaggatgctgcagaagtcagtgtctcgaagaaagtgcgcagcctgcaagattgtggtgcacacgccctgcatcgagcagctggagaagataaatttccgctgtaagccgtccttccgtgaatcaggctccaggaatgtccgcgagggattccagcagaagttcaccttccacagcaaggagattgtggccatcagctgctcgtggtgcaagcaggcataccacagcaaggtgtcctgcttcatgctgcagcagatcgaggagccgtgctcgctgggggtccacgcagccgtggtcatcccgcccacctggatcctccgcgcccggaggccccagaatactctgaaagcaagcaagaagaagaagagggcatccttcaagaggaagtccagcaagaaagggcctgaggagggccgctggagacccttcatcatcaggcccaccccctccccgctcatgaagcccctgctggtgtttgtgaaccccaagagtgggggcaaccagggtgcaaagatcatccagtctttcctctggtatctcaatccccgacaagtcttcgacctgagccagggagggcccaaggaggcgctggagatgtaccgcaaagtgcacaacctgcggatcctggcgtgcgggggcgacggcacggtgggctggatcctctccaccctggaccagctacgcctgaagccgccaccccctgttgccatcctgcccctgggtactggcaacgacttggcccgaaccctcaactggggtgggggctacacagatgagcctgtgtccaagatcctctcccacgtggaggaggggaacgtggtacagctggaccgctgggacctccacgctgagcccaaccccgaggcagggcctgaggaccgagatgaaggcgccaccgaccggttgcccctggatgtcttcaacaactacttcagcctgggctttgacgcccacgtcaccctggagttccacgagtctcgagaggccaacccagagaaattcaacagccgctttcggaataagatgttctacgccgggacagctttctctgacttcctgatgggcagctccaaggacctggccaagcacatccgagtggtgtgtgatggaatggacttgactcccaagatccaggacctgaaaccccagtgtgttgttttcctgaacatccccaggtactgtgcgggcaccatgccctggggccaccctggggagcaccacgactttgagccccagcggcatgacgacggctacctcgaggtcattggcttcaccatgacgtcgttggccgcgctgcaggtgggcggacacggcgagcggctgacgcagtgtcgcgaggtggtgctcaccacatccaaggccatcccggtgcaggtggatggcgagccctgcaagcttgcagcctcacgcatccgcatcgccctgcgcaaccaggccaccatggtgcagaaggccaagcggcggagcgccgcccccctgcacagcgaccagcagccggtgccagagcagttgcgcatccaggtgagtcgcgtcagcatgcacgactatgaggccctgcactacgacaaggagcagctcaaggaggcctctgtgccgctgggcactgtggtggtcccaggagacagtgacctagagctctgccgtgcccacattgagagactccagcaggagcccgatggtgctggagccaagtccccgacatgccagaaactgtcccccaagtggtgcttcctggacgccaccactgccagccgcttctacaggatcgaccgagcccaggagcacctcaactatgtgactgagatcgcacaggatgagatttatatcctggaccctgagctgctgggggcatcggcccggcctgacctcccaacccccacttcccctctccccacctcaccctgctcacccacgccccggtcactgcaaggggatgctgcaccccctcaaggtgaagagctgattgaggctgccaagaggaacgacttctgtaagctccaggagctgcaccgagctgggggcgacctcatgcaccgagacgagcagagtcgcacgctcctgcaccacgcagtcagcactggcagcaaggatgtggtccgctacctgctggaccacgcccccccagagatccttgatgcggtggaggaaaacggggagacctgtttgcaccaagcagcggccctgggccagcgcaccatctgccactacatcgtggaggccggggcctcgctcatgaagacagaccagcagggcgacactccccggcagcgggctgagaaggctcaggacaccgagctggccgcctacctggagaaccggcagcactaccagatgatccagcgggaggaccaggagacggctgtgtagcgggccgcccacgggcagcaggagggacaatgcggccaggggacgagcgccttccttgcccacctcactgccacattccagtgggacggccacggggggacctaggccccagggaaagagccccatgccgccccctaaggagccgcccagacctagggctggactcaggagctgggggggcctcacctgttcccctgaggaccccgccggacccggaggctcacagggaacaagacacggctgggttggatatgcctttgccggggttctggggcagggcgctccctggccgcagcagatgccctcccaggagtggaggggctggagagggggaggccttcgggaagaggcttcctgggccccctggtcttcggccgggtccccagcccccgctcctgccccaccccacctcctccgggc

SEQ ID NO: 126664 - DNA, 3816 bp, Homo sapiens
  Payload ID: 4835
  Gene Symbol: DGKZ
  Gene Name: diacylglycerol kinase, zeta
  Uniprot ID: Q13574
  ENST ID: ENST00000343674
  CDS Start-End: 372-3209
ggagagtgtctctaaggtgacactcgggtgcgcggcagcagcggcggttgcaggagctcgctctccgcccgggctccggctccgctccagccgtccggggggcgccgcggcgcgcagagcgcagcaccccgactccagccaggagcccccgcccccccggagcgcaggaggaccccggcccgcctctcccaggcgcagcgcccagcatctcgctgctcctgtcgtctaagcgtcggcgtcgctagggacctgcggaacccggcgctcccctccctccccgcctcgcgtccccggcccgggcggactggagactcgaacttgagcgggtgcccgaaaggccgcaggagccgcgggcggaaggcggccgcacgatggccgaggggcagggcggcggagggcagcgctgggactgggctggcggcggccgggcagccgaggaggaggtggtgcggcggcgatgccggcgcggggaggaggcccaggtcgcgcagccctggcccgagggttcccggggcacggccgctgggcccccggtggaggagcgtttccgccagctgcacctacgaaagcaggtgtcttacaggaaagccatcaccaagtcgggcctccagcacctggccccccctccgcccacccctggggccccgtgcagcgagtcagagcggcagatccggagtacagtggactggagcgagtcagcgacatatggggagcacatctggttcgagaccaacgtgtccggggacttctgctacgttggggagcagtactgtgtagccaggatgctgaagtcagtgtctcgaagaaagtgcgcagcctgcaagattgtggtgcacacgccctgcatcgagcagctggagaagataaatttccgctgtaagccgtccttccgtgaatcaggctccaggaatgtccgcgagccaacctttgtacggcaccactgggtacacagacgacgccaggacggcaagtgtcggcactgtgggaagggattccagcagaagttcaccttccacagcaaggagattgtggccatcagctgctcgtggtgcaagcaggcataccacagcaaggtgtcctgcttcatgctgcagcagatcgaggagccgtgctcgctgggggtccacgcagccgtggtcatcccgcccacctggatcctccgcgcccggaggccccagaatactctgaaagcaagcaagaagaagaagagggcatccttcaagaggaagtccagcaagaaagggcctgaggagggccgctggagacccttcatcatcaggcccaccccctccccgctcatgaagcccctgctggtgtttgtgaaccccaagagtgggggcaaccagggtgcaaagatcatccagtctttcctctggtatctcaatccccgacaagtcttcgacctgagccagggagggcccaaggaggcgctggagatgtaccgcaaagtgcacaacctgcggatcctggcgtgcgggggcgacggcacggtgggctggatcctctccaccctggaccagctacgcctgaagccgccaccccctgttgccatcctgcccctgggtactggcaacgacttggcccgaaccctcaactggggtgggggctacacagatgagcctgtgtccaagatcctctcccacgtggaggaggggaacgtggtacagctggaccgctgggacctccacgctgagcccaaccccgaggcagggcctgaggaccgagatgaaggcgccaccgaccggttgcccctggatgtcttcaacaactacttcagcctgggctttgacgcccacgtcaccctggagttccacgagtctcgagaggccaacccagagaaattcaacagccgctttcggaataagatgttctacgccgggacagctttctctgacttcctgatgggcagctccaaggacctggccaagcacatccgagtggtgtgtgatggaatggacttgactcccaagatccaggacctgaaaccccagtgtgttgttttcctgaacatccccaggtactgtgcgggcaccatgccctggggccaccctggggagcaccacgactttgagccccagcggcatgacgacggctacctcgaggtcattggcttcaccatgacgtcgttggccgcgctgcaggtgggcggacacggcgagcggctgacgcagtgtcgcgaggtggtgctcaccacatccaaggccatcccggtgcaggtggatggcgagccctgcaagcttgcagcctcacgcatccgcatcgccctgcgcaaccaggccaccatggtgcagaaggccaagcggcggagcgccgcccccctgcacagcgaccagcagccggtgccagagcagttgcgcatccaggtgagtcgcgtcagcatgcacgactatgaggccctgcactacgacaaggagcagctcaaggaggcctctgtgccgctgggcactgtggtggtcccaggagacagtgacctagagctctgccgtgcccacattgagagactccagcaggagcccgatggtgctggagccaagtccccgacatgccagaaactgtcccccaagtggtgcttcctggacgccaccactgccagccgcttctacaggatcgaccgagcccaggagcacctcaactatgtgactgagatcgcacaggatgagatttatatcctggaccctgagctgctgggggcatcggcccggcctgacctcccaacccccacttcccctctccccacctcaccctgctcacccacgccccggtcactgcaaggggatgctgcaccccctcaaggtgaagagctgattgaggctgccaagaggaacgacttctgtaagctccaggagctgcaccgagctgggggcgacctcatgcaccgagacgagcagagtcgcacgctcctgcaccacgcagtcagcactggcagcaaggatgtggtccgctacctgctggaccacgcccccccagagatccttgatgcggtggaggaaaacggggagacctgtttgcaccaagcagcggccctgggccagcgcaccatctgccactacatcgtggaggccggggcctcgctcatgaagacagaccagcagggcgacactccccggcagcgggctgagaaggctcaggacaccgagctggccgcctacctggagaaccggcagcactaccagatgatccagcgggaggaccaggagacggctgtgtagcgggccgcccacgggcagcaggagggacaatgcggccaggggacgagcgccttccttgcccacctcactgccacattccagtgggacggccacggggggacctaggccccagggaaagagccccatgccgccccctaaggagccgcccagacctagggctggactcaggagctgggggggcctcacctgttcccctgaggaccccgccggacccggaggctcacagggaacaagacacggctgggttggatatgcctttgccggggttctggggcagggcgctccctggccgcagcagatgccctcccaggagtggaggggctggagagggggaggccttcgggaagaggcttcctgggccccctggtcttcggccgggtccccagcccccgctcctgccccaccccacctcctccgggcttcctcccggaaactcagcgcctgctgcacttgcctgccctgccttgcttggcacccgctccggcgaccctccccgctcccctgtcatttcatcgcggactgtgcggcctgggggtggggggcgggactctcacggtgacatgtttacagctgggtgtgactcagtaaagtggatttttttttcttt

SEQ ID NO: 126665 - DNA, 2862 bp, Homo sapiens
  Payload ID: 4835
  Gene Symbol: DGKZ
  Gene Name: diacylglycerol kinase, zeta
  Uniprot ID: Q13574
  ENST ID: ENST00000421244
  CDS Start-End: 73-2862
gtgctgagccccggccgccggcccggcatgggcgtctcccgcgggccctccgccggccggggctagggccggatggagccgcgggacggtagccccgaggcccggagcagcgactccgagtcggcttccgcctcgtccagcggctccgagcgcgacgccggtcccgagccggacaaggcgccgcggcgactcaacaagcggcgcttcccggggctgcggctcttcgggcacaggaaagccatcaccaagtcgggcctccagcacctggccccccctccgcccacccctggggccccgtgcagcgagtcagagcggcagatccggagtacagtggactggagcgagtcagcgacatatggggagcacatctggttcgagaccaacgtgtccggggacttctgctacgttggggagcagtactgtgtagccaggatgctgcagaagtcagtgtctcgaagaaagtgcgcagcctgcaagattgtggtgcacacgccctgcatcgagcagctggagaagataaatttccgctgtaagccgtccttccgtgaatcaggctccaggaatgtccgcgagccaacctttgtacggcaccactgggtacacagacgacgccaggacggcaagtgtcggcactgtgggaagggattccagcagaagttcaccttccacagcaaggagattgtggccatcagctgctcgtggtgcaagcaggcataccacagcaaggtgtcctgcttcatgctgcagcagatcgaggagccgtgctcgctgggggtccacgcagccgtggtcatcccgcccacctggatcctccgcgcccggaggccccagaatactctgaaagcaagcaagaagaagaagagggcatccttcaagaggaagtccagcaagaaagggcctgaggagggccgctggagacccttcatcatcaggcccaccccctccccgctcatgaagcccctgctggtgtttgtgaaccccaagagtgggggcaaccagggtgcaaagatcatccagtctttcctctggtatctcaatccccgacaagtcttcgacctgagccagggagggcccaaggaggcgctggagatgtaccgcaaagtgcacaacctgcggatcctggcgtgcgggggcgacggcacggtgggctggatcctctccaccctggaccagctacgcctgaagccgccaccccctgttgccatcctgcccctgggtactggcaacgacttggcccgaaccctcaactggggtgggggctacacagatgagcctgtgtccaagatcctctcccacgtggaggaggggaacgtggtacagctggaccgctgggacctccacgctgagcccaaccccgaggcagggcctgaggaccgagatgaaggcgccaccgaccggttgcccctggatgtcttcaacaactacttcagcctgggctttgacgcccacgtcaccctggagttccacgagtctcgagaggccaacccagagaaattcaacagccgctttcggaataagatgttctacgccgggacagctttctctgacttcctgatgggcagctccaaggacctggccaagcacatccgagtggtgtgtgatggaatggacttgactcccaagatccaggacctgaaaccccagtgtgttgttttcctgaacatccccaggtactgtgcgggcaccatgccctggggccaccctggggagcaccacgactttgagccccagcggcatgacgacggctacctcgaggtcattggcttcaccatgacgtcgttggccgcgctgcaggtgggcggacacggcgagcggctgacgcagtgtcgcgaggtggtgctcaccacatccaaggccatcccggtgcaggtggatggcgagccctgcaagcttgcagcctcacgcatccgcatcgccctgcgcaaccaggccaccatggtgcagaaggccaagcggcggagcgccgcccccctgcacagcgaccagcagccggtgccagagcagttgcgcatccaggtgagtcgcgtcagcatgcacgactatgaggccctgcactacgacaaggagcagctcaaggaggcctctgtgccgctgggcactgtggtggtcccaggagacagtgacctagagctctgccgtgcccacattgagagactccagcaggagcccgatggtgctggagccaagtccccgacatgccagaaactgtcccccaagtggtgcttcctggacgccaccactgccagccgcttctacaggatcgaccgagcccaggagcacctcaactatgtgactgagatcgcacaggatgagatttatatcctggaccctgagctgctgggggcatcggcccggcctgacctcccaacccccacttcccctctccccacctcaccctgctcacccacgccccggtcactgcaaggggatgctgcaccccctcaaggtgaagagctgattgaggctgccaagaggaacgacttctgtaagctccaggagctgcaccgagctgggggcgacctcatgcaccgagacgagcagagtcgcacgctcctgcaccacgcagtcagcactggcagcaaggatgtggtccgctacctgctggaccacgcccccccagagatccttgatgcggtggaggaaaacggggagacctgtttgcaccaagcagcggccctgggccagcgcaccatctgccactacatcgtggaggccggggcctcgctcatgaagacagaccagcagggcgacactccccggcagcgggctgagaaggctcaggacaccgagctggccgcctacctggagaaccggcagcactaccagatgatccagcgggaggaccaggagacggctgtgtag

SEQ ID NO: 126666 - DNA, 3482 bp, Homo sapiens
  Payload ID: 4835
  Gene Symbol: DGKZ
  Gene Name: diacylglycerol kinase, zeta
  Uniprot ID: Q13574
  ENST ID: ENST00000456247
  CDS Start-End: 89-2875
gcggcgcggagcgggcgtgctgagccccggccgccggcccggcatgggcgtctcccgcgggccctccgccggccggggctagggccggatggagccgcgggacggtagccccgaggcccggagcagcgactccgagtcggcttccgcctcgtccagcggctccgagcgcgacgccggtcccgagccggacaaggcgccgcggcgactcaacaagcggcgcttcccggggctgcggctcttcgggcacaggaaagccatcaccaagtcgggcctccagcacctggccccccctccgcccacccctggggccccgtgcagcgagtcagagcggcagatccggagtacagtggactggagcgagtcagcgacatatggggagcacatctggttcgagaccaacgtgtccggggacttctgctacgttggggagcagtactgtgtagccaggatgctgaagtcagtgtctcgaagaaagtgcgcagcctgcaagattgtggtgcacacgccctgcatcgagcagctggagaagataaatttccgctgtaagccgtccttccgtgaatcaggctccaggaatgtccgcgagccaacctttgtacggcaccactgggtacacagacgacgccaggacggcaagtgtcggcactgtgggaagggattccagcagaagttcaccttccacagcaaggagattgtggccatcagctgctcgtggtgcaagcaggcataccacagcaaggtgtcctgcttcatgctgcagcagatcgaggagccgtgctcgctgggggtccacgcagccgtggtcatcccgcccacctggatcctccgcgcccggaggccccagaatactctgaaagcaagcaagaagaagaagagggcatccttcaagaggaagtccagcaagaaagggcctgaggagggccgctggagacccttcatcatcaggcccaccccctccccgctcatgaagcccctgctggtgtttgtgaaccccaagagtgggggcaaccagggtgcaaagatcatccagtctttcctctggtatctcaatccccgacaagtcttcgacctgagccagggagggcccaaggaggcgctggagatgtaccgcaaagtgcacaacctgcggatcctggcgtgcgggggcgacggcacggtgggctggatcctctccaccctggaccagctacgcctgaagccgccaccccctgttgccatcctgcccctgggtactggcaacgacttggcccgaaccctcaactggggtgggggctacacagatgagcctgtgtccaagatcctctcccacgtggaggaggggaacgtggtacagctggaccgctgggacctccacgctgagcccaaccccgaggcagggcctgaggaccgagatgaaggcgccaccgaccggttgcccctggatgtcttcaacaactacttcagcctgggctttgacgcccacgtcaccctggagttccacgagtctcgagaggccaacccagagaaattcaacagccgctttcggaataagatgttctacgccgggacagctttctctgacttcctgatgggcagctccaaggacctggccaagcacatccgagtggtgtgtgatggaatggacttgactcccaagatccaggacctgaaaccccagtgtgttgttttcctgaacatccccaggtactgtgcgggcaccatgccctggggccaccctggggagcaccacgactttgagccccagcggcatgacgacggctacctcgaggtcattggcttcaccatgacgtcgttggccgcgctgcaggtgggcggacacggcgagcggctgacgcagtgtcgcgaggtggtgctcaccacatccaaggccatcccggtgcaggtggatggcgagccctgcaagcttgcagcctcacgcatccgcatcgccctgcgcaaccaggccaccatggtgcagaaggccaagcggcggagcgccgcccccctgcacagcgaccagcagccggtgccagagcagttgcgcatccaggtgagtcgcgtcagcatgcacgactatgaggccctgcactacgacaaggagcagctcaaggaggcctctgtgccgctgggcactgtggtggtcccaggagacagtgacctagagctctgccgtgcccacattgagagactccagcaggagcccgatggtgctggagccaagtccccgacatgccagaaactgtcccccaagtggtgcttcctggacgccaccactgccagccgcttctacaggatcgaccgagcccaggagcacctcaactatgtgactgagatcgcacaggatgagatttatatcctggaccctgagctgctgggggcatcggcccggcctgacctcccaacccccacttcccctctccccacctcaccctgctcacccacgccccggtcactgcaaggggatgctgcaccccctcaaggtgaagagctgattgaggctgccaagaggaacgacttctgtaagctccaggagctgcaccgagctgggggcgacctcatgcaccgagacgagcagagtcgcacgctcctgcaccacgcagtcagcactggcagcaaggatgtggtccgctacctgctggaccacgcccccccagagatccttgatgcggtggaggaaaacggggagacctgtttgcaccaagcagcggccctgggccagcgcaccatctgccactacatcgtggaggccggggcctcgctcatgaagacagaccagcagggcgacactccccggcagcgggctgagaaggctcaggacaccgagctggccgcctacctggagaaccggcagcactaccagatgatccagcgggaggaccaggagacggctgtgtagcgggccgcccacgggcagcaggagggacaatgcggccaggggacgagcgccttccttgcccacctcactgccacattccagtgggacggccacggggggacctaggccccagggaaagagccccatgccgccccctaaggagccgcccagacctagggctggactcaggagctgggggggcctcacctgttcccctgaggaccccgccggacccggaggctcacagggaacaagacacggctgggttggatatgcctttgccggggttctggggcagggcgctccctggccgcagcagatgccctcccaggagtggaggggctggagagggggaggccttcgggaagaggcttcctgggccccctggtcttcggccgggtccccagcccccgctcctgccccaccccacctcctccgggcttcctcccggaaactcagcgcctgctgcacttgcctgccctgccttgcttggcacccgctccggcgaccctccccgctcccctgtcatttcatcgcggactgtgcggcctgggggtggggggcgggactctcacggtgacatgtttacagctgggtgtgactcagtaaagtggatttttttttcttt

SEQ ID NO: 126667 - DNA, 4086 bp, Homo sapiens
  Payload ID: 4835
  Gene Symbol: DGKZ
  Gene Name: diacylglycerol kinase, zeta
  Uniprot ID: Q13574
  ENST ID: ENST00000454345
  CDS Start-End: 126-3479
tgctagctctccaaactaggacttgctcagcagaggccgccagcccggagctggatccagagcccggccttggggaccccagctcccacctgcgccctgccttccagatcagccaaccgcctgccatggagactttctttaggagacatttccgggggaaggtgccaggccctggagaggggcagcagcggcccagcagcgtggggctgcccacaggcaaggcccggcgtcgctcccccgctgggcaggcctcctcctcactggcacagcggcgccgctccagcgcccagctccagggctgcctcctgagttgcggggtgagggcccagggttccagccgccggcgctccagcactgtgcccccttcctgcaacccccgcttcatcgtggataaggtgctcactccacagcctaccaccgtgggggcccagcttctgggtgcacccctgctgttgaccgggcttgtgggcatgaatgaggaggagggtgtccaggaggatgtggtagccgaggcatcgagcgccatccagccaggcaccaagacaccagggccacccccacctcggggcgcccagccgctgttgcccctaccccgctacctgcgccgagcctcctcccacctgctccccgcggatgccgtatatgaccacgctctctggggcctgcacggctactatcggcgcctcagccagcggcggccctcaggccagcaccctggccctgggggccgaagagcctcaggcaccaccgccggcaccatgctgcccacccgtgtgcgcccactgtcccgcaggcgccaggtagccctacggcgcaaggcggccggaccccaggcctggagcgccctgctcgcgaaagccatcaccaagtcgggcctccagcacctggccccccctccgcccacccctggggccccgtgcagcgagtcagagcggcagatccggagtacagtggactggagcgagtcagcgacatatggggagcacatctggttcgagaccaacgtgtccggggacttctgctacgttggggagcagtactgtgtagccaggatgctgaagtcagtgtctcgaagaaagtgcgcagcctgcaagattgtggtgcacacgccctgcatcgagcagctggagaagataaatttccgctgtaagccgtccttccgtgaatcaggctccaggaatgtccgcgagccaacctttgtacggcaccactgggtacacagacgacgccaggacggcaagtgtcggcactgtgggaagggattccagcagaagttcaccttccacagcaaggagattgtggccatcagctgctcgtggtgcaagcaggcataccacagcaaggtgtcctgcttcatgctgcagcagatcgaggagccgtgctcgctgggggtccacgcagccgtggtcatcccgcccacctggatcctccgcgcccggaggccccagaatactctgaaagcaagcaagaagaagaagagggcatccttcaagaggaagtccagcaagaaagggcctgaggagggccgctggagacccttcatcatcaggcccaccccctccccgctcatgaagcccctgctggtgtttgtgaaccccaagagtgggggcaaccagggtgcaaagatcatccagtctttcctctggtatctcaatccccgacaagtcttcgacctgagccagggagggcccaaggaggcgctggagatgtaccgcaaagtgcacaacctgcggatcctggcgtgcgggggcgacggcacggtgggctggatcctctccaccctggaccagctacgcctgaagccgccaccccctgttgccatcctgcccctgggtactggcaacgacttggcccgaaccctcaactggggtgggggctacacagatgagcctgtgtccaagatcctctcccacgtggaggaggggaacgtggtacagctggaccgctgggacctccacgctgagcccaaccccgaggcagggcctgaggaccgagatgaaggcgccaccgaccggttgcccctggatgtcttcaacaactacttcagcctgggctttgacgcccacgtcaccctggagttccacgagtctcgagaggccaacccagagaaattcaacagccgctttcggaataagatgttctacgccgggacagctttctctgacttcctgatgggcagctccaaggacctggccaagcacatccgagtggtgtgtgatggaatggacttgactcccaagatccaggacctgaaaccccagtgtgttgttttcctgaacatccccaggtactgtgcgggcaccatgccctggggccaccctggggagcaccacgactttgagccccagcggcatgacgacggctacctcgaggtcattggcttcaccatgacgtcgttggccgcgctgcaggtgggcggacacggcgagcggctgacgcagtgtcgcgaggtggtgctcaccacatccaaggccatcccggtgcaggtggatggcgagccctgcaagcttgcagcctcacgcatccgcatcgccctgcgcaaccaggccaccatggtgcagaaggccaagcggcggagcgccgcccccctgcacagcgaccagcagccggtgccagagcagttgcgcatccaggtgagtcgcgtcagcatgcacgactatgaggccctgcactacgacaaggagcagctcaaggaggcctctgtgccgctgggcactgtggtggtcccaggagacagtgacctagagctctgccgtgcccacattgagagactccagcaggagcccgatggtgctggagccaagtccccgacatgccagaaactgtcccccaagtggtgcttcctggacgccaccactgccagccgcttctacaggatcgaccgagcccaggagcacctcaactatgtgactgagatcgcacaggatgagatttatatcctggaccctgagctgctgggggcatcggcccggcctgacctcccaacccccacttcccctctccccacctcaccctgctcacccacgccccggtcactgcaaggggatgctgcaccccctcaaggtgaagagctgattgaggctgccaagaggaacgacttctgtaagctccaggagctgcaccgagctgggggcgacctcatgcaccgagacgagcagagtcgcacgctcctgcaccacgcagtcagcactggcagcaaggatgtggtccgctacctgctggaccacgcccccccagagatccttgatgcggtggaggaaaacggggagacctgtttgcaccaagcagcggccctgggccagcgcaccatctgccactacatcgtggaggccggggcctcgctcatgaagacagaccagcagggcgacactccccggcagcgggctgagaaggctcaggacaccgagctggccgcctacctggagaaccggcagcactaccagatgatccagcgggaggaccaggagacggctgtgtagcgggccgcccacgggcagcaggagggacaatgcggccaggggacgagcgccttccttgcccacctcactgccacattccagtgggacggccacggggggacctaggccccagggaaagagccccatgccgccccctaaggagccgcccagacctagggctggactcaggagctgggggggcctcacctgttcccctgaggaccccgccggacccggaggctcacagggaacaagacacggctgggttggatatgcctttgccggggttctggggcagggcgctccctggccgcagcagatgccctcccaggagtggaggggctggagagggggaggccttcgggaagaggcttcctgggccccctggtcttcggccgggtccccagcccccgctcctgccccaccccacctcctccgggcttcctcccggaaactcagcgcctgctgcacttgcctgccctgccttgcttggcacccgctccggcgaccctccccgctcccctgtcatttcatcgcggactgtgcggcctgggggtggggggcgggactctcacggtgacatgtttacagctgggtgtgactcagtaaagtggatttttttttcttt

SEQ ID NO: 126668 - DNA, 592 bp, Homo sapiens
  Payload ID: 4835
  Gene Symbol: DGKZ
  Gene Name: diacylglycerol kinase, zeta
  ENST ID: ENST00000524869
  CDS Start-End: 1-592
ttcggaataagatgttctacgccgggacagctttctctgacttcctgatgggcagctccaaggacctggccaagcacatccgagtggtggtgagcggggccaggctgccgtgggtgggtgggccggaagggagggaggcggaggccacctggcacatgcacctcaacaccctccccgcccgcctccagtgtgatggaatggacttgactcccaagatccaggacctgaaaccccagtgtgttgttttcctgaacatccccaggtactgtgcgggcaccatgccctggggccaccctggggagcaccacgactttgagccccagcggcatgacgacggctacctcgaggtcattggcttcaccatgacgtcgttggccgcgctgcaggtgggcggacacggcgagcggctgacgcagtgtcgcgaggtggtgctcaccacatccaaggccatcccggtgcaggtggatggcgagccctgcaagcttgcagcctcacgcatccgcatcgccctgcgcaaccaggccaccatggtgcagaaggccaagcggcggagcgccgcccccctgcacagcgaccagcagccggtgccaga

SEQ ID NO: 126669 - DNA, 2692 bp, Homo sapiens
  Payload ID: 4835
  Gene Symbol: DGKZ
  Gene Name: diacylglycerol kinase, zeta
  ENST ID: ENST00000528615
  CDS Start-End: 406-2529
gggcaggatgagcgcaccgggggctggccacagtgccgggggaagctgcaatgaatcctcagctctgggcccagtggaggcgctggggacggaagaaggggagcggccggggtcactgaggcagatgtggcgctaccgctcctgggacgtgccacagatcccatcagaggcaccccagacacaataaatttccgctgtaagccgtccttccgtgaatcaggctccaggaatgtccgcgagccaacctttgtacggcaccactgggtacacagacgacgccaggacggcaagtgtcggcactgtgggaagggattccagcagaagttcaccttccacagcaaggagattgtggccatcagctgctcgtggtgcaagcaggcataccacagcaaggtgtcctgcttcatgctgcagcagatcgaggagccgtgctcgctgggggtccacgcagccgtggtcatcccgcccacctggatcctccgcgcccggaggccccagaatactctgaaagcaagcaagaagaagaagagggcatccttcaagaggaagtccagcaagaaagggcctgaggagggccgctggagacccttcatcatcaggcccaccccctccccgctcatgaagcccctgctggtgtttgtgaaccccaagagtgggggcaaccagggtgcaaagatcatccagtctttcctctggtatctcaatccccgacaagtcttcgacctgagccagggagggcccaaggaggcgctggagatgtaccgcaaagtgcacaacctgcggatcctggcgtgcgggggcgacggcacggtgggctggatcctctccaccctggaccagctacgcctgaagccgccaccccctgttgccatcctgcccctgggtactggcaacgacttggcccgaaccctcaactggggtgggggctacacagatgagcctgtgtccaagatcctctcccacgtggaggaggggaacgtggtacagctggaccgctgggacctccacgctgagcccaaccccgaggcagggcctgaggaccgagatgaaggcgccaccgaccggttgcccctggatgtcttcaacaactacttcagcctgggctttgacgcccacgtcaccctggagttccacgagtctcgagaggccaacccagagaaattcaacagccgctttcggaataagatgttctacgccgggacagctttctctgacttcctgatgggcagctccaaggacctggccaagcacatccgagtggtgtgtgatggaatggacttgactcccaagatccaggacctgaaaccccagtgtgttgttttcctgaacatccccaggtactgtgcgggcaccatgccctggggccaccctggggagcaccacgactttgagccccagcggcatgacgacggctacctcgaggtcattggcttcaccatgacgtcgttggccgcgctgcaggtgggcggacacggcgagcggctgacgcagtgtcgcgaggtggtgctcaccacatccaaggccatcccggtgcaggtggatggcgagccctgcaagcttgcagcctcacgcatccgcatcgccctgcgcaaccaggccaccatggtgcagaaggccaagcggcggagcgccgcccccctgcacagcgaccagcagccggtgccagagcagttgcgcatccaggtgagtcgcgtcagcatgcacgactatgaggccctgcactacgacaaggagcagctcaaggaggcctctgtgccgctgggcactgtggtggtcccaggagacagtgacctagagctctgccgtgcccacattgagagactccagcaggagcccgatggtgctggagccaagtccccgacatgccagaaactgtcccccaagtggtgcttcctggacgccaccactgccagccgcttctacaggatcgaccgagcccaggagcacctcaactatgtgactgagatcgcacaggatgagatttatatcctggaccctgagctgctgggggcatcggcccggcctgacctcccaacccccacttcccctctccccacctcaccctgctcacccacgccccggtcactgcaaggggatgctgcaccccctcaaggtgaagagctgattgaggctgccaagaggaacgacttctgtaagctccaggagctgcaccgagctgggggcgacctcatgcaccgagacgagcagagtcgcacgctcctgcaccacgcagtcagcactggcagcaaggatgtggtccgctacctgctggaccacgcccccccagagatccttgatgcggtggaggaaaacggggagacctgtttgcaccaagcagcggccctgggccagcgcaccatctgccactacatcgtggaggccggggcctcgctcatgaagacagaccagcagggcgacactccccggcagcgggctgagaaggctcaggacaccgagctggccgcctacctggagaaccggcagcactaccagatgatccagcgggaggaccaggagacggctgtgtagcgggccgcccacgggcagcaggagggacaatgcggccaggggacgagcgccttccttgcccacctcactgccacattccagtgggacggccacggggggacctaggccccagggaaagagccccatgccgccccctaaggagccgcccagacctagggctgga

SEQ ID NO: 126670 - DNA, 542 bp, Homo sapiens
  Payload ID: 4835
  Gene Symbol: DGKZ
  Gene Name: diacylglycerol kinase, zeta
  ENST ID: ENST00000525242
  CDS Start-End: 493-542
acaagctcatgggaaacaagaactgaggcatcggaatgaacctgagcatggtggcggggggctccgtggcacatgcatcccaccaagagaggtcatgcaatgcccgtgcatccttctgggtcagagagacctgggctccaattccagccctgccccttcctagttgggtaagaggctttcacttctgaccctgtttcctcacacggaaaatgcgagcgatgataccttatcaagaatgtggctgggaagattcaagaagataccagatgtcaacttcctgactcagagcacgggaaagccatcaccaagtcgggcctccagcacctggccccccctccgcccacccctggggccccgtgcagcgagtcagagcggcagatccggagtacagtggactggagcgagtcagcgacatatggggagcacatctggttcgagaccaacgtgtccggggacttctgctacgttggggagcagtactgtgtagccaggatgctgcagaagtcagtgtctcgaagaaagtgcgcagcctgcaagattgt

SEQ ID NO: 126671 - DNA, 496 bp, Homo sapiens
  Payload ID: 4835
  Gene Symbol: DGKZ
  Gene Name: diacylglycerol kinase, zeta
  ENST ID: ENST00000533376
  CDS Start-End: 138-302
gcgcgcggcgcggggcgggcggagcgagcgcgcgccatggaggtggcgggcggcgcggagcgggcgtgctgagccccggccgccggcccggcatgggcgtctcccgcgggccctccgccggccggggctagggccggatggagccgcgggacggtagccccgaggcccggagcagcgactccgagtcggcttccgcctcgtccagcggctccgagcgcgacgccggtcccgagccggacaaggcgccgcggcgactcaacaagcggcgcttcccggggctgcggctcttcgggcacagataaatttccgctgtaagccgtccttccgtgaatcaggctccaggaatgtccgcgagccaacctttgtacggcaccactgggtacacagacgacgccaggacggcaagtgtcggcactgtgggaagggattccagcagaagttcaccttccacagcaaggagattgtggccatcagctgctcgtggtgcaagcaggca

SEQ ID NO: 126672 - DNA, 294 bp, Homo sapiens
  Payload ID: 4835
  Gene Symbol: DGKZ
  Gene Name: diacylglycerol kinase, zeta
  ENST ID: ENST00000524448
  CDS Start-End: 1-294
gagtcagcgacatatggggagcacatctggttcgagaccaacgtgtccggggacttctgctacgttggggagcagtactgtgtagccaggatgctgataaatttccgctgtaagccgtccttccgtgaatcaggctccaggaatgtccgcgagccaacctttgtacggcaccactgggtacacagacgacgccaggacggcaagtgtcggcactgtgggaagggattccagcagaagttcaccttccacagcaaggagattgtggccatcagctgctcgtggtgcaagcaggca

SEQ ID NO: 126673 - DNA, 3118 bp, Homo sapiens
  Payload ID: 4835
  Gene Symbol: DGKZ
  Gene Name: diacylglycerol kinase, zeta
  Uniprot ID: Q13574
  ENST ID: ENST00000532868
  CDS Start-End: 144-2945
agctggccccagccagcggaaggcgcctatgagccctgagcctgtggtcctcagcttgggcggccagcggcctctagcaggcccccccctcgaccccacccccgtcaggaagtgccgaaagaggaagagagtcgccgggcaggatgagcgcaccgggggctggccacagtgccgggggaagctgcaatgaatcctcagctctgggcccagtggaggcgctggggacggaagaaggggagcggccggggtcactgaggcagatgtggcgctaccgctcctgggacgtgccacagatcccatcagaggcaccccagacacagaaagccatcaccaagtcgggcctccagcacctggccccccctccgcccacccctggggccccgtgcagcgagtcagagcggcagatccggagtacagtggactggagctcagcgacatatggggagcacatctggttcgagaccaacgtgtccggggacttctgctacgttggggagcagtactgtgtagccaggatgctgcagaagtcagtgtctcgaagaaagtgcgcagcctgcaagattgtggtgcacacgccctgcatcgagcagctggagaagataaatttccgctgtaagccgtccttccgtgaatcaggctccaggaatgtccgcgagccaacctttgtacggcaccactgggtacacagacgacgccaggacggcaagtgtcggcactgtgggaagggattccagcagaagttcaccttccacagcaaggagattgtggccatcagctgctcgtggtgcaagcaggcataccacagcaaggtgtcctgcttcatgctgcagcagatcgaggagccgtgctcgctgggggtccacgcagccgtggtcatcccgcccacctggatcctccgcgcccggaggccccagaatactctgaaagcaagcaagaagaagaagagggcatccttcaagaggaagtccagcaagaaagggcctgaggagggccgctggagacccttcatcatcaggcccaccccctccccgctcatgaagcccctgctggtgtttgtgaaccccaagagtgggggcaaccagggtgcaaagatcatccagtctttcctctggtatctcaatccccgacaagtcttcgacctgagccagggagggcccaaggaggcgctggagatgtaccgcaaagtgcacaacctgcggatcctggcgtgcgggggcgacggcacggtgggctggatcctctccaccctggaccagctacgcctgaagccgccaccccctgttgccatcctgcccctgggtactggcaacgacttggcccgaaccctcaactggggtgggggctacacagatgagcctgtgtccaagatcctctcccacgtggaggaggggaacgtggtacagctggaccgctgggacctccacgctgagcccaaccccgaggcagggcctgaggaccgagatgaaggcgccaccgaccggttgcccctggatgtcttcaacaactacttcagcctgggctttgacgcccacgtcaccctggagttccacgagtctcgagaggccaacccagagaaattcaacagccgctttcggaataagatgttctacgccgggacagctttctctgacttcctgatgggcagctccaaggacctggccaagcacatccgagtggtgtgtgatggaatggacttgactcccaagatccaggacctgaaaccccagtgtgttgttttcctgaacatccccaggtactgtgcgggcaccatgccctggggccaccctggggagcaccacgactttgagccccagcggcatgacgacggctacctcgaggtcattggcttcaccatgacgtcgttggccgcgctgcaggtgggcggacacggcgagcggctgacgcagtgtcgcgaggtggtgctcaccacatccaaggccatcccggtgcaggtggatggcgagccctgcaagcttgcagcctcacgcatccgcatcgccctgcgcaaccaggccaccatggtgcagaaggccaagcggcggagcgccgcccccctgcacagcgaccagcagccggtgccagagcagttgcgcatccaggtgagtcgcgtcagcatgcacgactatgaggccctgcactacgacaaggagcagctcaaggaggcctctgtgccgctgggcactgtggtggtcccaggagacagtgacctagagctctgccgtgcccacattgagagactccagcaggagcccgatggtgctggagccaagtccccgacatgccagaaactgtcccccaagtggtgcttcctggacgccaccactgccagccgcttctacaggatcgaccgagcccaggagcacctcaactatgtgactgagatcgcacaggatgagatttatatcctggaccctgagctgctgggggcatcggcccggcctgacctcccaacccccacttcccctctccccacctcaccctgctcacccacgccccggtcactgcaaggggatgctgcaccccctcaaggtgaagagctgattgaggctgccaagaggaacgacttctgtaagctccaggagctgcaccgagctgggggcgacctcatgcaccgagacgagcagagtcgcacgctcctgcaccacgcagtcagcactggcagcaaggatgtggtccgctacctgctggaccacgcccccccagagatccttgatgcggtggaggaaaacggggagacctgtttgcaccaagcagcggccctgggccagcgcaccatctgccactacatcgtggaggccggggcctcgctcatgaagacagaccagcagggcgacactccccggcagcgggctgagaaggctcaggacaccgagctggccgcctacctggagaaccggcagcactaccagatgatccagcgggaggaccaggagacggctgtgtagcgggccgcccacgggcagcaggagggacaatgcggccaggggacgagcgccttccttgcccacctcactgccacattccagtgggacggccacggggggacctaggccccagggaaagagccccatgccgccccctaaggagccgcccagacctagggctggactcaggagct

SEQ ID NO: 126674 - DNA, 3337 bp, Homo sapiens
  Payload ID: 4835
  Gene Symbol: DGKZ
  Gene Name: diacylglycerol kinase, zeta
  Uniprot ID: Q13574
  ENST ID: ENST00000527911
  CDS Start-End: 198-3002
ggcacttcctggagcggcggcggcagcggcttcccgggcacctgggcgtggggagcgggggcgcgcggcgcggggcgggcggagcgagcgcgcgccatggaggtggcgggcggcgcggagcgggcgtgctgagccccggccgccggcccggcatgggcgtctcccgcgggccctccgccggccggggctagggccggatggagccgcgggacggtagccccgaggcccggagcagcgactccgagtcggcttccgcctcgtccagcggctccgagcgcgacgccggtcccgagccggacaaggcgccgcggcgactcaacaagcggcgcttcccggggctgcggctcttcgggcacaggaaagccatcaccaagtcgggcctccagcacctggccccccctccgcccacccctggggccccgtgcagcgagtcagagcggcagatccggagtacagtggactggagcgagtcagcgacatatggggagcacatctggttcgagaccaacgtgtccggggacttctgctacgttggggagcagtactgtgtagccaggatgctgcagaagtcagtgtctcgaagaaagtgcgcagcctgcaagattgtggtgcacacgccctgcatcgagcagctggagaagataaatttccgctgtaagccgtccttccgtgaatcaggctccaggaatgtccgcgagccaacctttgtacggcaccactgggtacacagacgacgccaggacggcaagtgtcggcactgtgggaagggattccagcagaagttcaccttccacagcaaggagattgtggccatcagctgctcgtggtgcaagcaggcataccacagcaaggtgtcctgcttcatgctgcagcagatcgaggagccgtgctcgctgggggtccacgcagccgtggtcatcccgcccacctggatcctccgcgcccggaggccccagaatactctgaaagcaagcaagaagaagaagagggcatccttcaagaggaagtccagcaagaaagggcctgaggagggccgctggagacccttcatcatcaggcccaccccctccccgctcatgaagcccctgctggtgtttgtgaaccccaagagtgggggcaaccagggtgcaaagatcatccagtctttcctctggtatctcaatccccgacaagtcttcgacctgagccagggagggcccaaggaggcgctggagatgtaccgcaaagtgcacaacctgcggatcctggcgtgcgggggcgacggcacggtgggctggatcctctccaccctggaccagctacgcctgaagccgccaccccctgttgccatcctgcccctgggtactggcaacgacttggcccgaaccctcaactggggtgggggctacacagatgagcctgtgtccaagatcctctcccacgtggaggaggggaacgtggtacagctggaccgctgggacctccacgctgagcccaaccccgaggcagggcctgaggaccgagatgaaggcgccaccgaccggttgcccctggatgtcttcaacaactacttcagcctgggctttgacgcccacgtcaccctggagttccacgagtctcgagaggccaacccagagaaattcaacagccgctttcggaataagatgttctacgccgggacagctttctctgacttcctgatgggcagctccaaggacctggccaagcacatccgagtggtgtgtgatggaatggacttgactcccaagatccaggacctgaaaccccagtgtgttgttttcctgaacatccccaggtactgtgcgggcaccatgccctggggccaccctggggagcaccacgactttgagccccagcggcatgacgacggctacctcgaggtcattggcttcaccatgacgtcgttggccgcgctgcaggtgggcggacacggcgagcggctgacgcagtgtcgcgaggtggtgctcaccacatccaaggccatcccggtgcaggtggatggcgagccctgcaagcttgcagcctcacgcatccgcatcgccctgcgcaaccaggccaccatggtgcagaaggccaagcggcggagcgccgcccccctgcacagcgaccagcagccggtgccagagcagttgcgcatccaggtgagtcgcgtcagcatgcacgactatgaggccctgcactacgacaaggagcagctcaaggaggcctctgtgccgctgggcactgtggtggtcccaggagacagtgacctagagctctgccgtgcccacattgagagactccagcaggagcccgatggtgctggagccaagtccccgacatgccagaaactgtcccccaagtggtgcttcctggacgccaccactgccagccgcttctacaggatcgaccgagcccaggagcacctcaactatgtgactgagatcgcacaggatgagatttatatcctggaccctgagctgctgggggcatcggcccggcctgacctcccaacccccacttcccctctccccacctcaccctgctcacccacgccccggtcactgcaaggggatgctgcaccccctcaaggtgaagagctgattgaggctgccaagaggaacgacttctgtaagctccaggagctgcaccgagctgggggcgacctcatgcaccgagacgagcagagtcgcacgctcctgcaccacgcagtcagcactggcagcaaggatgtggtccgctacctgctggaccacgcccccccagagatccttgatgcggtggaggaaaacccctgctcccccagcggggagacctgtttgcaccaagcagcggccctgggccagcgcaccatctgccactacatcgtggaggccggggcctcgctcatgaagacagaccagcagggcgacactccccggcagcgggctgagaaggctcaggacaccgagctggccgcctacctggagaaccggcagcactaccagatgatccagcgggaggaccaggagacggctgtgtagcgggccgcccacgggcagcaggagggacaatgcggccaggggacgagcgccttccttgcccacctcactgccacattccagtgggacggccacggggggacctaggccccagggaaagagccccatgccgccccctaaggagccgcccagacctagggctggactcaggagctgggggggcctcacctgttcccctgaggaccccgccggacccggaggctcacagggaacaagacacggctgggttggatatgcctttgccggggttctggggcagggcgctccctggccgcagcagatgccctcccaggagtggaggggctggagagggggag

SEQ ID NO: 126675 - DNA, 3512 bp, Homo sapiens
  Payload ID: 4835
  Gene Symbol: DGKZ
  Gene Name: diacylglycerol kinase, zeta
  ENST ID: ENST00000524984
  CDS Start-End: 91-498
gccgggggaagctgcaatgaatcctcagctctgggcccagtggaggcgctggggacggaagaaggggagcggccggggtcactgaggcagatgtggcgctaccgctcctgggacgtgccacagatcccatcagaggcaccccagacacagaaagccatcaccaagtcgggcctccagcacctggccccccctccgcccacccctggggccccgtgcagcgagtcagagcggcagatccggagtacagtggactggagcgagtcagcgacatatggggagcacatctggttcgagaccaacgtgtccggggacttctgctacgttggggagcagtactgtgtagccaggatgctgaagtcagtgtctcgaagaaagtgcgcagcctgcaagattgtggtgcacacgccctgcatcgagcagctggagaaggactctcgtgacgatttgggggtatccccaccttgtgaggatgactctgggttgtcctggagggagtgaccacatacctgaccccgaagggaggttctgacattttggtggtcactgccatgtttcacagataaatttccgctgtaagccgtccttccgtgaatcaggctccaggaatgtccgcgagccaacctttgtacggcaccactgggtacacagacgacgccaggacggcaagtgtcggcactgtgggaagggattccagcagaagttcaccttccacagcaaggagattgtggccatcagctgctcgtggtgcaagcaggcataccacagcaaggtgtcctgcttcatgctgcagcagatcgaggagccgtgctcgctgggggtccacgcagccgtggtcatcccgcccacctggatcctccgcgcccggaggccccagaatactctgaaagcaagcaagaagaagaagagggcatccttcaagaggaagtccagcaagaaagggcctgaggagggccgctggagacccttcatcatcaggcccaccccctccccgctcatgaagcccctgctggtgtttgtgaaccccaagagtgggggcaaccagggtgcaaagatcatccagtctttcctctggtatctcaatccccgacaagtcttcgacctgagccagggagggcccaaggaggcgctggagatgtaccgcaaagtgcacaacctgcggatcctggcgtgcgggggcgacggcacggtgggctggatcctctccaccctggaccagctacgcctgaagccgccaccccctgttgccatcctgcccctgggtactggcaacgacttggcccgaaccctcaactggggtgggggctacacagatgagcctgtgtccaagatcctctcccacgtggaggaggggaacgtggtacagctggaccgctgggacctccacgctgagcccaaccccgaggcagggcctgaggaccgagatgaaggcgccaccgaccggttgcccctggatgtcttcaacaactacttcagcctgggctttgacgcccacgtcaccctggagttccacgagtctcgagaggccaacccagagaaattcaacagccgctttcggaataagatgttctacgccgggacagctttctctgacttcctgatgggcagctccaaggacctggccaagcacatccgagtggtgtgtgatggaatggacttgactcccaagatccaggacctgaaaccccagtgtgttgttttcctgaacatccccaggtactgtgcgggcaccatgccctggggccaccctggggagcaccacgactttgagccccagcggcatgacgacggctacctcgaggtcattggcttcaccatgacgtcgttggccgcgctgcaggtgggcggacacggcgagcggctgacgcagtgtcgcgaggtggtgctcaccacatccaaggccatcccggtgcaggtggatggcgagccctgcaagcttgcagcctcacgcatccgcatcgccctgcgcaaccaggccaccatggtgcagaaggccaagcggcggagcgccgcccccctgcacagcgaccagcagccggtgccagagcagttgcgcatccaggtgagtcgcgtcagcatgcacgactatgaggccctgcactacgacaaggagcagctcaaggaggcctctgtgccgctgggcactgtggtggtcccaggagacagtgacctagagctctgccgtgcccacattgagagactccagcaggagcccgatggtgctggagccaagtccccgacatgccagaaactgtcccccaagtggtgcttcctggacgccaccactgccagccgcttctacaggatcgaccgagcccaggagcacctcaactatgtgactgagatcgcacaggatgagatttatatcctggaccctgagctgctgggggcatcggcccggcctgacctcccaacccccacttcccctctccccacctcaccctgctcacccacgccccggtcactgcaaggggatgctgcaccccctcaaggtgaagagctgattgaggctgccaagaggaacgacttctgtaagctccaggagctgcaccgagctgggggcgacctcatgcaccgagacgagcagagtcgcacgctcctgcaccacgcagtcagcactggcagcaaggatgtggtccgctacctgctggaccacgcccccccagagatccttgatgcggtggaggaaaacggggagacctgtttgcaccaagcagcggccctgggccagcgcaccatctgccactacatcgtggaggccggggcctcgctcatgaagacagaccagcagggcgacactccccggcagcgggctgagaaggctcaggacaccgagctggccgcctacctggagaaccggcagcactaccagatgatccagcgggaggaccaggagacggctgtgtagcgggccgcccacgggcagcaggagggacaatgcggccaggggacgagcgccttccttgcccacctcactgccacattccagtgggacggccacggggggacctaggccccagggaaagagccccatgccgccccctaaggagccgcccagacctagggctggactcaggagctgggggggcctcacctgttcccctgaggaccccgccggacccggaggctcacagggaacaagacacggctgggttggatatgcctttgccggggttctggggcagggcgctccctggccgcagcagatgccctcccaggagtggaggggctggagagggggaggccttcgggaagaggcttcctgggccccctggtcttcggccgggtccccagcccccgctcctgccccaccccacctcctccgggcttcctcccggaaactcagcgcctgctgcacttgcctgccctgccttgcttggcacccgctccggcgaccctccccgctcccctgtcatttcatcgcggactgtgcggcctgggggtggggggcgggactctcacggtgacatgtttacagctgggtgtgactcagtaaagtggatttttttttcttt

SEQ ID NO: 126676 - DNA, 5757 bp, Homo sapiens
  Payload ID: 4836
  Gene Symbol: DAGLA
  Gene Name: diacylglycerol lipase, alpha
  Uniprot ID: Q9Y4D2
  ENST ID: ENST00000257215
  CDS Start-End: 117-3245
atcggggccttggggagcccaggatggaggtggcggtcgcggcggcgggccgagccctgcggcgggcgggaggaggtgagcaccaggcccactgagcctctgcagagccaccagccatgcccgggatcgtggtgttccggcggcgctggtctgtgggcagtgatgacctcgtcctaccggccatcttcctctttctcctgcataccacctggtttgtgatcctgtccgtggtgctcttcggcctggtctataacccgcacgaggcctgctccctgaacctggtggaccacggccgcggctacctgggcatcctgctgagctgcatgatcgctgagatggccatcatctggctgagcatgcgcgggggcatcctctacacggagccccgtgactccatgcagtacgtgctctacgtgcgcctggccatcctggtgatcgagttcatctacgccatcgtgggcatcgtctggctcactcagtactacacctcctgcaacgacctcactgccaagaatgtcaccctcggaatggttgtctgcaactgggtagtcatcctcagtgtgtgcatcactgtcctctgcgtcttcgaccccacgggccgcacctttgtcaagctgagagccaccaagaggaggcagcgtaacctgcggacctacaacctgcggcaccgcttagaggagggtcaagccaccagctggtcgcgccggctcaaagtgttcctctgctgcacgcggacgaaggactcccagtcagatgcctactcagaaatcgcctacctctttgcggagttcttccgggaccttgacattgtgccatccgacatcattgctggcctggtgctgctccggcagcggcagcgggccaagcgcaacgccgtgctggacgaggcaaacaatgacatcttggccttcctgtctgggatgccggtgaccagaaacaccaagtacctcgacctcaagaattcacaagagatgctccgctacaaagaggtctgctactacatgctctttgccctggctgcctacgggtggcccatgtacctgatgcggaagcccgcctgcggcctctgccaactggctcggtcctgctcgtgttgcctgtgtcctgcgaggccgcggttcgcccctggagtcaccatcgaggaagacaactgctgtggctgtaatgccattgccatccggcgccacttcctggacgagaacatgactgcggtggacatcgtctatacctcctgccatgatgcggtctatgaaacgcccttctacgtggcggtggaccatgacaagaagaaagtggtgatcagtatccgggggaccctgtcccccaaggatgccctgactgacctgacgggtgatgctgagcgcctccccgtggaggggcaccacggcacctggctgggccacaagggtatggtcctctcagctgagtacatcaagaagaaactggagcaggagatggtcctgtcccaggcctttgggcgagacctgggccgcggaaccaaacactacggcctgattgtggtgggccactccctgggcgcgggcactgctgccatcctctccttccttctgcgcccacagtatccgaccctcaagtgctttgcctactccccgccagggggcctgctgagtgaggatgcgatggagtattccaaggagttcgtgactgctgtggttctgggcaaagacctcgtccccaggattggcctctctcagctggaaggcttccgcagacagctcctggatgtcctgcagcgaagcaccaagcccaaatggcggatcatcgtgggggccaccaaatgcatccccaagtcggagctgcctgaggaggtagaggtgaccaccctggccagcacgcggctctggacccaccccagcgacctaactatagccctctcagccagcactccactctacccgcccggccgcatcatccacgtggtccacaaccaccctgcagagcagtgctgctgctgtgagcaggaggagcccacatactttgccatctggggcgacaacaaggccttcaatgaggtgatcatctcgccagccatgctgcatgagcacctgccctatgtggtcatggaggggctcaacaaggtgctggagaactacaacaaggggaagaccgctctgctctctgcagccaaggtcatggtgagccctaccgaggtggacctgactcctgagctcatcttccagcagcagccactccccacggggccgcccatgcccactggccttgccctggagctgccgactgcagaccaccgcaacagcagcgtcaggagcaagtcccagtctgagatgagcctggagggcttctcggaggggcggctgctgtcgccagtggttgcggcggcggcccgccaggacccggtggagctgctgctgctgtctacccaggagcggctggcggcggagctgcaggcccggcgggcaccactggccaccatggagagcctctcggacactgagtccctgtacagcttcgactcgcgccgctcctcaggcttccgcagcatccggggctcccccagcctccacgctgtgctggagcgtgatgaaggccacctcttctacattgaccctgccatccccgaggaaaacccatccctgagctcgcgcactgagctgctggcggccgacagcctgtccaagcactcacaggacacgcagcccctggaggcggccctgggcagtggcggcgtcactcctgagcggccccccagtgctgcggccaatgacgaggaggaagaggttggcggtgggggtggcgggccggcctcccgcggggagctggcgctgcacaatgggcgcctgggggactcgcccagtcctcaggtgctggaattcgccgagttcatcgacagcctcttcaacctggacagcaagagcagctccttccaagacctctactgcatggtggtgcccgagagccccaccagtgactacgctgagggccccaagtcccccagccagcaagagatcctgctccgtgcccagttcgagcccaacctggtgcccaagcccccacggctctttgccggctcagccgacccctcctcgggcatctcactctcgccctccttcccgctcagctcctcgggtgagctcatggacctgacgcccacgggcctcagtagccaggaatgcctggcggctgacaagatccggacttctacccccactggccacggagccagccccgccaagcaagatgagctggtcatctcagcacgctagcaccccagttgcgtggccagccgggcccaggcaggagcaggtggccctgtgggcacctggtgcctgccccctgccgggcagctttaaggacagacccccaggggcagtttagcctcaggcacaggcatcgctgctgagctgggggtccgcatccctacctcagcttaggacccccagagccaaggtggctgggatctggccccacagatggggaaagatggggaagggtgtggagtggggaggagcctgggcagcctgctgggtgggccacactcagcctgactgccctccatgggggcattctggcaccccctgctccaggacaggccatgggcaagctgcctcccatcactgcctgctggctgctctcccaggggccaggtggagagcagtgccccccgacacatgtattctcatctgtggtccaggccggcatcgtcctggccaccccccagatctggtgcctgctggccggccccctggggtgcccctgccgaggtggcctgcagtgctgtacatgtttacagaagctgctgggcttggctcaggatgtgttctgggcttgcaagccccccgcccaatcatgtgttcagtagccgtcctctgagcagggcccaaggcagccaggggcctggaggggccagaggagggtggggtcagggccgccccttctctgccttgtgcctctcatgctgcctcctctgcccatgggtcctgggcacccaggcctgccctgcctgctggctacttcctggcttaccttctacccccaaggatcctcaccacccaaagggtggtgggcactgctgtgaccaccccagctgcagagtcagtgccctgggtggaaggaaggcactgagagcccccttcctctgagggccccacctcaccccttggtgtcacccccaccacgcctaggcagctctgggccctgggatctggaaccaacacacccctgttcccctcagctttccctcctcgctggcctgggcaccctcctgggagcaggccttcctccctcccacccccaatgtcctgttggtaggaggtggggccaagagtggggtatggtgggccttggctggagacctctgtccactgcccagggaggggcctggggctgggagcagtcccggtttagcctgaggtccccatagggcttcctcccctgctgggtttgggaagcagttagggagatagcgacccggagtttccccagaagcggggtgggagggtgtgcatgctagtgttggcgcgtatgcatgtgcatgagtgtgcaccgttcctaaggaaggggcctctggggctgcccaccctacctgccctgcctgcctgctgcccctcccagcctgccaagaaaacggtaggggagcatgatggggcctttgaggcagggtcgcagggacaagctcagctttaggcaccatctgttcccatcgcgcctgctgctgtgacccgttttggaaaactggtgtgtaccgaggcgctgactgcacggctgaccgcctgctcgtgccttcattctgcagcggcatggtccctcccattctggctccacctgcagcctccctgggtggcctaggctcccccgaccaagagacctccctctcatgatcactggtacctgggggcctgaattctggcccccggctccccacacagctgggactggcctggatggctgtcctgggagcccctgcccaccctgacagagggagctgggcctcccctcatcctctgtaactcccgccttcaccagactcaaggacaccctggccctgctgaggcatacagagcttcagcccagcacagaagcaagacaaaatcagtggctcttagagtttagaaaacaagacagactctcagatgaaagatctgacaagcaccgtggccagtcacagggagagacttgatgtctggccttttaattcctcctctgccagggtgggtcctgggacctctaatgtgggcatgtcgtccaccccaggacgagccatcagggacagaccccccacccccaaggctgcagccacaccatgtttcaggcttggggctggggcaggcttgggctcaatcctgggcacccaggggcagcccacccctaacctggctcctacccacctcgcccttgaaggatgggcctgctgcacgtctccctcctccaccccataccacactggggggtctgagccacccccctcagccccgttcggctcagaccgacccccactccatccccagacctgcagcacaagtgcgcgggcctgtcctcccaggggcctgggcgactccatatgcaatcagtagcgagcagccgggccccacagaccctcatgcactctcttacgtgccattctccccagactttttttgtacttaatgtatgaaagatccaaactaatattgctgtaaaaaggagagacaaattaatatagcttattctataaatatatctgtatataaaggtttctgtatattgtatagagctgtgtataaactggatgtagaagca

SEQ ID NO: 126677 - DNA, 5699 bp, Homo sapiens
  Payload ID: 4836
  Gene Symbol: DAGLA
  Gene Name: diacylglycerol lipase, alpha
  ENST ID: ENST00000540717
  CDS Start-End: 83-586
ggtcgcggcggcgggccgagccctgcggcgggcgggaggaggtgagcaccaggcccactgagcctctgcagagccaccagccatgcccgggatcgtggtgttccggcggcgctggtctgtgggcagtgatgacctcgtcctaccggccatcttcctctttctcctgcataccacctggtttgtgatcctgtccgtggtgctcttcggcctggtctataacccgcacgaggcctgctccctgaacctggtggaccacggccgcggctacctgggcatcctgctgagctgcatgatcgctgagatggccatcatctggctgagcatgcgcgggggcatcctctacacggagccccgtgactccatgcaccatcctggtgatcgagttcatctacgccatcgtgggcatcgtctggctcactcagtactacacctcctgcaacgacctcactgccaagaatgtcaccctcggaatggttgtctgcaactgggtagtcatcctcagtgtgtgcatcactgtcctctgcgtcttcgaccccacgggccgcacctttgtcaagctgagagccaccaagaggaggcagcgtaacctgcggacctacaacctgcggcaccgcttagaggagggtcaagccaccagctggtcgcgccggctcaaagtgttcctctgctgcacgcggacgaaggactcccagtcagatgcctactcagaaatcgcctacctctttgcggagttcttccgggaccttgacattgtgccatccgacatcattgctggcctggtgctgctccggcagcggcagcgggccaagcgcaacgccgtgctggacgaggcaaacaatgacatcttggccttcctgtctgggatgccggtgaccagaaacaccaagtacctcgacctcaagaattcacaagagatgctccgctacaaagaggtctgctactacatgctctttgccctggctgcctacgggtggcccatgtacctgatgcggaagcccgcctgcggcctctgccaactggctcggtcctgctcgtgttgcctgtgtcctgcgaggccgcggttcgcccctggagtcaccatcgaggaagacaactgctgtggctgtaatgccattgccatccggcgccacttcctggacgagaacatgactgcggtggacatcgtctatacctcctgccatgatgcggtctatgaaacgcccttctacgtggcggtggaccatgacaagaagaaagtggtgatcagtatccgggggaccctgtcccccaaggatgccctgactgacctgacgggtgatgctgagcgcctccccgtggaggggcaccacggcacctggctgggccacaagggtatggtcctctcagctgagtacatcaagaagaaactggagcaggagatggtcctgtcccaggcctttgggcgagacctgggccgcggaaccaaacactacggcctgattgtggtgggccactccctgggcgcgggcactgctgccatcctctccttccttctgcgcccacagtatccgaccctcaagtgctttgcctactccccgccagggggcctgctgagtgaggatgcgatggagtattccaaggagttcgtgactgctgtggttctgggcaaagacctcgtccccaggattggcctctctcagctggaaggcttccgcagacagctcctggatgtcctgcagcgaagcaccaagcccaaatggcggatcatcgtgggggccaccaaatgcatccccaagtcggagctgcctgaggaggtagaggtgaccaccctggccagcacgcggctctggacccaccccagcgacctaactatagccctctcagccagcactccactctacccgcccggccgcatcatccacgtggtccacaaccaccctgcagagcagtgctgctgctgtgagcaggaggagcccacatactttgccatctggggcgacaacaaggccttcaatgaggtgatcatctcgccagccatgctgcatgagcacctgccctatgtggtcatggaggggctcaacaaggtgctggagaactacaacaaggggaagaccgctctgctctctgcagccaaggtcatggtgagccctaccgaggtggacctgactcctgagctcatcttccagcagcagccactccccacggggccgcccatgcccactggccttgccctggagctgccgactgcagaccaccgcaacagcagcgtcaggagcaagtcccagtctgagatgagcctggagggcttctcggaggggcggctgctgtcgccagtggttgcggcggcggcccgccaggacccggtggagctgctgctgctgtctacccaggagcggctggcggcggagctgcaggcccggcgggcaccactggccaccatggagagcctctcggacactgagtccctgtacagcttcgactcgcgccgctcctcaggcttccgcagcatccggggctcccccagcctccacgctgtgctggagcgtgatgaaggccacctcttctacattgaccctgccatccccgaggaaaacccatccctgagctcgcgcactgagctgctggcggccgacagcctgtccaagcactcacaggacacgcagcccctggaggcggccctgggcagtggcggcgtcactcctgagcggccccccagtgctgcggccaatgacgaggaggaagaggttggcggtgggggtggcgggccggcctcccgcggggagctggcgctgcacaatgggcgcctgggggactcgcccagtcctcaggtgctggaattcgccgagttcatcgacagcctcttcaacctggacagcaagagcagctccttccaagacctctactgcatggtggtgcccgagagccccaccagtgactacgctgagggccccaagtcccccagccagcaagagatcctgctccgtgcccagttcgagcccaacctggtgcccaagcccccacggctctttgccggctcagccgacccctcctcgggcatctcactctcgccctccttcccgctcagctcctcgggtgagctcatggacctgacgcccacgggcctcagtagccaggaatgcctggcggctgacaagatccggacttctacccccactggccacggagccagccccgccaagcaagatgagctggtcatctcagcacgctagcaccccagttgcgtggccagccgggcccaggcaggagcaggtggccctgtgggcacctggtgcctgccccctgccgggcagctttaaggacagacccccaggggcagtttagcctcaggcacaggcatcgctgctgagctgggggtccgcatccctacctcagcttaggacccccagagccaaggtggctgggatctggccccacagatggggaaagatggggaagggtgtggagtggggaggagcctgggcagcctgctgggtgggccacactcagcctgactgccctccatgggggcattctggcaccccctgctccaggacaggccatgggcaagctgcctcccatcactgcctgctggctgctctcccaggggccaggtggagagcagtgccccccgacacatgtattctcatctgtggtccaggccggcatcgtcctggccaccccccagatctggtgcctgctggccggccccctggggtgcccctgccgaggtggcctgcagtgctgtacatgtttacagaagctgctgggcttggctcaggatgtgttctgggcttgcaagccccccgcccaatcatgtgttcagtagccgtcctctgagcagggcccaaggcagccaggggcctggaggggccagaggagggtggggtcagggccgccccttctctgccttgtgcctctcatgctgcctcctctgcccatgggtcctgggcacccaggcctgccctgcctgctggctacttcctggcttaccttctacccccaaggatcctcaccacccaaagggtggtgggcactgctgtgaccaccccagctgcagagtcagtgccctgggtggaaggaaggcactgagagcccccttcctctgagggccccacctcaccccttggtgtcacccccaccacgcctaggcagctctgggccctgggatctggaaccaacacacccctgttcccctcagctttccctcctcgctggcctgggcaccctcctgggagcaggccttcctccctcccacccccaatgtcctgttggtaggaggtggggccaagagtggggtatggtgggccttggctggagacctctgtccactgcccagggaggggcctggggctgggagcagtcccggtttagcctgaggtccccatagggcttcctcccctgctgggtttgggaagcagttagggagatagcgacccggagtttccccagaagcggggtgggagggtgtgcatgctagtgttggcgcgtatgcatgtgcatgagtgtgcaccgttcctaaggaaggggcctctggggctgcccaccctacctgccctgcctgcctgctgcccctcccagcctgccaagaaaacggtaggggagcatgatggggcctttgaggcagggtcgcagggacaagctcagctttaggcaccatctgttcccatcgcgcctgctgctgtgacccgttttggaaaactggtgtgtaccgaggcgctgactgcacggctgaccgcctgctcgtgccttcattctgcagcggcatggtccctcccattctggctccacctgcagcctccctgggtggcctaggctcccccgaccaagagacctccctctcatgatcactggtacctgggggcctgaattctggcccccggctccccacacagctgggactggcctggatggctgtcctgggagcccctgcccaccctgacagagggagctgggcctcccctcatcctctgtaactcccgccttcaccagactcaaggacaccctggccctgctgaggcatacagagcttcagcccagcacagaagcaagacaaaatcagtggctcttagagtttagaaaacaagacagactctcagatgaaagatctgacaagcaccgtggccagtcacagggagagacttgatgtctggccttttaattcctcctctgccagggtgggtcctgggacctctaatgtgggcatgtcgtccaccccaggacgagccatcagggacagaccccccacccccaaggctgcagccacaccatgtttcaggcttggggctggggcaggcttgggctcaatcctgggcacccaggggcagcccacccctaacctggctcctacccacctcgcccttgaaggatgggcctgctgcacgtctccctcctccaccccataccacactggggggtctgagccacccccctcagccccgttcggctcagaccgacccccactccatccccagacctgcagcacaagtgcgcgggcctgtcctcccaggggcctgggcgactccatatgcaatcagtagcgagcagccgggccccacagaccctcatgcactctcttacgtgccattctccccagactttttttgtacttaatgtatgaaagatccaaactaatattgctgtaaaaaggagagacaaattaatatagcttattctataaatatatctgtatataaaggtttctgtatattgtatagagctgtgtataaactggatgtagaagc

SEQ ID NO: 126678 - DNA, 2897 bp, Homo sapiens
  Payload ID: 4837
  Gene Symbol: DAGLB
  Gene Name: diacylglycerol lipase, beta
  Uniprot ID: Q8NCG7
  ENST ID: ENST00000297056
  CDS Start-End: 171-2189
agtgcgcttgcgccgatctcggcctcagcgtgagcatgcgcaggtccccgccctcgctgcgtttgcgcttgagcgccgataatttggtggcggcgtccggagggtgctggtttgttctcggtgaacggcgcgcggggtctctcctgagtgcgagctacgggaccttcgccatgccggggatggtactcttcggccggcgctgggccatcgccagcgacgacttggtcttcccagggttcttcgagctggtcgtgcgagtgctgtggtggattggcattctgacgttgtatctcatgcacagaggaaagctggactgtgctggtggagccttgctcagcagttacttgatcgtcctcatgattctcctggcagttgtcatatgtactgtgtcagccatcatgtgtgtcagcatgagaggaacgatttgtaaccctggaccgcggaagtctatgtctaagctgctttacatccgcctggcgctgttttttccagagatggtctgggcctctctgggggctgcctgggtggcagatggtgttcagtgcgacaggacagttgtaaacggcatcatcgcaaccgtcgtggtcagttggatcatcatcgctgccacagtggtttccattatcattgtctttgaccctcttggggggaaaatggctccatattcctctgccggccccagccacctggatagtcatgattcaagccagttacttaatggcctcaagacagcagctacaagcgtgtgggaaaccagaatcaagctcttgtgctgttgcattgggaaagacgaccatactcgggttgctttttcgagtacggcagagcttttctcaacctacttttcagacacagatctggtgcccagcgacattgcggcgggcctcgccctgcttcatcagcaacaggacaatatcaggaacaaccaagagcctgcccaggtggtctgccatgccccagggagctcccaggaagctgatctggatgcagaattagaaaactgccatcattacatgcagtttgcagcagcggcctatgggtggcccctctacatctacagaaaccccctcacggggctgtgcaggattggtggtgactgctgcagaagcagaaccacagactatgacttggtcggaggcgatcagctcaactgtcacttcggctccatcctgcacaccacagggctgcagtacagggacttcatccacgtcagcttccatgacaaggtttacgagctgccgtttttagtggctctggatcacaggaaagagtctgttgtggtcgctgtgagggggaccatgtctctgcaggatgtccttacggacctgtcagcggagagtgaggtgctggacgtggagtgtgaggtgcaggaccgcctggcacacaagggtatttctcaagctgccagatacgtttaccaacgactcatcaacgacgggattttgagccaagccttcagcattgctcctgagtaccggctggtcatagtgggccacagcctcgggggcggggcggccgccctgctggccaccatgctcagagccgcctacccgcaggtcaggtgctacgccttctccccaccccgggggctgtggagcaaagctctgcaggaatattctcagagcttcatcgtgtcactcgtcctggggaaggatgtgattcccaggctcagtgtgaccaacttggaagatctgaagagaagaatcttgcgagtggtcgcgcactgcaataaacccaagtacaagatcttgctgcacggtttgtggtacgaactgtttggaggaaaccccaacaacttgcccacggagctggacgggggcgaccaggaagtcctgacacagcctcttctgggggagcagagcctactgacgcgctggtccccggcctacagcttctccagcgactccccactggactcttctcccaagtacccccctctctaccctcccggcaggatcatccacctgcaggaggagggcgcctcggggcggtttggctgctgctctgctgctcactatagcgccaagtggtcacacgaagcggaattcagcaaaatactcataggtccgaagatgctcaccgaccacatgccagacatcctgatgcgggccttggacagcgtggtctccgacagagcggcctgcgtctcctgtccagcacaaggggtctccagtgtggacgtggcctgaccagggccactggaaactgtcccaggaacgatggactcacgcttttgtccttaaactgacttaccatccgaggagttcccatgacgccaaaacagcgaatgtccatcaacaggaatcggatgggaacagaattccatggtctcaatgacttaagtttatgggaagtcattgtggccataatggtagcagaagtagtgagcacgctcaggtgataggacgactcctgagacccagcgaccgtggagacagcctcgggaagccctggcccgtggatggatcccttggctgtctgaggactgctccagaagtgcgggaatccagggcccacccagaagaccgtgaacagttccttagcctcccacccccaaggcagctcttttcatccaactcagtttacaggcgtggtttgtttttcaaactgggcttcctggatgtacaaatggaactgtggtgagggtgcgggctggggttttctcctgggcgtcaccaagggcagccctgggctctggctggggatgaagacgaaacccgatcgggaaagtaagtggagcccccggccccgccgagccacagccccccaactgcctattcccactgcccagttgtttgtccacatcaggagttgctgattgaattcttgctactcttctggctctggggtcggccagtggattcaggagttgaaacaataaagcgcgcgtcaccata

SEQ ID NO: 126679 - DNA, 2044 bp, Homo sapiens
  Payload ID: 4837
  Gene Symbol: DAGLB
  Gene Name: diacylglycerol lipase, beta
  Uniprot ID: Q8NCG7
  ENST ID: ENST00000425398
  CDS Start-End: 93-1724
ataatttggtggcggcgtccggagggtgctggtttgttctcggtgaacggcgcgcggggtctctcctgagtgcgagctacgggaccttcgccatgccggggatggtactcttcggccggcgctgggccatcgccagcgacgacttggtcttcccagggttcttcgagctggtcgtgcgagtgctgtggtggattggcattctgacgttgtatctcatgcacagaggaaagctggactgtgctggtggagccttgctcagcagttacttgatcgtcctcatgattctcctggcagttgtcatatgtactgtgtcagccatcatgtgtgtcagcatgagaggaacgatttgtaaccctggaccgcggaagtctatgtctaagctgctttacatccgcctggcgctgttttttccagagatggtctgggcctctctgggggctgcctgggtggcagatggtgttcagtgcgacaggacagttgtaaacggcatcatcgcaaccgtcgtggtcaggacacagatctggtgcccagcgacattgcggcgggcctcgccctgcttcatcagcaacaggacaatatcaggaacaaccaagagcctgcccaggtggtctgccatgccccagggagctcccagctgcagaagcagaaccacagactatgacttggtcggaggcgatcagctcaactgtcacttcggctccatcctgcacaccacagggctgcagtacagggacttcatccacgtcagcttccatgacaaggtttacgagctgccgtttttagtggctctggatcacaggaaagagtctgttgtggtcgctgtgagggggaccatgtctctgcaggatgtccttacggacctgtcagcggagagtgaggtgctggacgtggagtgtgaggtgcaggaccgcctggcacacaagggtatttctcaagctgccagatacgtttaccaacgactcatcaacgacgggattttgagccaagccttcagcattgctcctgagtaccggctggtcatagtgggccacagcctcgggggcggggcggccgccctgctggccaccatgctcagagccgcctacccgcaggtcaggtgctacgccttctccccaccccgggggctgtggagcaaagctctgcaggaatattctcagagcttcatcgtgtcactcgtcctggggaaggatgtgattcccaggctcagtgtgaccaacttggaagatctgaagagaagaatcttgcgagtggtcgcgcactgcaataaacccaagtacaagatcttgctgcacggtttgtggtacgaactgtttggaggaaaccccaacaacttgcccacggagctggacgggggcgaccaggaagtcctgacacagcctcttctgggggagcagagcctactgacgcgctggtccccggcctacagcttctccagcgactccccactggactcttctcccaagtacccccctctctaccctcccggcaggatcatccacctgcaggaggagggcgcctcggggcggtttggctgctgctctgctgctcactatagcgccaagtggtcacacgaagcggaattcagcaaaatactcataggtccgaagatgctcaccgaccacatgccagacatcctgatgcgggccttggacagcgtggtctccgacagagcggcctgcgtctcctgtccagcacaaggggtctccagtgtggacgtggcctgaccagggccactggaaactgtcccaggaacgatggactcacgcttttgtccttaaactgacttaccatccgaggagttcccatgacgccaaaacagcgaatgtccatcaacaggaatcggatgggaacagaattccatggtctcaatgacttaagtttatgggaagtcattgtggccataatggtagcagaagtagtgagcacgctcaggtgataggacgactcctgagacccagcgaccgtggagacagcctcgggaagccctggcccgtggatggatcccttggctgtctgaggactgctccagaagtgcgggaatcca

SEQ ID NO: 126680 - DNA, 2385 bp, Homo sapiens
  Payload ID: 4837
  Gene Symbol: DAGLB
  Gene Name: diacylglycerol lipase, beta
  ENST ID: ENST00000436575
  CDS Start-End: 253-2148
agttcggccacgtccctggccacgtcgcgggcgatctcgccatcttcgccgcttcctctcaggggccgccgcctcctgagccgcccagccccggggccgccgcgctgcgccgaccgccaccgccgccgccgccatgaacattttccggctgactggggacctgtcccacctggcggccatcgtcatcctgctgctgaagatctggaagacgcgctcctgcgccggtggattggcattctgacgttgtatctcatgcacagaggaaagctggactgtgctggtggagccttgctcagcagttacttgatcgtcctcatgattctcctggcagttgtcatatgtactgtgtcagccatcatgtgtgtcagcatgagaggaacgatttgtaaccctggaccgcggaagtctatgtctaagctgctttacatccgcctggcgctgttttttccagagatggtctgggcctctctgggggctgcctgggtggcagatggtgttcagtgcgacaggacagttgtaaacggcatcatcgcaaccgtcgtggtcagttggatcatcatcgctgccacagtggtttccattatcattgtctttgaccctcttggggggaaaatggctccatattcctctgccggccccagccacctggatagtcatgattcaagccagttacttaatggcctcaagacagcagctacaagcgtgtgggaaaccagaatcaagctcttgtgctgttgcattgggaaagacgaccatactcgggttgctttttcgagtacggcagagcttttctcaacctacttttcagacacagatctggtgcccagcgacattgcggcgggcctcgccctgcttcatcagcaacaggacaatatcaggaacaaccaagagcctgcccaggtggtctgccatgccccagggagctcccaggaagctgatctggatgcagaattagaaaactgccatcattacatgcagtttgcagcagcggcctatgggtggcccctctacatctacagaaaccccctcacggggctgtgcaggattggtggtgactgctgcagaagcagaaccacagactatgacttggtcggaggcgatcagctcaactgtcacttcggctccatcctgcacaccacagggctgcagtacagggacttcatccacgtcagcttccatgacaaggtttacgagctgccgtttttagtggctctggatcacaggaaagagtctgttgtggtcgctgtgagggggaccatgtctctgcaggatgtccttacggacctgtcagcggagagtgaggtgctggacgtggagtgtgaggtgcaggaccgcctggcacacaagggtatttctcaagctgccagatacgtttaccaacgactcatcaacgacgggattttgagccaagccttcagcattgctcctgagtaccggctggtcatagtgggccacagcctcgggggcggggcggccgccctgctggccaccatgctcagagccgcctacccgcaggtcaggtgctacgccttctccccaccccgggggctgtggagcaaagctctgcaggaatattctcagagcttcatcgtgtcactcgtcctggggaaggatgtgattcccaggctcagtgtgaccaacttggaagatctgaagagaagaatcttgcgagtggtcgcgcactgcaataaacccaagtacaagatcttgctgcacggtttgtggtacgaactgtttggaggaaaccccaacaacttgcccacggagctggacgggggcgaccaggaagtcctgacacagcctcttctgggggagcagagcctactgacgcgctggtccccggcctacagcttctccagcgactccccactggactcttctcccaagtacccccctctctaccctcccggcaggatcatccacctgcaggaggagggcgcctcggggcggtttggctgctgctctgctgctcactatagcgccaagtggtcacacgaagcggaattcagcaaaatactcataggtccgaagatgctcaccgaccacatgccagacatcctgatgcgggccttggacagcgtggtctccgacagagcggcctgcgtctcctgtccagcacaaggggtctccagtgtggacgtggcctgaccagggccactggaaactgtcccaggaacgatggactcacgcttttgtccttaaactgacttaccatccgaggagttcccatgacgccaaaacagcgaatgtccatcaacaggaatcggatgggaacagaattccatggtctcaatgacttaagtttatgggaagtcattgtggccataatggtagcagaagtagtgagcacgctcaggtgataggacgactcctgagacccagcga

SEQ ID NO: 126681 - DNA, 558 bp, Homo sapiens
  Payload ID: 4837
  Gene Symbol: DAGLB
  Gene Name: diacylglycerol lipase, beta
  ENST ID: ENST00000432248
  CDS Start-End: 111-558
gtttgcgcttgagcgccgataatttggtggcggcgtccggagggtgctggtttgttctcggtgaacggcgcgcggggtctctcctgagtgcgagctacgggaccttcgccatgccggggatggtactcttcggccggcgctgggccatcgccagcgacgacttggtcttcccagggttcttcgagctggtcgtgcgagtgctgtggtggattggcattctgacgttgtatctcatgcacagaggaaagctggactgtgctggtggagccttgctcagcagttacttgatcgtcctcatgattctcctggcagttgtcatatgtactgtgtcagccatcatgtgtgtcagcatgagaggaacgatttgtaaccctggaccgcggaagtctatgtctaagctgctttacatccgcctggcgctgttttttccagagatggtctgggcctctctgggggctgcctgggtggcagatggtgttcagtgcgacaggacagttgtaaacggcatcatcgcaaccgtcgtggtcagctgcagaagcagaaccacagactatgact

SEQ ID NO: 126682 - DNA, 1374 bp, Homo sapiens
  Payload ID: 4837
  Gene Symbol: DAGLB
  Gene Name: diacylglycerol lipase, beta
  ENST ID: ENST00000454738
  CDS Start-End: 91-609
aatttggtggcggcgtccggagggtgctggtttgttctcggtgaacggcgcgcggggtctctcctgagtgcgagctacgggaccttcgccatgccggggatggtactcttcggccggcgctgggccatcgccagcgacgacttggtcttcccagggttcttcgagctggtcgtgcgagtgctgtggtggattggcattctgacgttgtatctcatgcacagaggaaagctggactgtgctggtggagccttgctcagcagttacttgatcgtcctcatgattctcctggcagttgtcatatgtactgtgtcagccatcatgtgtgtcagcatgagaggacacagatctggtgcccagcgacattgcggcgggcctcgccctgcttcatcagcaacaggacaatatcaggaacaaccaagagcctgcccaggtggtctgccatgccccagggagctcccagctgcagaagcagaaccacagactatgacttggtcggaggcgatcagctcaactgtcacttcggctccatcctgcacaccacagggctgcagtacagggacttcatccacgtcagcttccatgacaaggtttacgagctgccgtttttagtggctctggatcacaggaaagagtctgttgtggtcgctgtgagggggaccatgtctctgcaggatgtccttacggacctgtcagcggagagtgaggtgctggacgtggagtgtgaggtgcaggaccgcctggcacacaagggtatttctcaagctgccagatacgtttaccaacgactcatcaacgacgggattttgagccaagccttcagcattgctcctgagtaccggctggtcatagtgggccacagcctcgggggcggggcggccgccctgctggccaccatgctcagagccgcctacccgcaggtcaggtgctacgccttctccccaccccgggggctgtggaggtgagcctttgttttcctgctctaacagcttgctacttacaagtcatgtggtcaagactcatcttttttttcttttattttcctgagatgaagtcttgctctgtcgcccaggctggagtgcagtggcgtgatctcggctcactgcaagctccacctcccaggttcaggcggttcttctgcctcagcctcccgagttgctgggactacagacacccgccagcatgccggctaatttttgtatttttagtagtggtggggtttcaccatgttggccaggctggtcttgatctcctgacctcaagtgatctgcccgcctcggcctcccaaagtgcagggattacaggcgtgagccaccgcacccagctgagcaaagctctgcaggaatattctcagagcttcatcgtgtcactcgtcct

SEQ ID NO: 126683 - DNA, 1473 bp, Homo sapiens
  Payload ID: 4838
  Gene Symbol: DGAT1
  Gene Name: diacylglycerol O-acyltransferase 1
  ENST ID: ENST00000332324
  CDS Start-End: 275-1222
aggccccgcctcaggtcggccgcggactacaaatggacgagagaggcggccgtccattagttagcggctccggagcaacgcagccgttgtccttgaggccgacgggcccgacgcgggcgggttgaacgcgctggtgaggcggtcacccgggctacggcggccggcagggggcagtggcggccgttgtctagggcccggaggtggggccgcgcgcctcgggcgctacgaacccggcgggcccacgcttggctgcggccgggtgcgggctgaggccatgggcgaccgcggcagctcccggcgccggaggacagggtcgcggccctcgagccacggcggcggcgggcctgcggcggcggaagaggaggtgcgggacgccgctgcgggccccgacgtgggagccgcgggggacgcgccagccccggcccccaacaaggacggagacgccggcgtgggcagcggccactgggagctgaggtgccatcgcctgcaggattctttattcagctctgacagtggcttcagcaactaccgtggcatcctgaactggtgtgtggtgatgctgatcttgagcaatgcccggttatttctggagaacctcatcaagtatggcatcctggtggaccccatccaggtggtttctctgttcctgaaggatccctatagctggcccgccccatgcctggttattgcggccaatgtctttgctgtggctgcattccaggttgagaagcgcctggcggtgggtgccctgacggagcaggcgggactgctgctgcacgtggccaacctggccaccattctgtgtttcccagcggctgtggtcttactggttgagtctatcactccagtgggctccctgctggcgctgatggcgcacaccatcctcttcctcaagctcttctcctaccgcgacgtcaactcatggtgccgcagggccagggccaaggctgcccatgcttcgacggggcagcagcaagtggatggccaggacaggggtgttcctggcctcggccttcttccacgagtacctggtgagcgtccctctgcgaatgttccgcctctgggcgttcacgggcatgatggctcagatcccactggcctggttcgtgggccgctttttccagggcaactatggcaacgcagctgtgtggctgtcgctcatcatcggacagccaatagccgtcctcatgtacgtccacgactactacgtgctcaactatgaggccccagcggcagaggcctgagctgcacctgagggcctggcttctcactgccacctcacacccgctgccagagcccacctctcctcctaggcctcgagtgctggggatgggcctggctgcacagcatcctcctctggtcccagggaggcctctctgcccctatggggctctgtcctgcacccctcagggatggcgacagcaggccagacacagtctgatgccagctgggagtcttgctgaccctgccccg

SEQ ID NO: 126684 - DNA, 3711 bp, Homo sapiens
  Payload ID: 4838
  Gene Symbol: DGAT1
  Gene Name: diacylglycerol O-acyltransferase 1
  Uniprot ID: O75907
  ENST ID: ENST00000528718
  CDS Start-End: 275-1741
aggccccgcctcaggtcggccgcggactacaaatggacgagagaggcggccgtccattagttagcggctccggagcaacgcagccgttgtccttgaggccgacgggcccgacgcgggcgggttgaacgcgctggtgaggcggtcacccgggctacggcggccggcagggggcagtggcggccgttgtctagggcccggaggtggggccgcgcgcctcgggcgctacgaacccggcgggcccacgcttggctgcggccgggtgcgggctgaggccatgggcgaccgcggcagctcccggcgccggaggacagggtcgcggccctcgagccacggcggcggcgggcctgcggcggcggaagaggaggtgcgggacgccgctgcgggccccgacgtgggagccgcgggggacgcgccagccccggcccccaacaaggacggagacgccggcgtgggcagcggccactgggagctgaggtgccatcgcctgcaggattctttattcagctctgacagtggcttcagcaactaccgtggcatcctgaactggtgtgtggtgatgctgatcttgagcaatgcccggttatttctggagaacctcatcaagtatggcatcctggtggaccccatccaggtggtttctctgttcctgaaggatccctatagctggcccgccccatgcctggttattgcggccaatgtctttgctgtggctgcattccaggttgagaagcgcctggcggtgggtgccctgacggagcaggcgggactgctgctgcacgtggccaacctggccaccattctgtgtttcccagcggctgtggtcttactggttgagtctatcactccagtgggctccctgctggcgctgatggcgcacaccatcctcttcctcaagctcttctcctaccgcgacgtcaactcatggtgccgcagggccagggccaaggctgcctctgcagggaagaaggccagcagtgctgctgccccgcacaccgtgagctacccggacaatctgacctaccgcgatctctactacttcctcttcgcccccaccttgtgctacgagctcaactttccccgctctccccgcatccggaagcgctttctgctgcgacggatccttgagatgctgttcttcacccagctccaggtggggctgatccagcagtggatggtccccaccatccagaactccatgaagcccttcaaggacatggactactcacgcatcatcgagcgcctcctgaagctggcggtccccaatcacctcatctggctcatcttcttctactggctcttccactcctgcctgaatgccgtggctgagctcatgcagtttggagaccgggagttctaccgggactggtggaactccgagtctgtcacctacttctggcagaactggaacatccctgtgcacaagtggtgcatcagacacttctacaagcccatgcttcgacggggcagcagcaagtggatggccaggacaggggtgttcctggcctcggccttcttccacgagtacctggtgagcgtccctctgcgaatgttccgcctctgggcgttcacgggcatgatggctcagatcccactggcctggttcgtgggccgctttttccagggcaactatggcaacgcagctgtgtggctgtcgctcatcatcggacagccaatagccgtcctcatgtacgtccacgactactacgtgctcaactatgaggccccagcggcagaggcctgagctgcacctgagggcctggcttctcactgccacctcacacccgctgccagagcccacctctcctcctaggcctcgagtgctggggatgggcctggctgcacagcatcctcctctggtcccagggaggcctctctgcccctatggggctctgtcctgcacccctcagggatggcgacagcaggccagacacagtctgatgccagctgggagtcttgctgaccctgccccgggtccgagggtgtcaataaagtgctgtccagtgacctcttcagcctgccaggggcctggggcctggtggggggtatggccacacccacaagggcgagtgccagagctgtgtggacagctgtcccaggacctgccggggagcagcagctccactgcagcagggcgggcatggccggtagggggagtgcaaggccaggcagacgcccccattccccacactcccctacctagaaaagctcagctcaggcgtcctctcctggtgctactcctgctgggtgtgcgggaatcggcactctggccctcagtgcaggatggtcaacttgcacccaccgtgctcagcttcagcttgggaagaggtcggccctgggtttgcgggaagtgggctccagccaggatggcccagggatgggcagtccacagggcctttctggtgtgggtctggtgagccgaggggctacggtacacaatggctatgtccatggctattcgccttggggcagggctcggtttggcagcctctttccttcacttggaacctgggcagccaggtgggctggtggctctcagctgccctccacgaggttggggcacccctgatccccaggcctgccttgccctctgctcttctggcaccaggctgggcagtgcagacagcgcagccctgcagccttcaggacaccttgttcccaggccctgcaatccaccaagctggatagatggggccccccttgatggtagcgggaggtcaggggtaaccccagggccctgctgctgccttaccttgctggggtgactgcttgattaaagaccccaagactggaccaggccctggtgtccccagacctgcagctatggcccaacaaggcaggtgtttgaggaggccctgcacagggtcccaggactgcaccaggggcctcatcagcaacctgctgaactggtggtgtgaggggagggtgggctcccttggtggtatcctccctctaccccagtgggggctggtgggccctgagatggaggcatctccttgggccctgctgaggatggcagtagtgggtgagctcctggtggggggatgggtgtggggccgactcctccatcccacatgggctcctgtgcctctccctatcagttggccagtggagctcgagaacaaactgttgctgccagataaagcagcaaagcctgctccactgcccagcgcaggcccccttcccttcctccaccaggctgagtggagaaccctaaagctacgggacaggctcccgttccccgtgcctacacagggtgctggctctggcagaaagacagtgtgcccgccccgcatcacctgtccgagtgcgaacaccttgggaagggggttcctggtggtcctgtgacaaccagagacccccagggccaaggtgaggcgcccacccctggtccctcaataaagaactgcaagcacatgctggtcctggggagtcgggcaggcacggagctagctgcaagcatccgtcttcccccaggaggccactgcagcccggcccttctgtgccctgggcccctcctcattgcagcaccacccaccgcaccaccctgggacagaggaaacacatggaggccatagcatagagcctgtctgtttatagatctctgcctgtcttgtccgtccatccactgtgtgtatatatctgtgtatctctgtggagcggggaacgggacagttgtgtaaaaatccaaaatacaattctgactatgaacaa

SEQ ID NO: 126685 - DNA, 2453 bp, Homo sapiens
  Payload ID: 4839
  Gene Symbol: DGAT2
  Gene Name: diacylglycerol O-acyltransferase 2
  Uniprot ID: Q96PD7
  ENST ID: ENST00000228027
  CDS Start-End: 261-1427
ctgccccgttgtgaggtgataaagtgttgcgctccgggacgccagcgccgcggctgccgcctctgctggggtctaggctgtttctctcgcgccaccactggccgccggccgcagctccaggtgtcctagccgcccagcctcgacgccgtcccgggacccctgtgctctgcgcgaagccctggccccgggggccggggcatgggccaggggcgcggggtgaagcggcttcccgcggggccgtgactgggcgggcttcagccatgaagaccctcatagccgcctactccggggtcctgcgcggcgagcgtcaggccgaggctgaccggagccagcgctctcacggaggacctgcgctgtcgcgcgaggggtctgggagatggggcactggatccagcatcctctccgccctccaggacctcttctctgtcacctggctcaataggtccaaggtggaaaagcagctacaggtcatctcagtgctccagtgggtcctgtccttccttgtactgggagtggcctgcagtgccatcctcatgtacatattctgcactgattgctggctcatcgctgtgctctacttcacttggctggtgtttgactggaacacacccaagaaaggtggcaggaggtcacagtgggtccgaaactgggctgtgtggcgctactttcgagactactttcccatccagctggtgaagacacacaacctgctgaccaccaggaactatatctttggataccacccccatggtatcatgggcctgggtgccttctgcaacttcagcacagaggccacagaagtgagcaagaagttcccaggcatacggccttacctggctacactggcaggcaacttccgaatgcctgtgttgagggagtacctgatgtctggaggtatctgccctgtcagccgggacaccatagactatttgctttcaaagaatgggagtggcaatgctatcatcatcgtggtcgggggtgcggctgagtctctgagctccatgcctggcaagaatgcagtcaccctgcggaaccgcaagggctttgtgaaactggccctgcgtcatggagctgacctggttcccatctactcctttggagagaatgaagtgtacaagcaggtgatcttcgaggagggctcctggggccgatgggtccagaagaagttccagaaatacattggtttcgccccatgcatcttccatggtcgaggcctcttctcctccgacacctgggggctggtgccctactccaagcccatcaccactgttgtgggagagcccatcaccatccccaagctggagcacccaacccagcaagacatcgacctgtaccacaccatgtacatggaggccctggtgaagctcttcgacaagcacaagaccaagttcggcctcccggagactgaggtcctggaggtgaactgagccagccttcggggccaattccctggaggaaccagctgcaaatcacttttttgctctgtaaatttggaagtgtcatgggtgtctgtgggttatttaaaagaaattataacaattttgctaaaccattacaatgttaggtcttttttaagaaggaaaaagtcagtatttcaagttctttcacttccagcttgccctgttctaggtggtggctaaatctgggcctaatctgggtggctcagctaacctctcttcttcccttcctgaagtgacaaaggaaactcagtcttcttggggaagaaggattgccattagtgacttggaccagttagatgattcactttttgcccctagggatgagaggcgaaagccacttctcatacaagcccctttattgccactaccccacgctcgtctagtcctgaaactgcaggaccagtttctctgccaaggggaggagttggagagcacagttgccccgttgtgtgagggcagtagtaggcatctggaatgctccagtttgatctcccttctgccacccctacctcacccctagtcactcatatcggagcctggactggcctccaggatgaggatgggggtggcaatgacaccctgcaggggaaaggactgccccccatgcaccattgcagggaggatgccgccaccatgagctaggtggagtaactggtttttcttgggtggctgatgacatggatgcagcacagactcagccttggcctggagcacatgcttactggtggcctcagtttaccttccccagatcctagattctggatgtgaggaagagatccctcttcagaaggggcctggccttctgagcagcagattagttccaaagcaggtggcccccgaacccaagcctcacttttctgtgccttcctgagggggttgggccggggaggaaacccaaccctctcctgtgtgttctgttatctcttgatgagatcattgcaccatgtcagacttttgtatatgccttgaaaataaatgaaagtgagaatcctc

SEQ ID NO: 126686 - DNA, 2324 bp, Homo sapiens
  Payload ID: 4839
  Gene Symbol: DGAT2
  Gene Name: diacylglycerol O-acyltransferase 2
  Uniprot ID: Q96PD7
  ENST ID: ENST00000376262
  CDS Start-End: 260-1297
tgccccgttgtgaggtgataaagtgttgcgctccgggacgccagcgccgcggctgccgcctctgctggggtctaggctgtttctctcgcgccaccactggccgccggccgcagctccaggtgtcctagccgcccagcctcgacgccgtcccgggacccctgtgctctgcgcgaagccctggccccgggggccggggcatgggccaggggcgcggggtgaagcggcttcccgcggggccgtgactgggcgggcttcagccatgaagaccctcatagccgcctactccggggtcctgcgcggcgagcgtcaggccgaggctgaccggagccagcgctctcacggaggacctgcgctgtcgcgcgaggggtctgggagatggggagtggcctgcagtgccatcctcatgtacatattctgcactgattgctggctcatcgctgtgctctacttcacttggctggtgtttgactggaacacacccaagaaaggtggcaggaggtcacagtgggtccgaaactgggctgtgtggcgctactttcgagactactttcccatccagctggtgaagacacacaacctgctgaccaccaggaactatatctttggataccacccccatggtatcatgggcctgggtgccttctgcaacttcagcacagaggccacagaagtgagcaagaagttcccaggcatacggccttacctggctacactggcaggcaacttccgaatgcctgtgttgagggagtacctgatgtctggaggtatctgccctgtcagccgggacaccatagactatttgctttcaaagaatgggagtggcaatgctatcatcatcgtggtcgggggtgcggctgagtctctgagctccatgcctggcaagaatgcagtcaccctgcggaaccgcaagggctttgtgaaactggccctgcgtcatggagctgacctggttcccatctactcctttggagagaatgaagtgtacaagcaggtgatcttcgaggagggctcctggggccgatgggtccagaagaagttccagaaatacattggtttcgccccatgcatcttccatggtcgaggcctcttctcctccgacacctgggggctggtgccctactccaagcccatcaccactgttgtgggagagcccatcaccatccccaagctggagcacccaacccagcaagacatcgacctgtaccacaccatgtacatggaggccctggtgaagctcttcgacaagcacaagaccaagttcggcctcccggagactgaggtcctggaggtgaactgagccagccttcggggccaattccctggaggaaccagctgcaaatcacttttttgctctgtaaatttggaagtgtcatgggtgtctgtgggttatttaaaagaaattataacaattttgctaaaccattacaatgttaggtcttttttaagaaggaaaaagtcagtatttcaagttctttcacttccagcttgccctgttctaggtggtggctaaatctgggcctaatctgggtggctcagctaacctctcttcttcccttcctgaagtgacaaaggaaactcagtcttcttggggaagaaggattgccattagtgacttggaccagttagatgattcactttttgcccctagggatgagaggcgaaagccacttctcatacaagcccctttattgccactaccccacgctcgtctagtcctgaaactgcaggaccagtttctctgccaaggggaggagttggagagcacagttgccccgttgtgtgagggcagtagtaggcatctggaatgctccagtttgatctcccttctgccacccctacctcacccctagtcactcatatcggagcctggactggcctccaggatgaggatgggggtggcaatgacaccctgcaggggaaaggactgccccccatgcaccattgcagggaggatgccgccaccatgagctaggtggagtaactggtttttcttgggtggctgatgacatggatgcagcacagactcagccttggcctggagcacatgcttactggtggcctcagtttaccttccccagatcctagattctggatgtgaggaagagatccctcttcagaaggggcctggccttctgagcagcagattagttccaaagcaggtggcccccgaacccaagcctcacttttctgtgccttcctgagggggttgggccggggaggaaacccaaccctctcctgtgtgttctgttatctcttgatgagatcattgcaccatgtcagacttttgtatatgccttgaaaataaatgaaagtgagaatcctct

SEQ ID NO: 126687 - DNA, 747 bp, Homo sapiens
  Payload ID: 4839
  Gene Symbol: DGAT2
  Gene Name: diacylglycerol O-acyltransferase 2
  ENST ID: ENST00000603276
  CDS Start-End: 268-747
ggaatctggagacaggggaccagtgaagaggatagtacagctgtctatgcaaggtggcatggcccaaggcagaagagagaaggagagaactgtttcctggttgttgggcatagaggcactggatccagcatcctctccgccctccaggacctcttctctgtcacctggctcaataggtccaaggtggaaaagcagctacaggtcatctcagtgctccagtgggtcctgtccttccttgtactgggagtggcctgcagtgccatcctcatgtacatattctgcactgattgctggctcatcgctgtgctctacttcacttggctggtgtttgactggaacacacccaagaaaggtggcaggaggtcacagtgggtccgaaactgggctgtgtggcgctactttcgagactactttcccatccagctggtgaagacacacaacctgctgaccaccaggaactatatctttggataccacccccatggtatcatgggcctgggtgccttctgcaacttcagcacagaggccacagaagtgagcaagaagttcccaggcatacggccttacctggctacactggcaggcaacttccgaatgcctgtgttgagggagtacctgatgtctggaggtatctgccctgtcagccgggacaccatagactatttgctttcaaagaatgggagtggcaatgctatcatcatcgtggtcgggggtgcggctgagtctctgagctccatgcctggcaag

SEQ ID NO: 126688 - DNA, 885 bp, Homo sapiens
  Payload ID: 4839
  Gene Symbol: DGAT2
  Gene Name: diacylglycerol O-acyltransferase 2
  ENST ID: ENST00000604733
  CDS Start-End: 1-885
ctcatagccgcctactccggggtcctgcgcggcgagcgtcaggccgaggctgaccggagccagcgctctcacggaggacctgcgctgtcgcgcgaggggtctgggagatggggagtggcctgcagtgccatcctcatgtacatattctgcactgattgctggctcatcgctgtgctctacttcacttggctggtgtttgactggaacacacccaagaaaggtggcaggaggtcacagtgggtccgaaactgggctgtgtggcgctactttcgagactactttcccatccagctggtgaagacacacaacctgctgaccaccaggaactatatctttggataccacccccatggtatcatgggcctgggtgccttctgcaacttcagcacagaggccacagaagtgagcaagaagttcccaggcatacggccttacctggctacactggcaggcaacttccgaatgcctgtgttgagggagtacctgatgtctggaggtatctgccctgtcagccgggacaccatagactatttgctttcaaagaatgggagtggcaatgctatcatcatcgtggtcgggggtgcggctgagtctctgagctccatgcctggcaagaatgcagtcaccctgcggaaccgcaagggctttgtgaaactggccctgcgtcatggagctgacctggttcccatctactcctttggagagaatgaagtgtacaagcaggtgatcttcgaggagggctcctggggccgatgggtccagaagaagttccagaaatacattggtttcgccccatgcatcttccatggtcgaggcctcttctcctccgacacctgggggctggtgccctactccaagcccatcaccactgttgtgggagagccc

SEQ ID NO: 126689 - DNA, 618 bp, Homo sapiens
  Payload ID: 4839
  Gene Symbol: DGAT2
  Gene Name: diacylglycerol O-acyltransferase 2
  ENST ID: ENST00000604935
  CDS Start-End: 282-618
gagcgaggggaataaccgggcgcgccccttggaagcagggctcagagctgctctcctctcacgcattccccggatccgcgcggagcaggctgctggccagccccgggcccgcgccaagcagagcctcaggcactggatccagcatcctctccgccctccaggacctcttctctgtcacctggctcaataggtccaaggtggaaaagcagctacaggtcatctcagtgctccagtgggtcctgtccttccttgtactgggagtggcctgcagtgccatcctcatgtacatattctgcactgattgctggctcatcgctgtgctctacttcacttggctggtgtttgactggaacacacccaagaaaggtggcaggaggtcacagtgggtccgaaactgggctgtgtggcgctactttcgagactactttcccatccagctggtgaagacacacaacctgctgaccaccaggaactatatctttggataccacccccatggtatcatgggcctgggtgccttctgcaacttcagcacagaggccacagaagtgagcaagaagttcccaggcatacggccttacctggctacactggcaggcaacttccgaatgcctgtgt

SEQ ID NO: 126690 - DNA, 584 bp, Homo sapiens
  Payload ID: 4839
  Gene Symbol: DGAT2
  Gene Name: diacylglycerol O-acyltransferase 2
  ENST ID: ENST00000605099
  CDS Start-End: 245-584
attgtgtatctatagaaaccagggcacaggggagcatgcagacagcccagagttacaaagccatgaggtggagggctaggatctgaacccaggcactggatccagcatcctctccgccctccaggacctcttctctgtcacctggctcaataggtccaaggtggaaaagcagctacaggtcatctcagtgctccagtgggtcctgtccttccttgtactgggagtggcctgcagtgccatcctcatgtacatattctgcactgattgctggctcatcgctgtgctctacttcacttggctggtgtttgactggaacacacccaagaaaggtggcaggaggtcacagtgggtccgaaactgggctgtgtggcgctactttcgagactactttcccatccagctggtgaagacacacaacctgctgaccaccaggaactatatctttggataccacccccatggtatcatgggcctgggtgccttctgcaacttcagcacagaggccacagaagtgagcaagaagttcccaggcatacggccttacctggctacactggcaggcaacttccgaatgcctgtgttga

SEQ ID NO: 126691 - DNA, 1553 bp, Homo sapiens
  Payload ID: 4840
  Gene Symbol: DGAT2L6
  Gene Name: diacylglycerol O-acyltransferase 2-like 6
  Uniprot ID: Q6ZPD8
  ENST ID: ENST00000333026
  CDS Start-End: 101-1114
cacagtaagagattatagcaaagcatctataatcaactcagcttaagaagttttgaccttctggttaggcttcttgccacaacagaacagcaccataaccatggctttcttctcccgactgaatctccaggagggcctccaaaccttctttgttttgcaatggatcccagtctatatatttttaggagctattcccattctccttataccctactttctgttattcagtaagttctggcccttggctgtgctctccttagcctggctcacctatgattggaacacccacagtcaaggtggcaggcgttcagcttgggtacgaaactggaccctatggaagtatttccgaaattacttcccagtaaagctggtgaagactcatgatctttctcccaaacacaactacatcattgccaatcacccccatggcattctctcttttggtgtcttcatcaactttgccactgaggccactggcattgctcggattttcccatccatcactccctttgtagggaccttagaaaggatattttggatcccaattgtgcgagaatatgtgatgtcaatgggtgtgtgccctgtgagtagctcagccttgaagtacttgctgacccagaaaggctcaggcaatgccgtggttattgtggtgggtggagctgctgaagctctcttgtgccgaccaggagcctccactctcttcctcaagcagcgtaaaggttttgtgaagatggcactgcaaacaggggcataccttgtcccttcatattcctttggtgagaacgaagttttcaatcaggagaccttccctgagggcacgtggttaaggttgttccaaaaaaccttccaggacacattcaaaaaaatcctgggactaaatttctgtaccttccatggccggggcttcactcgcggatcctggggcttcctgcctttcaatcggcccattaccactgttgttggggaaccccttccaattcccaggattaagaggccaaaccagaagacagtagacaagtatcacgcactctacatcagtgccctgcgcaagctctttgaccaacacaaagttgaatatggcctccctgagacccaagagctgacaattacataacaggagccacattccccattgatcaacccccaaagccatgagggatccaagtagagccacagaaaaagaagaattccaggagagggaaagatcgtaaggatgagagaggagaccatccaagccagaaattatttaataaatcagagttctagcaatagagtcctctcccaagtggctgaggcaggcttaggggaaagaaccagaggggcaggggaggactggggagggctggctagccagaggagttggctgtatcacccctggttattttagggcaacaacccagttggggagtcttatgaatcattccagccaactctctgatcacaaagaatactgtgcccctttctcctaaaccttagttcaccatcactacgtaggtttagacttagaagctttatttggaacagggatagtttgtttcctcttggtcctttcc

SEQ ID NO: 126692 - DNA, 5789 bp, Homo sapiens
  Payload ID: 4841
  Gene Symbol: DIAPH1
  Gene Name: diaphanous-related formin 1
  ENST ID: ENST00000253811
  CDS Start-End: 274-3960
attcatgaggcgcgcgcagcccggcatgctaatgaggcggggcgcggcggctggctaaagagcgactgggcggcggcgggcgcggagctgccaggcgggagcggcgtaggcgcggggtcgccggccagcgtgaaccgggacatggagccgcccggcgggagcctggggcccggccgcgggacccgggacaagaagaagggccggagcccagatgagctgccctcggcgggcggcgacggcggcaaatctaagaaatttactctgaagcggctcatggcagatgagctggagagatttaccagcatgagaattaagaaggagaaggaaaagcccaattctgctcatagaaattcttctgcatcatatggggatgatcccacagcacagtcattgcaagatgtttcagatgaacaagtgctggttctctttgaacagatgctgctggatatgaacctgaatgaggagaaacagcaacctttgagggagaaggacatcatcatcaagagggagatggtgtcccaatacttgtacacctccaaggctggcatgagccagaaggagagctctaagtctgccatgatgtatattcaggagttgaggtcaggcttgcgggatatgcctctgctcagctgcctggagtcccttcgtgtgtctctcaacaacaaccctgtcagttgggtgcaaacatttggtgctgaaggcttggcctccttattggacattcttaaacgacttcatgatgagaaagaagagactgctgggagttacgatagccggaacaagcatgagatcattcgctgcttgaaagcttttatgaacaacaagtttggaatcaagaccatgttggagacagaagaaggaatcctactgctggtcagagccatggatcctgctgttcccaacatgatgattgatgcagctaagctgctttctgctctttgtattctaccgcagccagaggacatgaatgaaagggttttggaggcaatgacagaaagagctgagatggatgaagtggaacgtttccagccgctgctggatggattaaaaagtggaaccactattgcactgaaggttggatgcctacagctgatcaatgctctcatcacaccagcggaggaacttgacttccgagttcacatcagaagtgaactgatgcgtttggggctacatcaggtgttgcaggaccttcgagagattgaaaatgaagatatgagagtgcaactaaatgtgtttgatgaacaaggggaagaggattcctatgacctgaagggacggctggatgacattcgcatggagatggatgactttaatgaagtctttcagattctcttaaacacagtgaaggattcaaaggcagagccacacttcctttccatcctgcagcacttactcttggtccgaaatgactatgaggccagacctcagtactataagttgattgaagaatgtatttcccagatagttctgcacaagaacggggctgatcctgacttcaagtgccggcacctccagattgagattgagggattaattgatcaaatgattgataagacaaaggtggagaaatctgaagccaaagctgcagagctggaaaagaagttggactcagagttaacagcccgacatgagctacaggtggaaatgaaaaagatggaaagtgactttgagcagaagcttcaagatcttcagggagaaaaagatgcactgcattctgaaaagcagcaaattgccacagagaaacaggacctggaagcagaggtgtcccagctcacaggagaggttgccaagctgacaaaggaactggaagatgccaagaaagaaatggcttccctctctgcggcagctattactgtacctccttctgttcctagtcgtgctcctgttccccctgcccctcctttacctggtgactctggcactattattccaccaccacctgctcctggggatagtaccactcctcctcctcctcctcctcctcctcctcctccacctcctttgcctgggggtgtttgcatctcctcacccccttctttacctggaggtactgctatctctccaccccctcctttgtctggggatgctaccatccctccaccccctcctttgcctgagggtgttggcatcccttcaccctcttctttgcctggaggtactgccatccccccacctcctcctttgcctgggagtgctagaatccccccaccaccacctcctttgcctgggagtgctggaattccccccccacctcctcccttgcctggagaagcaggaatgccacctcctcctccccctcttcctggtggtcctggaatccctccacctcctccatttcccggaggccctggcattcctccacctccacccggaatgggtatgcctccacctcccccatttggatttggagttcctgcagccccagttctgccatttggattaacccccaaaaagctttataagccagaggtgcagctccggaggccaaactggtccaagcttgtggctgaggacctctcccaggactgcttctggacaaaggtgaaggaggaccgctttgagaacaatgaacttttcgccaaacttacccttaccttctctgcccagaccaagaattcccaagccaagaaggatcaagaaggtggagaagaaaagaaatctgtgcaaaagaaaaaagtaaaagagttaaaggtgttggattcaaagacagcccagaatctctcaatctttttgggttccttccgcatgccctatcaagagattaagaatgtcatcctggaggtgaatgaggctgttctgactgagtctatgatccagaacctcattaagcaaatgccagagccagagcagttaaaaatgctttctgaactgaaggatgaatatgatgacctggctgagtcagagcagtttggcgtggtgatgggcactgtgccccgactgcggcctcgcctcaatgccattctcttcaagctacaattcagcgagcaagtggagaatatcaagccagagattgtgtctgtcactgctgcatgtgaggagttacgtaagagtgagagcttttccaatctcctagagattaccttgcttgttggaaattacatgaatgctggctccagaaatgctggtgcttttggcttcaatatcagcttcctctgtaagcttcgagacaccaagtccacagatcagaagatgacgttgttacacttcttggctgagttgtgtgagaatgactatcccgatgtcctcaagtttccagacgagcttgcccatgtggagaaagccagccgagtttctgctgaaaacttgcaaaagaacctagatcagatgaagaaacaaatttctgatgtggaacgtgatgttcagaatttcccagctgccacagatgaaaaagacaagtttgttgaaaaaatgaccatctttgtgaaggatgcacaggaacagtataacaagctgcggatgatgcattctaacatggagaccctctataaggagctgggcgagtacttcctctttgaccccaagaagttgtctgttgaagaatttttcatggatcttcacaattttcggaatatgtttttgcaagcagtcaaggagaaccagaagcggcgggagacagaagaaaagatgaggcgagcaaaactagccaaggagaaggcagagaaggagcggctagagaagcagcagaagagagagcaactcatagacatgaatgcagagggcgatgagacaggtgtgatggacagtcttctagaagccctgcagtcaggggcagcattccgacggaagagagggccccgtcaagccaacaggaaggccgggtgtgcagtcacatctctgctagcttcggagctgaccaaggatgatgccatggctgctgttcctgccaaggtgtccaagaacagtgagacattccccacaatccttgaggaagccaaggagttggttggccgtgcaagctaatgtgggtcctgtgaccgcggcagctcctcagcggagccgcagactgtcctgccctgcagcatgtgcctaaaggctcaaggggatattcctctggggtggccactcccaccaccctgaccctgtctttctctctggcctgctgctctctcaacatcacatacagcttcagctgcctggaggccagaaggaaagggcagtgcaggggaggcctgagcccgacttagccagccctggctgttgtattaccaaagcagggtccatgtttgctgccttaaccctgtctcctctctgttactcagagggcctcatctcagacaaggcccagcctgctttttctcagccctgactttctaatgggctttcccccctaggtcagtcttgctggatttgtgcttttcttttgtggtttctctggccctgagaatagcatggggcttgtaaacctttgggctagatccctcctttcattgctgttgtctctgctcttccctctcctggctgtggttatttattattagtggtgtggcactgggagctgctcctaaggaagcagggagcaaatcccacctttaccccaccttcctgggaaaggcctccaaagcaaaggatctggaccagtttccctgctgtgctgtggcccaggccagagcctgtgggcaggcaggcagggcatagcgacagtgtgggacctgcccccagcttctgccacgctttatgcccttgcctctctggacgctctgcaccaaccccaggctactgagccaccttccctcctcatgccttccctgagctttggtgcatctcatctggactatgggttgtactgtgaccatcccaacacctcaccctctgtctacaaggaaatgggaggtggagcctcctggctgagaaattgttttgcaaatggatctatttttgtatgaaaaaaaaaatttttttaaagaaaactgttccttccccctttcccctccataatgtaagaagctttggtggcaggttacagagttctgggatttcttctcacaggcccaatcctgaatgtgcccctggaccttctggacccttgagtccaaggcagatcctctctcccagggaatccgacacaggaggaaccccttctctggttgagctgggccaggcctaagagtagcaggaactctaagaccacagagttttttataaatgtataaatgtatcaagccaaatgtgcagatgctaactggacattctggggaactgggcaccaggagtgccttcatacactgtaccccagctctcttctaaaagagaagtgggtgggcacactgaactgtttggtggccccaaccacaggaagctgcaattctctggcttagggtgatacttttgccctccttgtgcccctctcagctttccatccccagctaggaagaaagaatggcactcttgggcttggcccagaattagagttattagagcaagagagagcttaggaagcatgagggcaactatagtgaggccttattgccaggagggagggttttggttgctggcgcttgtgtataaaggggcaagagcagctcctttggactattcctgggaggactctgatgcagggcgtctgttgctcccctgggtcacctcctccctgctcgctgacatctggggctttgaccctttcttttttaatctacttttgctaagatgcatttaataaaaaaaaagagagagagagagaggtgtgagggacaaaatgcaaacctatttcccttgcctcataggcttctgggatgtcatcacctccagtttgttggttttgtttccaactgttaataaagcattgaaacagt

SEQ ID NO: 126693 - DNA, 5795 bp, Homo sapiens
  Payload ID: 4841
  Gene Symbol: DIAPH1
  Gene Name: diaphanous-related formin 1
  Uniprot ID: O60610
  ENST ID: ENST00000389054
  CDS Start-End: 142-3960
attcatgaggcgcgcgcagcccggcatgctaatgaggcggggcgcggcggctggctaaagagcgactgggcggcggcgggcgcggagctgccaggcgggagcggcgtaggcgcggggtcgccggccagcgtgaaccgggacatggagccgcccggcgggagcctggggcccggccgcgggacccgggacaagaagaagggccggagcccagatgagctgccctcggcgggcggcgacggcggcaaatctaagaaatttactctgaagcggctcatggcagatgagctggagagatttaccagcatgagaattaagaaggagaaggaaaagcccaattctgctcatagaaattcttctgcatcatatggggatgatcccacagcacagtcattgcaagatgtttcagatgaacaagtgctggttctctttgaacagatgctgctggatatgaacctgaatgaggagaaacagcaacctttgagggagaaggacatcatcatcaagagggagatggtgtcccaatacttgtacacctccaaggctggcatgagccagaaggagagctctaagtctgccatgatgtatattcaggagttgaggtcaggcttgcgggatatgcctctgctcagctgcctggagtcccttcgtgtgtctctcaacaacaaccctgtcagttgggtgcaaacatttggtgctgaaggcttggcctccttattggacattcttaaacgacttcatgatgagaaagaagagactgctgggagttacgatagccggaacaagcatgagatcattcgctgcttgaaagcttttatgaacaacaagtttggaatcaagaccatgttggagacagaagaaggaatcctactgctggtcagagccatggatcctgctgttcccaacatgatgattgatgcagctaagctgctttctgctctttgtattctaccgcagccagaggacatgaatgaaagggttttggaggcaatgacagaaagagctgagatggatgaagtggaacgtttccagccgctgctggatggattaaaaagtggaaccactattgcactgaaggttggatgcctacagctgatcaatgctctcatcacaccagcggaggaacttgacttccgagttcacatcagaagtgaactgatgcgtttggggctacatcaggtgttgcaggaccttcgagagattgaaaatgaagatatgagagtgcaactaaatgtgtttgatgaacaaggggaagaggattcctatgacctgaagggacggctggatgacattcgcatggagatggatgactttaatgaagtctttcagattctcttaaacacagtgaaggattcaaaggcagagccacacttcctttccatcctgcagcacttactcttggtccgaaatgactatgaggccagacctcagtactataagttgattgaagaatgtatttcccagatagttctgcacaagaacggggctgatcctgacttcaagtgccggcacctccagattgagattgagggattaattgatcaaatgattgataagacaaaggtggagaaatctgaagccaaagctgcagagctggaaaagaagttggactcagagttaacagcccgacatgagctacaggtggaaatgaaaaagatggaaagtgactttgagcagaagcttcaagatcttcagggagaaaaagatgcactgcattctgaaaagcagcaaattgccacagagaaacaggacctggaagcagaggtgtcccagctcacaggagaggttgccaagctgacaaaggaactggaagatgccaagaaagaaatggcttccctctctgcggcagctattactgtacctccttctgttcctagtcgtgctcctgttccccctgcccctcctttacctggtgactctggcactattattccaccaccacctgctcctggggatagtaccactcctcctcctcctcctcctcctcctcctcctccacctcctttgcctgggggtgtttgcatctcctcacccccttctttacctggaggtactgctatctctccaccccctcctttgtctggggatgctaccatccctccaccccctcctttgcctgagggtgttggcatcccttcaccctcttctttgcctggaggtactgccatccccccacctcctcctttgcctgggagtgctagaatccccccaccaccacctcctttgcctgggagtgctggaattccccccccacctcctcccttgcctggagaagcaggaatgccacctcctcctccccctcttcctggtggtcctggaatccctccacctcctccatttcccggaggccctggcattcctccacctccacccggaatgggtatgcctccacctcccccatttggatttggagttcctgcagccccagttctgccatttggattaacccccaaaaagctttataagccagaggtgcagctccggaggccaaactggtccaagcttgtggctgaggacctctcccaggactgcttctggacaaaggtgaaggaggaccgctttgagaacaatgaacttttcgccaaacttacccttaccttctctgcccagaccaagacttccaaagccaagaaggatcaagaaggtggagaagaaaagaaatctgtgcaaaagaaaaaagtaaaagagttaaaggtgttggattcaaagacagcccagaatctctcaatctttttgggttccttccgcatgccctatcaagagattaagaatgtcatcctggaggtgaatgaggctgttctgactgagtctatgatccagaacctcattaagcaaatgccagagccagagcagttaaaaatgctttctgaactgaaggatgaatatgatgacctggctgagtcagagcagtttggcgtggtgatgggcactgtgccccgactgcggcctcgcctcaatgccattctcttcaagctacaattcagcgagcaagtggagaatatcaagccagagattgtgtctgtcactgctgcatgtgaggagttacgtaagagtgagagcttttccaatctcctagagattaccttgcttgttggaaattacatgaatgctggctccagaaatgctggtgcttttggcttcaatatcagcttcctctgtaagcttcgagacaccaagtccacagatcagaagatgacgttgttacacttcttggctgagttgtgtgagaatgactatcccgatgtcctcaagtttccagacgagcttgcccatgtggagaaagccagccgagtttctgctgaaaacttgcaaaagaacctagatcagatgaagaaacaaatttctgatgtggaacgtgatgttcagaatttcccagctgccacagatgaaaaagacaagtttgttgaaaaaatgaccagctttgtgaaggatgcacaggaacagtataacaagctgcggatgatgcattctaacatggagaccctctataaggagctgggcgagtacttcctctttgaccccaagaagttgtctgttgaagaatttttcatggatcttcacaattttcggaatatgtttttgcaagcagtcaaggagaaccagaagcggcgggagacagaagaaaagatgaggcgagcaaaactagccaaggagaaggcagagaaggagcggctagagaagcagcagaagagagagcaactcatagacatgaatgcagagggcgatgagacaggtgtgatggacagtcttctagaagccctgcagtcaggggcagcattccgacggaagagagggccccgtcaagccaacaggaaggccgggtgtgcagtcacatctctgctagcttcggagctgaccaaggatgatgccatggctgctgttcctgccaaggtgtccaagaacagtgagacattccccacaatccttgaggaagccaaggagttggttggccgtgcaagctaatgtgggtcctgtgaccgcggcagctcctcagcggagccgcagactgtcctgccctgcagcatgtgcctaaaggctcaaggggatattcctctggggtggccactcccaccaccctgaccctgtctttctctctggcctgctgctctctcaacatcacatacagcttcagctgcctggaggccagaaggaaagggcagtgcaggggaggcctgagcccgacttagccagccctggctgttgtattaccaaagcagggtccatgtttgctgccttaaccctgtctcctctctgttactcagagggcctcatctcagacaaggcccagcctgctttttctcagccctgactttctaatgggctttcccccctaggtcagtcttgctggatttgtgcttttcttttgtggtttctctggccctgagaatagcatggggcttgtaaacctttgggctagatccctcctttcattgctgttgtctctgctcttccctctcctggctgtggttatttattattagtggtgtggcactgggagctgctcctaaggaagcagggagcaaatcccacctttaccccaccttcctgggaaaggcctccaaagcaaaggatctggaccagtttccctgctgtgctgtggcccaggccagagcctgtgggcaggcaggcagggcatagcgacagtgtgggacctgcccccagcttctgccacgctttatgcccttgcctctctggacgctctgcaccaaccccaggctactgagccaccttccctcctcatgccttccctgagctttggtgcatctcatctggactatgggttgtactgtgaccatcccaacacctcaccctctgtctacaaggaaatgggaggtggagcctcctggctgagaaattgttttgcaaatggatctatttttgtatgaaaaaaaaaatttttttaaagaaaactgttccttccccctttcccctccataatgtaagaagctttggtggcaggttacagagttctgggatttcttctcacaggcccaatcctgaatgtgcccctggaccttctggacccttgagtccaaggcagatcctctctcccagggaatccgacacaggaggaaccccttctctggttgagctgggccaggcctaagagtagcaggaactctaagaccacagagttttttataaatgtataaatgtatcaagccaaatgtgcagatgctaactggacattctggggaactgggcaccaggagtgccttcatacactgtaccccagctctcttctaaaagagaagtgggtgggcacactgaactgtttggtggccccaaccacaggaagctgcaattctctggcttagggtgatacttttgccctccttgtgcccctctcagctttccatccccagctaggaagaaagaatggcactcttgggcttggcccagaattagagttattagagcaagagagagcttaggaagcatgagggcaactatagtgaggccttattgccaggagggagggttttggttgctggcgcttgtgtataaaggggcaagagcagctcctttggactattcctgggaggactctgatgcagggcgtctgttgctcccctgggtcacctcctccctgctcgctgacatctggggctttgaccctttcttttttaatctacttttgctaagatgcatttaataaaaaaaaagagagagagagagaggtgtgagggacaaaatgcaaacctatttcccttgcctcataggcttctgggatgtcatcacctccagtttgttggttttgtttccaactgttaataaagcattgaaacagtactgcc

SEQ ID NO: 126694 - DNA, 5762 bp, Homo sapiens
  Payload ID: 4841
  Gene Symbol: DIAPH1
  Gene Name: diaphanous-related formin 1
  ENST ID: ENST00000389057
  CDS Start-End: 142-3933
attcatgaggcgcgcgcagcccggcatgctaatgaggcggggcgcggcggctggctaaagagcgactgggcggcggcgggcgcggagctgccaggcgggagcggcgtaggcgcggggtcgccggccagcgtgaaccgggacatggagccgcccggcgggagcctggggcccggccgcgggacccgggacaagaagaagggccggagcccagatgagctgccctcggcgggcggcgacggcggcaaatctaagaaatttctggagagatttaccagcatgagaattaagaaggagaaggaaaagcccaattctgctcatagaaattcttctgcatcatatggggatgatcccacagcacagtcattgcaagatgtttcagatgaacaagtgctggttctctttgaacagatgctgctggatatgaacctgaatgaggagaaacagcaacctttgagggagaaggacatcatcatcaagagggagatggtgtcccaatacttgtacacctccaaggctggcatgagccagaaggagagctctaagtctgccatgatgtatattcaggagttgaggtcaggcttgcgggatatgcctctgctcagctgcctggagtcccttcgtgtgtctctcaacaacaaccctgtcagttgggtgcaaacatttggtgctgaaggcttggcctccttattggacattcttaaacgacttcatgatgagaaagaagagactgctgggagttacgatagccggaacaagcatgagatcattcgctgcttgaaagcttttatgaacaacaagtttggaatcaagaccatgttggagacagaagaaggaatcctactgctggtcagagccatggatcctgctgttcccaacatgatgattgatgcagctaagctgctttctgctctttgtattctaccgcagccagaggacatgaatgaaagggttttggaggcaatgacagaaagagctgagatggatgaagtggaacgtttccagccgctgctggatggattaaaaagtggaaccactattgcactgaaggttggatgcctacagctgatcaatgctctcatcacaccagcggaggaacttgacttccgagttcacatcagaagtgaactgatgcgtttggggctacatcaggtgttgcaggaccttcgagagattgaaaatgaagatatgagagtgcaactaaatgtgtttgatgaacaaggggaagaggattcctatgacctgaagggacggctggatgacattcgcatggagatggatgactttaatgaagtctttcagattctcttaaacacagtgaaggattcaaaggcagagccacacttcctttccatcctgcagcacttactcttggtccgaaatgactatgaggccagacctcagtactataagttgattgaagaatgtatttcccagatagttctgcacaagaacggggctgatcctgacttcaagtgccggcacctccagattgagattgagggattaattgatcaaatgattgataagacaaaggtggagaaatctgaagccaaagctgcagagctggaaaagaagttggactcagagttaacagcccgacatgagctacaggtggaaatgaaaaagatggaaagtgactttgagcagaagcttcaagatcttcagggagaaaaagatgcactgcattctgaaaagcagcaaattgccacagagaaacaggacctggaagcagaggtgtcccagctcacaggagaggttgccaagctgacaaaggaactggaagatgccaagaaagaaatggcttccctctctgcggcagctattactgtacctccttctgttcctagtcgtgctcctgttccccctgcccctcctttacctggtgactctggcactattattccaccaccacctgctcctggggatagtaccactcctcctcctcctcctcctcctcctcctcctccacctcctttgcctgggggtgtttgcatctcctcacccccttctttacctggaggtactgctatctctccaccccctcctttgtctggggatgctaccatccctccaccccctcctttgcctgagggtgttggcatcccttcaccctcttctttgcctggaggtactgccatccccccacctcctcctttgcctgggagtgctagaatccccccaccaccacctcctttgcctgggagtgctggaattccccccccacctcctcccttgcctggagaagcaggaatgccacctcctcctccccctcttcctggtggtcctggaatccctccacctcctccatttcccggaggccctggcattcctccacctccacccggaatgggtatgcctccacctcccccatttggatttggagttcctgcagccccagttctgccatttggattaacccccaaaaagctttataagccagaggtgcagctccggaggccaaactggtccaagcttgtggctgaggacctctcccaggactgcttctggacaaaggtgaaggaggaccgctttgagaacaatgaacttttcgccaaacttacccttaccttctctgcccagaccaagaccctgctagccaagaaggatcaagaaggtggagaagaaaagaaatctgtgcaaaagaaaaaagtaaaagagttaaaggtgttggattcaaagacagcccagaatctctcaatctttttgggttccttccgcatgccctatcaagagattaagaatgtcatcctggaggtgaatgaggctgttctgactgagtctatgatccagaacctcattaagcaaatgccagagccagagcagttaaaaatgctttctgaactgaaggatgaatatgatgacctggctgagtcagagcagtttggcgtggtgatgggcactgtgccccgactgcggcctcgcctcaatgccattctcttcaagctacaattcagcgagcaagtggagaatatcaagccagagattgtgtctgtcactgctgcatgtgaggagttacgtaagagtgagagcttttccaatctcctagagattaccttgcttgttggaaattacatgaatgctggctccagaaatgctggtgcttttggcttcaatatcagcttcctctgtaagcttcgagacaccaagtccacagatcagaagatgacgttgttacacttcttggctgagttgtgtgagaatgactatcccgatgtcctcaagtttccagacgagcttgcccatgtggagaaagccagccgagtttctgctgaaaacttgcaaaagaacctagatcagatgaagaaacaaatttctgatgtggaacgtgatgttcagaatttcccagctgccacagatgaaaaagacaagtttgttgaaaaaatgaccagctttgtgaaggatgcacaggaacagtataacaagctgcggatgatgcattctaacatggagaccctctataaggagctgggcgagtacttcctctttgaccccaagaagttgtctgttgaagaatttttcatggatcttcacaattttcggaatatgtttttgcaagcagtcaaggagaaccagaagcggcgggagacagaagaaaagatgaggcgagcaaaactagccaaggagaaggcagagaaggagcggctagagaagcagcagaagagagagcaactcatagacatgaatgcagagggcgatgagacaggtgtgatggacagtcttctagaagccctgcagtcaggggcagcattccgacggaagagagggccccgtcaagccaacaggaaggccgggtgtgcagtcacatctctgctagcttcggagctgaccaaggatgatgccatggctgctgttcctgccaaggtgtccaagaacagtgagacattccccacaatccttgaggaagccaaggagttggttggccgtgcaagctaatgtgggtcctgtgaccgcggcagctcctcagcggagccgcagactgtcctgccctgcagcatgtgcctaaaggctcaaggggatattcctctggggtggccactcccaccaccctgaccctgtctttctctctggcctgctgctctctcaacatcacatacagcttcagctgcctggaggccagaaggaaagggcagtgcaggggaggcctgagcccgacttagccagccctggctgttgtattaccaaagcagggtccatgtttgctgccttaaccctgtctcctctctgttactcagagggcctcatctcagacaaggcccagcctgctttttctcagccctgactttctaatgggctttcccccctaggtcagtcttgctggatttgtgcttttcttttgtggtttctctggccctgagaatagcatggggcttgtaaacctttgggctagatccctcctttcattgctgttgtctctgctcttccctctcctggctgtggttatttattattagtggtgtggcactgggagctgctcctaaggaagcagggagcaaatcccacctttaccccaccttcctgggaaaggcctccaaagcaaaggatctggaccagtttccctgctgtgctgtggcccaggccagagcctgtgggcaggcaggcagggcatagcgacagtgtgggacctgcccccagcttctgccacgctttatgcccttgcctctctggacgctctgcaccaaccccaggctactgagccaccttccctcctcatgccttccctgagctttggtgcatctcatctggactatgggttgtactgtgaccatcccaacacctcaccctctgtctacaaggaaatgggaggtggagcctcctggctgagaaattgttttgcaaatggatctatttttgtatgaaaaaaaaaatttttttaaagaaaactgttccttccccctttcccctccataatgtaagaagctttggtggcaggttacagagttctgggatttcttctcacaggcccaatcctgaatgtgcccctggaccttctggacccttgagtccaaggcagatcctctctcccagggaatccgacacaggaggaaccccttctctggttgagctgggccaggcctaagagtagcaggaactctaagaccacagagttttttataaatgtataaatgtatcaagccaaatgtgcagatgctaactggacattctggggaactgggcaccaggagtgccttcatacactgtaccccagctctcttctaaaagagaagtgggtgggcacactgaactgtttggtggccccaaccacaggaagctgcaattctctggcttagggtgatacttttgccctccttgtgcccctctcagctttccatccccagctaggaagaaagaatggcactcttgggcttggcccagaattagagttattagagcaagagagagcttaggaagcatgagggcaactatagtgaggccttattgccaggagggagggttttggttgctggcgcttgtgtataaaggggcaagagcagctcctttggactattcctgggaggactctgatgcagggcgtctgttgctcccctgggtcacctcctccctgctcgctgacatctggggctttgaccctttcttttttaatctacttttgctaagatgcatttaataaaaaaaaagagagagagagagaggtgtgagggacaaaatgcaaacctatttcccttgcctcataggcttctgggatgtcatcacctccagtttgttggttttgtttccaactgttaataaagcattgaaacagt

SEQ ID NO: 126695 - DNA, 5789 bp, Homo sapiens
  Payload ID: 4841
  Gene Symbol: DIAPH1
  Gene Name: diaphanous-related formin 1
  ENST ID: ENST00000398557
  CDS Start-End: 142-3960
attcatgaggcgcgcgcagcccggcatgctaatgaggcggggcgcggcggctggctaaagagcgactgggcggcggcgggcgcggagctgccaggcgggagcggcgtaggcgcggggtcgccggccagcgtgaaccgggacatggagccgcccggcgggagcctggggcccggccgcgggacccgggacaagaagaagggccggagcccagatgagctgccctcggcgggcggcgacggcggcaaatctaagaaatttactctgaagcggctcatggcagatgagctggagagatttaccagcatgagaattaagaaggagaaggaaaagcccaattctgctcatagaaattcttctgcatcatatggggatgatcccacagcacagtcattgcaagatgtttcagatgaacaagtgctggttctctttgaacagatgctgctggatatgaacctgaatgaggagaaacagcaacctttgagggagaaggacatcatcatcaagagggagatggtgtcccaatacttgtacacctccaaggctggcatgagccagaaggagagctctaagtctgccatgatgtatattcaggagttgaggtcaggcttgcgggatatgcctctgctcagctgcctggagtcccttcgtgtgtctctcaacaacaaccctgtcagttgggtgcaaacatttggtgctgaaggcttggcctccttattggacattcttaaacgacttcatgatgagaaagaagagactgctgggagttacgatagccggaacaagcatgagatcattcgctgcttgaaagcttttatgaacaacaagtttggaatcaagaccatgttggagacagaagaaggaatcctactgctggtcagagccatggatcctgctgttcccaacatgatgattgatgcagctaagctgctttctgctctttgtattctaccgcagccagaggacatgaatgaaagggttttggaggcaatgacagaaagagctgagatggatgaagtggaacgtttccagccgctgctggatggattaaaaagtggaaccactattgcactgaaggttggatgcctacagctgatcaatgctctcatcacaccagcggaggaacttgacttccgagttcacatcagaagtgaactgatgcgtttggggctacatcaggtgttgcaggaccttcgagagattgaaaatgaagatatgagagtgcaactaaatgtgtttgatgaacaaggggaagaggattcctatgacctgaagggacggctggatgacattcgcatggagatggatgactttaatgaagtctttcagattctcttaaacacagtgaaggattcaaaggcagagccacacttcctttccatcctgcagcacttactcttggtccgaaatgactatgaggccagacctcagtactataagttgattgaagaatgtatttcccagatagttctgcacaagaacggggctgatcctgacttcaagtgccggcacctccagattgagattgagggattaattgatcaaatgattgataagacaaaggtggagaaatctgaagccaaagctgcagagctggaaaagaagttggactcagagttaacagcccgacatgagctacaggtggaaatgaaaaagatggaaagtgactttgagcagaagcttcaagatcttcagggagaaaaagatgcactgcattctgaaaagcagcaaattgccacagagaaacaggacctggaagcagaggtgtcccagctcacaggagaggttgccaagctgacaaaggaactggaagatgccaagaaagaaatggcttccctctctgcggcagctattactgtacctccttctgttcctagtcgtgctcctgttccccctgcccctcctttacctggtgactctggcactattattccaccaccacctgctcctggggatagtaccactcctcctcctcctcctcctcctcctcctcctccacctcctttgcctgggggtgtttgcatctcctcacccccttctttacctggaggtactgctatctctccaccccctcctttgtctggggatgctaccatccctccaccccctcctttgcctgagggtgttggcatcccttcaccctcttctttgcctggaggtactgccatccccccacctcctcctttgcctgggagtgctagaatccccccaccaccacctcctttgcctgggagtgctggaattccccccccacctcctcccttgcctggagaagcaggaatgccacctcctcctccccctcttcctggtggtcctggaatccctccacctcctccatttcccggaggccctggcattcctccacctccacccggaatgggtatgcctccacctcccccatttggatttggagttcctgcagccccagttctgccatttggattaacccccaaaaagctttataagccagaggtgcagctccggaggccaaactggtccaagcttgtggctgaggacctctcccaggactgcttctggacaaaggtgaaggaggaccgctttgagaacaatgaacttttcgccaaacttacccttaccttctctgcccagaccaagaccctgctagccaagaaggatcaagaaggtggagaagaaaagaaatctgtgcaaaagaaaaaagtaaaagagttaaaggtgttggattcaaagacagcccagaatctctcaatctttttgggttccttccgcatgccctatcaagagattaagaatgtcatcctggaggtgaatgaggctgttctgactgagtctatgatccagaacctcattaagcaaatgccagagccagagcagttaaaaatgctttctgaactgaaggatgaatatgatgacctggctgagtcagagcagtttggcgtggtgatgggcactgtgccccgactgcggcctcgcctcaatgccattctcttcaagctacaattcagcgagcaagtggagaatatcaagccagagattgtgtctgtcactgctgcatgtgaggagttacgtaagagtgagagcttttccaatctcctagagattaccttgcttgttggaaattacatgaatgctggctccagaaatgctggtgcttttggcttcaatatcagcttcctctgtaagcttcgagacaccaagtccacagatcagaagatgacgttgttacacttcttggctgagttgtgtgagaatgactatcccgatgtcctcaagtttccagacgagcttgcccatgtggagaaagccagccgagtttctgctgaaaacttgcaaaagaacctagatcagatgaagaaacaaatttctgatgtggaacgtgatgttcagaatttcccagctgccacagatgaaaaagacaagtttgttgaaaaaatgaccagctttgtgaaggatgcacaggaacagtataacaagctgcggatgatgcattctaacatggagaccctctataaggagctgggcgagtacttcctctttgaccccaagaagttgtctgttgaagaatttttcatggatcttcacaattttcggaatatgtttttgcaagcagtcaaggagaaccagaagcggcgggagacagaagaaaagatgaggcgagcaaaactagccaaggagaaggcagagaaggagcggctagagaagcagcagaagagagagcaactcatagacatgaatgcagagggcgatgagacaggtgtgatggacagtcttctagaagccctgcagtcaggggcagcattccgacggaagagagggccccgtcaagccaacaggaaggccgggtgtgcagtcacatctctgctagcttcggagctgaccaaggatgatgccatggctgctgttcctgccaaggtgtccaagaacagtgagacattccccacaatccttgaggaagccaaggagttggttggccgtgcaagctaatgtgggtcctgtgaccgcggcagctcctcagcggagccgcagactgtcctgccctgcagcatgtgcctaaaggctcaaggggatattcctctggggtggccactcccaccaccctgaccctgtctttctctctggcctgctgctctctcaacatcacatacagcttcagctgcctggaggccagaaggaaagggcagtgcaggggaggcctgagcccgacttagccagccctggctgttgtattaccaaagcagggtccatgtttgctgccttaaccctgtctcctctctgttactcagagggcctcatctcagacaaggcccagcctgctttttctcagccctgactttctaatgggctttcccccctaggtcagtcttgctggatttgtgcttttcttttgtggtttctctggccctgagaatagcatggggcttgtaaacctttgggctagatccctcctttcattgctgttgtctctgctcttccctctcctggctgtggttatttattattagtggtgtggcactgggagctgctcctaaggaagcagggagcaaatcccacctttaccccaccttcctgggaaaggcctccaaagcaaaggatctggaccagtttccctgctgtgctgtggcccaggccagagcctgtgggcaggcaggcagggcatagcgacagtgtgggacctgcccccagcttctgccacgctttatgcccttgcctctctggacgctctgcaccaaccccaggctactgagccaccttccctcctcatgccttccctgagctttggtgcatctcatctggactatgggttgtactgtgaccatcccaacacctcaccctctgtctacaaggaaatgggaggtggagcctcctggctgagaaattgttttgcaaatggatctatttttgtatgaaaaaaaaaatttttttaaagaaaactgttccttccccctttcccctccataatgtaagaagctttggtggcaggttacagagttctgggatttcttctcacaggcccaatcctgaatgtgcccctggaccttctggacccttgagtccaaggcagatcctctctcccagggaatccgacacaggaggaaccccttctctggttgagctgggccaggcctaagagtagcaggaactctaagaccacagagttttttataaatgtataaatgtatcaagccaaatgtgcagatgctaactggacattctggggaactgggcaccaggagtgccttcatacactgtaccccagctctcttctaaaagagaagtgggtgggcacactgaactgtttggtggccccaaccacaggaagctgcaattctctggcttagggtgatacttttgccctccttgtgcccctctcagctttccatccccagctaggaagaaagaatggcactcttgggcttggcccagaattagagttattagagcaagagagagcttaggaagcatgagggcaactatagtgaggccttattgccaggagggagggttttggttgctggcgcttgtgtataaaggggcaagagcagctcctttggactattcctgggaggactctgatgcagggcgtctgttgctcccctgggtcacctcctccctgctcgctgacatctggggctttgaccctttcttttttaatctacttttgctaagatgcatttaataaaaaaaaagagagagagagagaggtgtgagggacaaaatgcaaacctatttcccttgcctcataggcttctgggatgtcatcacctccagtttgttggttttgtttccaactgttaataaagcattgaaacagt

SEQ ID NO: 126696 - DNA, 2102 bp, Homo sapiens
  Payload ID: 4841
  Gene Symbol: DIAPH1
  Gene Name: diaphanous-related formin 1
  ENST ID: ENST00000448451
  CDS Start-End: 1-289
gcgggagacagaagaaaagatgaggcgagcaaaactagccaaggagaaggcagagaaggagcggctagagaagcagcagaagagagagcaactcatagacatgaatgcagagggcgatgagacaggtgtgatggacagtcttctagaagccctgcagtcaggggcagcattccgacggaagagagggccccgtcaagacaacctcttgtgcccctgggaagtagaggaggaggaggagacctttaaattgccaacaggaaggccgggtgtgcagtcacatctctgctagcttcggagctgaccaaggatgatgccatggctgctgttcctgccaaggtgtccaagaacagtgagacattccccacaatccttgaggaagccaaggagttggttggccgtgcaagctaatgtgggtcctgtgaccgcggcagctcctcagcggagccgcagactgtcctgccctgcagcatgtgcctaaaggctcaaggggatattcctctggggtggccactcccaccaccctgaccctgtctttctctctggcctgctgctctctcaacatcacatacagcttcagctgcctggaggccagaaggaaagggcagtgcaggggaggcctgagcccgacttagccagccctggctgttgtattaccaaagcagggtccatgtttgctgccttaaccctgtctcctctctgttactcagagggcctcatctcagacaaggcccagcctgctttttctcagccctgactttctaatgggctttcccccctaggtcagtcttgctggatttgtgcttttcttttgtggtttctctggccctgagaatagcatggggcttgtaaacctttgggctagatccctcctttcattgctgttgtctctgctcttccctctcctggctgtggttatttattattagtggtgtggcactgggagctgctcctaaggaagcagggagcaaatcccacctttaccccaccttcctgggaaaggcctccaaagcaaaggatctggaccagtttccctgctgtgctgtggcccaggccagagcctgtgggcaggcaggcagggcatagcgacagtgtgggacctgcccccagcttctgccacgctttatgcccttgcctctctggacgctctgcaccaaccccaggctactgagccaccttccctcctcatgccttccctgagctttggtgcatctcatctggactatgggttgtactgtgaccatcccaacacctcaccctctgtctacaaggaaatgggaggtggagcctcctggctgagaaattgttttgcaaatggatctatttttgtatgaaaaaaaaaatttttttaaagaaaactgttccttccccctttcccctccataatgtaagaagctttggtggcaggttacagagttctgggatttcttctcacaggcccaatcctgaatgtgcccctggaccttctggacccttgagtccaaggcagatcctctctcccagggaatccgacacaggaggaaccccttctctggttgagctgggccaggcctaagagtagcaggaactctaagaccacagagttttttataaatgtataaatgtatcaagccaaatgtgcagatgctaactggacattctggggaactgggcaccaggagtgccttcatacactgtaccccagctctcttctaaaagagaagtgggtgggcacactgaactgtttggtggccccaaccacaggaagctgcaattctctggcttagggtgatacttttgccctccttgtgcccctctcagctttccatccccagctaggaagaaagaatggcactcttgggcttggcccagaattagagttattagagcaagagagagcttaggaagcatgagggcaactatagtgaggccttattgccaggagggagggttttggttgctggcgcttgtgtataaaggggcaagagcagctcctttggactattcctgggaggactctgatgcagggcgtctgttgctcccctgggtcacctcctccctgctcgctgacatctggggctttgaccctttcttttttaatctacttttgctaagatgcatttaat

SEQ ID NO: 126697 - DNA, 1180 bp, Homo sapiens
  Payload ID: 4841
  Gene Symbol: DIAPH1
  Gene Name: diaphanous-related formin 1
  ENST ID: ENST00000523100
  CDS Start-End: 86-691
aaagagcgactgggcggcggcgggcgcggagctgccaggcgggagcggcgtaggcgcggggtcgccggccagcgtgaaccgggacatggagccgcccggcgggagcctggggcccggccgcgggacccgggacaagaagaagggccggagcccagatgagctgccctcggcgggcggcgacggcggcaaatctaagaaatttactctgaagcggctcatggcagatgagctggagagatttaccagcatgagaattaagaaggagaaggaaaagcccaattctgctcatagaaattcttctgcatcatatggggatgatcccacagcacagtcattgcaagatgtttcagatgaacaagtgctggttctctttgaacagatgctgctggatatgaacctgaatgaggagaaacagcaacctttgagggagaaggacatcatcatcaagagggagatggtgtcccaatacttgtacacctccaaggctggcatgagccagaaggagagctctaagtctgccatgatgtatattcaggagttgaggtcaggcttgcgggatatgcctctgctcagctgcctggagtcccttcgtgtgtctctcaacaacaaccctgtcagttgggtgcaaacatttggtgctgaaggcttggcctccttattggacattcttaaacgacttcatgatgattgatgcagctaagctgctttctgctctttgtattctaccgcagccagaggacatgaatgaaagggttttggaggcaatgacagaaagagctgagatggatgaagtggaacgtttccagccgctgctggatggattaaaaagtggaaccactattgcactgaaggttggatgcctacagctgatcaatgctctcatcacaccagcggaggaacttgacttccgagttcacatcagaagtgaactgatgcgtttggggctacatcaggtgttgcaggaccttcgagagattgaaaatgaagatatgagagtgcaactaaatgtgtttgatgaacaaggggaagaggattcctatgacctgaagggacggctggatgacattcgcatggagatggatgactttaatgaagtctttcagattctcttaaacacagtgaaggattcaaaggcagagccacacttcctttccatcctgcagcacttactcttggtccg

SEQ ID NO: 126698 - DNA, 4668 bp, Homo sapiens
  Payload ID: 4841
  Gene Symbol: DIAPH1
  Gene Name: diaphanous-related formin 1
  Uniprot ID: O60610
  ENST ID: ENST00000518047
  CDS Start-End: 1-3792
atggagccgcccggcgggagcctggggcccggccgcgggacccgggacaagaagaagggccggagcccagatgagctgccctcggcgggcggcgacggcggcaaatctaagaaatttctggagagatttaccagcatgagaattaagaaggagaaggaaaagcccaattctgctcatagaaattcttctgcatcatatggggatgatcccacagcacagtcattgcaagatgtttcagatgaacaagtgctggttctctttgaacagatgctgctggatatgaacctgaatgaggagaaacagcaacctttgagggagaaggacatcatcatcaagagggagatggtgtcccaatacttgtacacctccaaggctggcatgagccagaaggagagctctaagtctgccatgatgtatattcaggagttgaggtcaggcttgcgggatatgcctctgctcagctgcctggagtcccttcgtgtgtctctcaacaacaaccctgtcagttgggtgcaaacatttggtgctgaaggcttggcctccttattggacattcttaaacgacttcatgatgagaaagaagagactgctgggagttacgatagccggaacaagcatgagatcattcgctgcttgaaagcttttatgaacaacaagtttggaatcaagaccatgttggagacagaagaaggaatcctactgctggtcagagccatggatcctgctgttcccaacatgatgattgatgcagctaagctgctttctgctctttgtattctaccgcagccagaggacatgaatgaaagggttttggaggcaatgacagaaagagctgagatggatgaagtggaacgtttccagccgctgctggatggattaaaaagtggaaccactattgcactgaaggttggatgcctacagctgatcaatgctctcatcacaccagcggaggaacttgacttccgagttcacatcagaagtgaactgatgcgtttggggctacatcaggtgttgcaggaccttcgagagattgaaaatgaagatatgagagtgcaactaaatgtgtttgatgaacaaggggaagaggattcctatgacctgaagggacggctggatgacattcgcatggagatggatgactttaatgaagtctttcagattctcttaaacacagtgaaggattcaaaggcagagccacacttcctttccatcctgcagcacttactcttggtccgaaatgactatgaggccagacctcagtactataagttgattgaagaatgtatttcccagatagttctgcacaagaacggggctgatcctgacttcaagtgccggcacctccagattgagattgagggattaattgatcaaatgattgataagacaaaggtggagaaatctgaagccaaagctgcagagctggaaaagaagttggactcagagttaacagcccgacatgagctacaggtggaaatgaaaaagatggaaagtgactttgagcagaagcttcaagatcttcagggagaaaaagatgcactgcattctgaaaagcagcaaattgccacagagaaacaggacctggaagcagaggtgtcccagctcacaggagaggttgccaagctgacaaaggaactggaagatgccaagaaagaaatggcttccctctctgcggcagctattactgtacctccttctgttcctagtcgtgctcctgttccccctgcccctcctttacctggtgactctggcactattattccaccaccacctgctcctggggatagtaccactcctcctcctcctcctcctcctcctcctcctccacctcctttgcctgggggtgtttgcatctcctcacccccttctttacctggaggtactgctatctctccaccccctcctttgtctggggatgctaccatccctccaccccctcctttgcctgagggtgttggcatcccttcaccctcttctttgcctggaggtactgccatccccccacctcctcctttgcctgggagtgctagaatccccccaccaccacctcctttgcctgggagtgctggaattccccccccacctcctcccttgcctggagaagcaggaatgccacctcctcctccccctcttcctggtggtcctggaatccctccacctcctccatttcccggaggccctggcattcctccacctccacccggaatgggtatgcctccacctcccccatttggatttggagttcctgcagccccagttctgccatttggattaacccccaaaaagctttataagccagaggtgcagctccggaggccaaactggtccaagcttgtggctgaggacctctcccaggactgcttctggacaaaggtgaaggaggaccgctttgagaacaatgaacttttcgccaaacttacccttaccttctctgcccagaccaagacttccaaagccaagaaggatcaagaaggtggagaagaaaagaaatctgtgcaaaagaaaaaagtaaaagagttaaaggtgttggattcaaagacagcccagaatctctcaatctttttgggttccttccgcatgccctatcaagagattaagaatgtcatcctggaggtgaatgaggctgttctgactgagtctatgatccagaacctcattaagcaaatgccagagccagagcagttaaaaatgctttctgaactgaaggatgaatatgatgacctggctgagtcagagcagtttggcgtggtgatgggcactgtgccccgactgcggcctcgcctcaatgccattctcttcaagctacaattcagcgagcaagtggagaatatcaagccagagattgtgtctgtcactgctgcatgtgaggagttacgtaagagtgagagcttttccaatctcctagagattaccttgcttgttggaaattacatgaatgctggctccagaaatgctggtgcttttggcttcaatatcagcttcctctgtaagcttcgagacaccaagtccacagatcagaagatgacgttgttacacttcttggctgagttgtgtgagaatgactatcccgatgtcctcaagtttccagacgagcttgcccatgtggagaaagccagccgagtttctgctgaaaacttgcaaaagaacctagatcagatgaagaaacaaatttctgatgtggaacgtgatgttcagaatttcccagctgccacagatgaaaaagacaagtttgttgaaaaaatgaccagctttgtgaaggatgcacaggaacagtataacaagctgcggatgatgcattctaacatggagaccctctataaggagctgggcgagtacttcctctttgaccccaagaagttgtctgttgaagaatttttcatggatcttcacaattttcggaatatgtttttgcaagcagtcaaggagaaccagaagcggcgggagacagaagaaaagatgaggcgagcaaaactagccaaggagaaggcagagaaggagcggctagagaagcagcagaagagagagcaactcatagacatgaatgcagagggcgatgagacaggtgtgatggacagtcttctagaagccctgcagtcaggggcagcattccgacggaagagagggccccgtcaagccaacaggaaggccgggtgtgcagtcacatctctgctagcttcggagctgaccaaggatgatgccatggctgctgttcctgccaaggtgtccaagaacagtgagacattccccacaatccttgaggaagccaaggagttggttggccgtgcaagctaatgtgggtcctgtgaccgcggcagctcctcagcggagccgcagactgtcctgccctgcagcatgtgcctaaaggctcaaggggatattcctctggggtggccactcccaccaccctgaccctgtctttctctctggcctgctgctctctcaacatcacatacagcttcagctgcctggaggccagaaggaaagggcagtgcaggggaggcctgagcccgacttagccagccctggctgttgtattaccaaagcagggtccatgtttgctgccttaaccctgtctcctctctgttactcagagggcctcatctcagacaaggcccagcctgctttttctcagccctgactttctaatgggctttcccccctaggtcagtcttgctggatttgtgcttttcttttgtggtttctctggccctgagaatagcatggggcttgtaaacctttgggctagatccctcctttcattgctgttgtctctgctcttccctctcctggctgtggttatttattattagtggtgtggcactgggagctgctcctaaggaagcagggagcaaatcccacctttaccccaccttcctgggaaaggcctccaaagcaaaggatctggaccagtttccctgctgtgctgtggcccaggccagagcctgtgggcaggcaggcagggcatagcgacagtgtgggacctgcccccagcttctgccacgctttatgcccttgcctctctggacgctctgcaccaaccccaggctactgagccaccttccctcctcatgccttccctgagctttggtgcatctcatctggactatgggttgtactgtgaccatcccaacacctcaccctctgtctacaaggaaatgggaggtggag

SEQ ID NO: 126699 - DNA, 561 bp, Homo sapiens
  Payload ID: 4841
  Gene Symbol: DIAPH1
  Gene Name: diaphanous-related formin 1
  ENST ID: ENST00000524301
  CDS Start-End: 225-561
agaaatggcaggggagatcaagaacaatgtttcttctagtttaaagaggtttgaaatcttaatactttggtcctcttatctttgaacatagatgagagtacagagtcagtatggtaagttagataggaggaagactgatttcttcttttcatgtcagaagagtcttgaactgcttgtgaaccagaggaaccatgcctgtgtaagagctggagagatttaccagcatgagaattaagaaggagaaggaaaagcccaattctgctcatagaaattcttctgcatcatatggggatgatcccacagcacagtcattgcaagatgtttcagatgaacaagtgctggttctctttgaacagatgctgctggatatgaacctgaatgaggagaaacagcaacctttgagggagaaggacatcatcatcaagagggagatggtgtcccaatacttgtacacctccaaggctggcatgagccagaaggagagctctaagtctgccatgatgtatattcaggagttgaggtcaggcttgcgggatatgcctctgctcagctgcctggagt

SEQ ID NO: 126700 - DNA, 9333 bp, Homo sapiens
  Payload ID: 4842
  Gene Symbol: DIAPH2
  Gene Name: diaphanous-related formin 2
  Uniprot ID: O60879
  ENST ID: ENST00000324765
  CDS Start-End: 348-3653
gggcactttgaagaatcacgtgtgttgaggccctcttaaagagataggcacctacttttccctccaccctaaacaccgccctgagggcggcggcgaccgtggtaattgcaactgctcaggggcagggcttgccccagcgccgagtagtggcaacggcgtggttgcgtcgggggtgcctgggagcctggagtcccgggggcctgaaatcggcagcttcccgggcagacactctctccctcaggaagaggtgccgccgagtcagcgcggggcagtgtgagcgccccgaggtgctttctcagttgaggagaggtggggttacagggcacaggtgacagggccggagaaagatggagcagcccggggcggcggcgtcgggagcgggaggcggcagcgaggaacccggtgggggccggagcaacaagcggagcgcggggaaccgggccgccaatgaagaggaaacgaaaaacaaacccaaattgaacattcaaataaaaactttggcagatgatgtgcgtgaccgaattacaagttttagaaaatctactgtcaaaaaagaaaaacctcttattcaacatcctattgattctcaagtcgcgatgagtgagtttcctgcagctcagccattatatgatgaacgatctttgaatttgtcagaaaaggaagtattggatctctttgaaaaaatgatggaggacatgaaccttaacgaagagaaaaaagctcctttacgaaacaaagactttaccaccaaacgtgagatggttgtccagtatatttctgccactgccaaatctggtgggctgaaaaacagcaaacatgaatgcaccctgtcttcacaagaatatgttcatgaattacgatcgggtatatcagatgagaaacttcttaattgcctagaatccctcagggtttctttaaccagcaatccggtcagctgggttaacaactttggccatgaaggtcttggactcttattggatgagctggaaaagcttctggacaaaaaacagcaagaaaatattgacaagaagaatcagtataaacttattcaatgcctcaaagcatttatgaataataagtttggattacaaaggattctaggagatgaaagaagtcttttactattggcaagagcaattgaccccaaacaacccaacatgatgactgaaatagtaaaaatactttctgctatttgcattgttggagaagagaacattctagataaacttttaggggctataacaacagcagcagaaagaaataacagggaacgattttcaccaattgtggaaggtttagaaaatcaggaagccttgcaattacaggtggcctgcatgcagtttataaatgcccttgtcacttctccttatgagcttgattttcgaatacatttaaggaatgaattcctccgttcaggactaaaaacaatgttaccagatctaaaagaaaaagagaatgatgagcttgatattcagttgaaagtatttgatgaaaacaaagaagatgacctaactgaattatcacaccgtctcaatgacattcgagcagaaatggatgatatgaatgaagtctaccatcttctatataatatgctgaaggacactgctgctgaaaattacttcttatctattctacaacattttttgcttatcagaaatgattattatatcaggccacaatattataaaataattgaggaatgtgtttcacagatagtgctacactgcagtggtatggatccagacttcaaatacaggcaaagattagacatcgatttaactcatctgatagattcttgtgtgaacaaggcgaaagttgaagaaagtgaacaaaaagctgcagagttttcaaagaagttcgatgaagaattcacagctcgacaggaagctcaagcagagcttcaaaaaagagatgagaaaatcaaagaacttgaagcagaaatccagcaacttcgaacccaggcacaagtactctcaagttcatcaggaattccaggtcctcctgcagcacctccattgccaggtgtagggccgcctccaccaccacccgcgccacctctacccggaggagctcctcttcctcctccaccacctcctttacctggaatgatggggataccaccaccacccccaccaccacttttatttgggggacctcctccaccaccaccccttggaggagttcctcctcccccaggaatatcacttaatctaccttatggaatgaagcagaaaaaaatgtataaacctgaagtgtccatgaagagaatcaattggtcaaagattgaacccacagaattatctgagaactgtttctggttaagagtcaaagaagacaagtttgagaatccagatctctttgccaaattggcattgaattttgctactcagataaaagttcaaaagaacgcagaagcattagaagaaaagaagactgggcctacaaagaagaaagtgaaagaactgagaattttggatcccaaaacagctcagaatctgtccatctttctgggatcatatcgcatgccatatgaagacataagaaacgttattctggaggttaatgaagacatgctgagtgaggctttaattcagaaccttgtgaaacatcttcctgagcagaagatactcaacgaattagcagagcttaagaatgaatatgatgacctctgtgagcctgaacaatttggagttgtgatgagctctgtgaaaatgttacagcctcgtctcagtagtatcctgttcaagctcacatttgaagaacacataaacaacatcaaaccaagcatcatagcagtaactcttgcctgtgaagaactgaagaaaagtgaaagctttaacagacttttagagttagttcttcttgttggaaactacatgaactcaggctcaagaaatgcccagtctttgggatttaagatcaacttcctttgtaagatcagagatactaaatcagcggatcaaaaaacaacccttttgcattttattgccgacatttgtgaggaaaaatatcgagatatcctaaaatttcctgaagaactggaacacgtagaaagtgcaagcaaagtttcagctcaaattctcaagagcaaccttgcatcaatggaacaacaaattgttcatctggaacgtgacatcaagaaattcccccaagcagaaaatcaacacgataagtttgtggaaaagatgaccagctttacaaagactgcccgagaacagtatgaaaaactctccaccatgcacaacaacatgatgaagctctatgagaatcttggagaatacttcatttttgactcaaagacagtgagcatagaagagttctttggtgatctcaacaacttccgaactttgtttttggaagcagtgagagaaaacaataagagaagagaaatggaagagaagaccaggagggcaaaacttgcaaaagagaaagctgaacaagaaaagttagaacgccagaagaaaaagaaacaactcattgatataaacaaagagggtgatgagactggtgtgatggataatcttctagaagccctacaatcaggtgcagcattcagagaccgtcgaaagcggattccaaggaatccagataacagacgagtacctttggaaaggtcacgctctcgccacaatggagctatctcatctaagtgattcctgatgccaaagaatatgaaaatatttaagtaaaaacaaaatgatgcattttgagaagaacaaagtgtgcactcagcggctggaaaggaaataagtgcatttctgcaaagatcaagataagctggatgaagtagtgtgcatttgtaatactattgcaagactcctcccacaattattctaatctgaacacagttatcaggattacaaaatgtgttccattttagtgtaaagatgtgtatcatttgtaattgtgtgtgacctgactgtgatgatggaagtgtaagaaattgaagagttctaaggctttcaaaaacactcagtcaaaaatttaaaatcttaaatgtgtaagtcacccccaccaaaaacaaaagagaagaaaaagaatagaaagaattatccagtgtcagcttccaatccctagtacatatataatagaaaagggccaagaaaaatatgcatcttgatttggagagaggctaatattatgcacactgtaagagaagccattttggaaattcacgaaagtactgctccaccccagttgagttatttagaattttatctcaagtgaaagctgatggattcatctgctttggctgaaattaaacttatcattagtctagctagcatttcagcatgatattgcaagcacttctcattgctaaaaataaataaaccaaagtttaaccgaatcagttagggaaagtgatttaaactttatttaaagaggtattttctaattatgcacagatatctactttatacaaatactttatatggctatttttgagaaaaccctcacattttaatgtttatgctagggatgaacctgaaaattctattacgtttatttagatttcaaaggcaaatattgattcctatgctctgtggtttatttcttttttctattgcttctttctcccttgagtcccttgaaggcagggaatagacttctagaaaacctgagaggaaaaagaattctttttacaggaggcagcagaaaactgtctgaaaggtcaattgttttatctccctttccactctctttccaatttcactttggtggtctgaagaagaaaaagaaattttatgtatgtatgtgtaaatatgtgtatatatttctatctcttgctacaataattccaactaagtgaacttctcaattatcatcatacttacttaccttatattaacaaattaagatgatgctgccaaaacaagtctagcagggaaaacaggttctacatttttcttaaataaattagggagtaaaagttatacttaacttgtctgtctattattttaaaatatgcattgaaataatgtggtataacttctctggagtgcaattttaagtctaattcatgcagatgattgattgtgattattgtaagaaatttcttacatgtatatttcttatgtagaaaatactgtttctactcattcaaagcacattgtagatattcagagagaagaacaaatggctggcttggcaaatccccatctgagataaagtaaacaagtgaccagcagcccacagatgattcctttatatagatgtataatgattcaaactgctgcctttgcctccagtgcatccttacttaggtattatacttctttaaaaagctctgaagctgctacaatagaaaaatcaaaaagggtaacagtatctgaaatttcacagtcctatccgatctgaaaacacacatacacaaatgcacacacatgcacacacacatttaagggacatagcagtaacactgttttttaacaacaacaaaagtttaggttctaatttatgtaaatacctagtatgtgtatttttgactttacaaagtctttcttttctgaaatcttcgtggtatggcttttttaattcttttgacagcttatcagtctgtaggagaatgatcttgaaatgttaaccctgactaaaatttgggagcatatgccttgctatattatcaagctggtcaaggtagaaatactgatatgtatcatcaccttttccagatacaaacttgccttattttctagtttgtgaacaagaacgaatgaagtactattattgataacttatatatttttatttagagcaatcccacatgcttttcacaaacattaaaaaaaaaaacctttcagggtctttcatgaagttccaatagttgagtgagttaaaaggtttgtttcccagatttgtaatggtcctgctctagccatttgcagttttgttttagatgattggaaagtatatcaccaaaaaaagtatatagtgacatttttagtatgaaaccaaattacactaaggtcttttgttggccatattactgccacacatgagaagcaccatttatgcagattttcttcagaatatttttaaaaggtacagaatccttaaaatattaacaactaattgcatccatcatctcctttggctgctgtaacaaattaccaccaataatatgatggcttaacacaacagaaacttatttgcttacatttttgaagggcagcaaagccatgctccctccagaggctctagaggagaatctttccttgccacgtccaccttttggtggctattggcattttttggcttatggccacatttctctttctgctgtgtcttcacatcaccctcctctgtatacctaatctgcctctgcctctgtttaataaggatccttatgatgacttttagggactacccagattactccaggataatctcctcacctcatgagtcttaacttaattacatctgcaaggcccccttctccaaataagataaattcatggttttggggattaggatgtggctatgtcttttaggaagccactcttagcccaccagagtctgccctttggcccaaaatttatgtctgtctcatgtgtaaaagacattcatcccatcctaacattaccaaaagtctcaacccattatatcaatcctaagtccaaaatttcattcaaatatcatcggttcaaaagttccaaagcttatcatttagatcatctaaatcaggtatgagtgaaactctgggtatggtctttcctgaggccaaattcctcttcctctgagaaccagtgaaacagaaaagttaatctgctttcaaattacaatggtgggaacaggcataggataacagttacagacatttctgtctcaaaaaggagagaatggaaattggaatggagtctcctgtcccaatcattttcaaaatctagccaggcaaatttctgttatatttcaaggcctggcagtaatcctctttctcagggctccaccctttgggcctgtagctcttctttcttggactatggattgggcctctgcctctgtgcctatgggttgcacttcttcctctgttcccacacttgggcctctgcctctgtacctgcagctctgctctcgggatggtgcttcctttatcttgaagggtggcacatgtttgcagctgagaagttttatcaacgggtttcctacctgtagaattctggcagtctcacaatcttctttcatttttttctgtctctgtcccttttaggcccagttggaagtgtttctgatggtagaacattctcaaaaatcttgtgggtcttctacgtatgtcacattgattcacacattcagaaaagagggtcctcacagatttttcctgaacaaccccatctctattcttggcttctgttgaaacagtcaaataaatccacaagttaatgcctaacctcttcagcactagccaaaggttgtcaagacacacccttgggcttatctacagagcacacttttctaacagtgaatctcctaattttagcatctttttttttttttacaatcattcagattgtgaattcaggctcagaatttacccagtcatcagatactgattccttttgtccacttatatagttattttctctttaaaaaaaaattttttttaatgtattagagatgaggtctcactctgtcacccaggctgcagtgtagtggtgcaaacatagctccctgtaacctcaaactcccaggctcaagggatcctcctgcatcagccttccaagtagctgggtctacaggtgcatgccaccatgcctggctaattttttgcatttttttgtagagacttgatcttgctatgttgtccaggctgctctcgaactcctagcctcaagcaatccacccatcttggcctcctaaagtgccggattacaggtgtaagccaccatgcccagcctgttttgtcaatgtatctgttttctgtcttattttactataagcactaagaagaaactaagctatatctctaacactagacttgaaaatttcctcagctaaacatccaagttcatcatttattcaacttttcacactactgtagtagacaatttagatagataaactttttgccactatatgacaaggattccctttcttccattttccaataaaatcttcatttccttctaaaccatcactagaaatgcctttaacattcatactactaccatctggtaaaggcaatctagttttttctatcacagccaccaaaattcttctagtctctacccattatccaattccaaagcctttttcacattttaagacatttgttacagaagtacccaatccgtcccagttccacaatctgcattagattcccatggctgctgtaacaaattaccctctagcccagtggcttaaaacaatagaaatttattatcttgttgttttggaggccaaaagtccaaaattgaggggttggcagggctgaacgtcttctggagactctaagggaaacactcttcccgtgtcttccagtttcttgtggctgccatcattccttggtttgtgactgcatctccctctcctctgtcttcacatcacttcccctctgtatatataatctacctctgcctctctcttataaggacacttgtgacgggacttagggcccatccagattacccatgataattcccttattccaagattcttaattatatctgaaaggaccttttttccaaataaggtactatcacaggttccagggagtaggatattgaatatcttttttggggagggggcaccatgcagctcactacactattcattgcacacaaatgaatttttcactttttaagatgcattcttggtgctcaaaccagatcgaagtttgtctctaaaagctattgtctgcacaggctgctgcatgctctgttgttaaatggatggacaggctattctaaattttggttgatacttttgctactatgggcaattaacttgaaaaaaataatcgatcccaactctgtgctctgatgtacctcttctgccccttttatgacacctttgaccaaatgccttctatggttcacagtgcaggcacaaaactacctctgatacagaagggttctttacaagcttattttacataccgtgaatccctcacctaaagggagaggtgaaagcaaagactgctttgaatgggtattgagggagattgtgtccataccaagccaccctgaagaagtatttcacttgcagtagaactgtggatttgtgctgtcatttcaccttggaataaacacctatctctaagcaggaccaagaatgacttgcaatctatatgtaatggctacttacttattcaataaagttaagatatacgttaaa

SEQ ID NO: 126701 - DNA, 3782 bp, Homo sapiens
  Payload ID: 4842
  Gene Symbol: DIAPH2
  Gene Name: diaphanous-related formin 2
  ENST ID: ENST00000355827
  CDS Start-End: 397-3687
ctcggctgcgggagtaggaagcagctttgcgcgcccgggcggccgatgcgggcactttgaagaatcacgtgtgttgaggccctcttaaagagataggcacctacttttccctccaccctaaacaccgccctgagggcggcggcgaccgtggtaattgcaactgctcaggggcagggcttgccccagcgccgagtagtggcaacggcgtggttgcgtcgggggtgcctgggagcctggagtcccgggggcctgaaatcggcagcttcccgggcagacactctctccctcaggaagaggtgccgccgagtcagcgcggggcagtgtgagcgccccgaggtgctttctcagttgaggagaggtggggttacagggcacaggtgacagggccggagaaagatggagcagcccggggcggcggcgtcgggagcgggaggcggcagcgaggaacccggtgggggccggagcaacaagcggagcgcggggaaccgggccgccaatgaagaggaaacgaaaaacaaacccaaattgaacattcaaataaaaactttggcagatgatgtgcgtgaccgaattacaagttttagaaaatctactgtcaaaaaagaaaaacctcttattcaacatcctattgattctcaagtcgcgatgagtgagtttcctgcagctcagccattatatgatgaacgatctttgaatttgtcagaaaaggaagtattggatctctttgaaaaaatgatggaggacatgaaccttaacgaagagaaaaaagctcctttacgaaacaaagactttaccaccaaacgtgagatggttgtccagtatatttctgccactgccaaatctggtgggctgaaaaacagcaaacatgaatgcaccctgtcttcacaagaatatgttcatgaattacgatcgggtatatcagatgagaaacttcttaattgcctagaatccctcagggtttctttaaccagcaatccggtcagctgggttaacaactttggccatgaaggtcttggactcttattggatgagctggaaaagcttctggacaaaaaacagcaagaaaatattgacaagaagaatcagtataaacttattcaatgcctcaaagcatttatgaataataagtttggattacaaaggattctaggagatgaaagaagtcttttactattggcaagagcaattgaccccaaacaacccaacatgatgactgaaatagtaaaaatactttctgctatttgcattgttggagaagagaacattctagataaacttttaggggctataacaacagcagcagaaagaaataacagggaacgattttcaccaattgtggaaggtttagaaaatcaggaagccttgcaattacaggtggcctgcatgcagtttataaatgcccttgtcacttctccttatgagcttgattttcgaatacatttaaggaatgaattcctccgttcaggactaaaaacaatgttaccagatctaaaagaaaaagagaatgatgagcttgatattcagttgaaagtatttgatgaaaacaaagaagatgacctaactgaattatcacaccgtctcaatgacattcgagcagaaatggatgatatgaatgaagtctaccatcttctatataatatgctgaaggacactgctgctgaaaattacttcttatctattctacaacattttttgcttatcagaaatgattattatatcaggccacaatattataaaataattgaggaatgtgtttcacagatagtgctacactgcagtggtatggatccagacttcaaatacaggcaaagattagacatcgatttaactcatctgatagattcttgtgtgaacaaggcgaaagttgaagaaagtgaacaaaaagctgcagagttttcaaagaagttcgatgaagaattcacagctcgacaggaagctcaagcagagcttcaaaaaagagatgagaaaatcaaagaacttgaagcagaaatccagcaacttcgaacccaggcacaagtactctcaagttcatcaggaattccaggtcctcctgcagcacctccattgccaggtgtagggccgcctccaccaccacccgcgccacctctacccggaggagctcctcttcctcctccaccacctcctttacctggaatgatggggataccaccaccacccccaccaccacttttatttgggggacctcctccaccaccaccccttggaggagttcctcctcccccaggaatatcacttaatctaccttatggaatgaagcagaaaaaaatgtataaacctgaagtgtccatgaagagaatcaattggtcaaagattgaacccacagaattatctgagaactgtttctggttaagagtcaaagaagacaagtttgagaatccagatctctttgccaaattggcattgaattttgctactcagataaaagttcaaaagaacgcagaagcattagaagaaaagaagactgggcctacaaagaagaaagtgaaagaactgagaattttggatcccaaaacagctcagaatctgtccatctttctgggatcatatcgcatgccatatgaagacataagaaacgttattctggaggttaatgaagacatgctgagtgaggctttaattcagaaccttgtgaaacatcttcctgagcagaagatactcaacgaattagcagagcttaagaatgaatatgatgacctctgtgagcctgaacaatttggagttgtgatgagctctgtgaaaatgttacagcctcgtctcagtagtatcctgttcaagctcacatttgaagaacacataaacaacatcaaaccaagcatcatagcagtaactcttgcctgtgaagaactgaagaaaagtgaaagctttaacagacttttagagttagttcttcttgttggaaactacatgaactcaggctcaagaaatgcccagtctttgggatttaagatcaacttcctttgtaagatcagagatactaaatcagcggatcaaaaaacaacccttttgcattttattgccgacatttgtgaggaaaaatatcgagatatcctaaaatttcctgaagaactggaacacgtagaaagtgcaagcaaagtttcagctcaaattctcaagagcaaccttgcatcaatggaacaacaaattgttcatctggaacgtgacatcaagaaattcccccaagcagaaaatcaacacgataagtttgtggaaaagatgaccatctttacaaagactgcccgagaacagtatgaaaaactctccaccatgcacaacaacatgatgaagctctatgagaatcttggagaatacttcatttttgactcaaagacagtgagcatagaagagttctttggtgatctcaacaacttccgaactttgtttttggaagcagtgagagaaaacaataagagaagagaaatggaagagaagaccaggagggcaaaacttgcaaaagagaaagctgaacaagaaaagttagaacgccagaagaaaaagaaacaactcattgatataaacaaagagggtgatgagactggtgtgatggataatcttctagaagccctacaatcaggtgcagcattcagagaccgtcgaaagcggattccaaggaatccagtggtaaatcatccctgtgcaacaagggctaatccaagatcagctacataaacggcctgagtgctgttttaaacaggattgggtgatggtacaacatgactttttaagataatcaagtagtaaaagtttctagtggaaacatgata

SEQ ID NO: 126702 - DNA, 3730 bp, Homo sapiens
  Payload ID: 4842
  Gene Symbol: DIAPH2
  Gene Name: diaphanous-related formin 2
  Uniprot ID: O60879
  ENST ID: ENST00000373049
  CDS Start-End: 348-3638
gggcactttgaagaatcacgtgtgttgaggccctcttaaagagataggcacctacttttccctccaccctaaacaccgccctgagggcggcggcgaccgtggtaattgcaactgctcaggggcagggcttgccccagcgccgagtagtggcaacggcgtggttgcgtcgggggtgcctgggagcctggagtcccgggggcctgaaatcggcagcttcccgggcagacactctctccctcaggaagaggtgccgccgagtcagcgcggggcagtgtgagcgccccgaggtgctttctcagttgaggagaggtggggttacagggcacaggtgacagggccggagaaagatggagcagcccggggcggcggcgtcgggagcgggaggcggcagcgaggaacccggtgggggccggagcaacaagcggagcgcggggaaccgggccgccaatgaagaggaaacgaaaaacaaacccaaattgaacattcaaataaaaactttggcagatgatgtgcgtgaccgaattacaagttttagaaaatctactgtcaaaaaagaaaaacctcttattcaacatcctattgattctcaagtcgcgatgagtgagtttcctgcagctcagccattatatgatgaacgatctttgaatttgtcagaaaaggaagtattggatctctttgaaaaaatgatggaggacatgaaccttaacgaagagaaaaaagctcctttacgaaacaaagactttaccaccaaacgtgagatggttgtccagtatatttctgccactgccaaatctggtgggctgaaaaacagcaaacatgaatgcaccctgtcttcacaagaatatgttcatgaattacgatcgggtatatcagatgagaaacttcttaattgcctagaatccctcagggtttctttaaccagcaatccggtcagctgggttaacaactttggccatgaaggtcttggactcttattggatgagctggaaaagcttctggacaaaaaacagcaagaaaatattgacaagaagaatcagtataaacttattcaatgcctcaaagcatttatgaataataagtttggattacaaaggattctaggagatgaaagaagtcttttactattggcaagagcaattgaccccaaacaacccaacatgatgactgaaatagtaaaaatactttctgctatttgcattgttggagaagagaacattctagataaacttttaggggctataacaacagcagcagaaagaaataacagggaacgattttcaccaattgtggaaggtttagaaaatcaggaagccttgcaattacaggtggcctgcatgcagtttataaatgcccttgtcacttctccttatgagcttgattttcgaatacatttaaggaatgaattcctccgttcaggactaaaaacaatgttaccagatctaaaagaaaaagagaatgatgagcttgatattcagttgaaagtatttgatgaaaacaaagaagatgacctaactgaattatcacaccgtctcaatgacattcgagcagaaatggatgatatgaatgaagtctaccatcttctatataatatgctgaaggacactgctgctgaaaattacttcttatctattctacaacattttttgcttatcagaaatgattattatatcaggccacaatattataaaataattgaggaatgtgtttcacagatagtgctacactgcagtggtatggatccagacttcaaatacaggcaaagattagacatcgatttaactcatctgatagattcttgtgtgaacaaggcgaaagttgaagaaagtgaacaaaaagctgcagagttttcaaagaagttcgatgaagaattcacagctcgacaggaagctcaagcagagcttcaaaaaagagatgagaaaatcaaagaacttgaagcagaaatccagcaacttcgaacccaggcacaagtactctcaagttcatcaggaattccaggtcctcctgcagcacctccattgccaggtgtagggccgcctccaccaccacccgcgccacctctacccggaggagctcctcttcctcctccaccacctcctttacctggaatgatggggataccaccaccacccccaccaccacttttatttgggggacctcctccaccaccaccccttggaggagttcctcctcccccaggaatatcacttaatctaccttatggaatgaagcagaaaaaaatgtataaacctgaagtgtccatgaagagaatcaattggtcaaagattgaacccacagaattatctgagaactgtttctggttaagagtcaaagaagacaagtttgagaatccagatctctttgccaaattggcattgaattttgctactcagataaaagttcaaaagaacgcagaagcattagaagaaaagaagactgggcctacaaagaagaaagtgaaagaactgagaattttggatcccaaaacagctcagaatctgtccatctttctgggatcatatcgcatgccatatgaagacataagaaacgttattctggaggttaatgaagacatgctgagtgaggctttaattcagaaccttgtgaaacatcttcctgagcagaagatactcaacgaattagcagagcttaagaatgaatatgatgacctctgtgagcctgaacaatttggagttgtgatgagctctgtgaaaatgttacagcctcgtctcagtagtatcctgttcaagctcacatttgaagaacacataaacaacatcaaaccaagcatcatagcagtaactcttgcctgtgaagaactgaagaaaagtgaaagctttaacagacttttagagttagttcttcttgttggaaactacatgaactcaggctcaagaaatgcccagtctttgggatttaagatcaacttcctttgtaagatcagagatactaaatcagcggatcaaaaaacaacccttttgcattttattgccgacatttgtgaggaaaaatatcgagatatcctaaaatttcctgaagaactggaacacgtagaaagtgcaagcaaagtttcagctcaaattctcaagagcaaccttgcatcaatggaacaacaaattgttcatctggaacgtgacatcaagaaattcccccaagcagaaaatcaacacgataagtttgtggaaaagatgaccagctttacaaagactgcccgagaacagtatgaaaaactctccaccatgcacaacaacatgatgaagctctatgagaatcttggagaatacttcatttttgactcaaagacagtgagcatagaagagttctttggtgatctcaacaacttccgaactttgtttttggaagcagtgagagaaaacaataagagaagagaaatggaagagaagaccaggagggcaaaacttgcaaaagagaaagctgaacaagaaaagttagaacgccagaagaaaaagaaacaactcattgatataaacaaagagggtgatgagactggtgtgatggataatcttctagaagccctacaatcaggtgcagcattcagagaccgtcgaaagcggattccaaggaatccagtggtaaatcatccctgtgcaacaagggctaatccaagatcagctacataaacggcctgagtgctgttttaaacaggattgggtgatggtacaacatgactttttaagataatcaagtagtaaaagtttctagtggaaacatg

SEQ ID NO: 126703 - DNA, 3376 bp, Homo sapiens
  Payload ID: 4842
  Gene Symbol: DIAPH2
  Gene Name: diaphanous-related formin 2
  ENST ID: ENST00000373054
  CDS Start-End: 43-3354
agaggtggggttacagggcacaggtgacagggccggagaaagatggagcagcccggggcggcggcgtcgggagcgggaggcggcagcgaggaacccggtgggggccggagcaacaagcggagcgcggggaaccgggccgccaatgaagaggaaacgaaaaacaaacccaaattgaacattcaaataaaaactttggcagatgatgtgcgtgaccgaattacaagttttagaaaatctactgtcaaaaaagaaaaacctcttattcaacatcctattgattctcaagtcgcgatgagtgagtttcctgcagctcagccattatatgatgaacgatctttgaatttgtcagaaaaggaagtattggatctctttgaaaaaatgatggaggacatgaaccttaacgaagagaaaaaagctcctttacgaaacaaagactttaccaccaaacgtgagatggttgtccagtatatttctgccactgccaaatctatagttggaagtaaagttacgggtgggctgaaaaacagcaaacatgaatgcaccctgtcttcacaagaatatgttcatgaattacgatcgggtatatcagatgagaaacttcttaattgcctagaatccctcagggtttctttaaccagcaatccggtcagctgggttaacaactttggccatgaaggtcttggactcttattggatgagctggaaaagcttctggacaaaaaacagcaagaaaatattgacaagaagaatcagtataaacttattcaatgcctcaaagcatttatgaataataagtttggattacaaaggattctaggagatgaaagaagtcttttactattggcaagagcaattgaccccaaacaacccaacatgatgactgaaatagtaaaaatactttctgctatttgcattgttggagaagagaacattctagataaacttttaggggctataacaacagcagcagaaagaaataacagggaacgattttcaccaattgtggaaggtttagaaaatcaggaagccttgcaattacaggtggcctgcatgcagtttataaatgcccttgtcacttctccttatgagcttgattttcgaatacatttaaggaatgaattcctccgttcaggactaaaaacaatgttaccagatctaaaagaaaaagagaatgatgagcttgatattcagttgaaagtatttgatgaaaacaaagaagatgacctaactgaattatcacaccgtctcaatgacattcgagcagaaatggatgatatgaatgaagtctaccatcttctatataatatgctgaaggacactgctgctgaaaattacttcttatctattctacaacattttttgcttatcagaaatgattattatatcaggccacaatattataaaataattgaggaatgtgtttcacagatagtgctacactgcagtggtatggatccagacttcaaatacaggcaaagattagacatcgatttaactcatctgatagattcttgtgtgaacaaggcgaaagttgaagaaagtgaacaaaaagctgcagagttttcaaagaagttcgatgaagaattcacagctcgacaggaagctcaagcagagcttcaaaaaagagatgagaaaatcaaagaacttgaagcagaaatccagcaacttcgaacccaggcacaagtactctcaagttcatcaggaattccaggtcctcctgcagcacctccattgccaggtgtagggccgcctccaccaccacccgcgccacctctacccggaggagctcctcttcctcctccaccacctcctttacctggaatgatggggataccaccaccacccccaccaccacttttatttgggggacctcctccaccaccaccccttggaggagttcctcctcccccaggaatatcacttaatctaccttatggaatgaagcagaaaaaaatgtataaacctgaagtgtccatgaagagaatcaattggtcaaagattgaacccacagaattatctgagaactgtttctggttaagagtcaaagaagacaagtttgagaatccagatctctttgccaaattggcattgaattttgctactcagataaaagttcaaaagaacgcagaagcattagaagaaaagaagactgggcctacaaagaagaaagtgaaagaactgagaattttggatcccaaaacagctcagaatctgtccatctttctgggatcatatcgcatgccatatgaagacataagaaacgttattctggaggttaatgaagacatgctgagtgaggctttaattcagaaccttgtgaaacatcttcctgagcagaagatactcaacgaattagcagagcttaagaatgaatatgatgacctctgtgagcctgaacaatttggagttgtgatgagctctgtgaaaatgttacagcctcgtctcagtagtatcctgttcaagctcacatttgaagaacacataaacaacatcaaaccaagcatcatagcagtaactcttgcctgtgaagaactgaagaaaagtgaaagctttaacagacttttagagttagttcttcttgttggaaactacatgaactcaggctcaagaaatgcccagtctttgggatttaagatcaacttcctttgtaagatcagagatactaaatcagcggatcaaaaaacaacccttttgcattttattgccgacatttgtgaggaaaaatatcgagatatcctaaaatttcctgaagaactggaacacgtagaaagtgcaagcaaagtttcagctcaaattctcaagagcaaccttgcatcaatggaacaacaaattgttcatctggaacgtgacatcaagaaattcccccaagcagaaaatcaacacgataagtttgtggaaaagatgaccatctttacaaagactgcccgagaacagtatgaaaaactctccaccatgcacaacaacatgatgaagctctatgagaatcttggagaatacttcatttttgactcaaagacagtgagcatagaagagttctttggtgatctcaacaacttccgaactttgtttttggaagcagtgagagaaaacaataagagaagagaaatggaagagaagaccaggagggcaaaacttgcaaaagagaaagctgaacaagaaaagttagaacgccagaagaaaaagaaacaactcattgatataaacaaagagggtgatgagactggtgtgatggataatcttctagaagccctacaatcaggtgcagcattcagagaccgtcgaaagcggattccaaggaatccagtggtaaatcatccctgtgcaacaagggctaatccaagatcagctacataaacggcctgagtgctgttttaaa

SEQ ID NO: 126704 - DNA, 4983 bp, Homo sapiens
  Payload ID: 4842
  Gene Symbol: DIAPH2
  Gene Name: diaphanous-related formin 2
  ENST ID: ENST00000373061
  CDS Start-End: 397-3702
ctcggctgcgggagtaggaagcagctttgcgcgcccgggcggccgatgcgggcactttgaagaatcacgtgtgttgaggccctcttaaagagataggcacctacttttccctccaccctaaacaccgccctgagggcggcggcgaccgtggtaattgcaactgctcaggggcagggcttgccccagcgccgagtagtggcaacggcgtggttgcgtcgggggtgcctgggagcctggagtcccgggggcctgaaatcggcagcttcccgggcagacactctctccctcaggaagaggtgccgccgagtcagcgcggggcagtgtgagcgccccgaggtgctttctcagttgaggagaggtggggttacagggcacaggtgacagggccggagaaagatggagcagcccggggcggcggcgtcgggagcgggaggcggcagcgaggaacccggtgggggccggagcaacaagcggagcgcggggaaccgggccgccaatgaagaggaaacgaaaaacaaacccaaattgaacattcaaataaaaactttggcagatgatgtgcgtgaccgaattacaagttttagaaaatctactgtcaaaaaagaaaaacctcttattcaacatcctattgattctcaagtcgcgatgagtgagtttcctgcagctcagccattatatgatgaacgatctttgaatttgtcagaaaaggaagtattggatctctttgaaaaaatgatggaggacatgaaccttaacgaagagaaaaaagctcctttacgaaacaaagactttaccaccaaacgtgagatggttgtccagtatatttctgccactgccaaatctggtgggctgaaaaacagcaaacatgaatgcaccctgtcttcacaagaatatgttcatgaattacgatcgggtatatcagatgagaaacttcttaattgcctagaatccctcagggtttctttaaccagcaatccggtcagctgggttaacaactttggccatgaaggtcttggactcttattggatgagctggaaaagcttctggacaaaaaacagcaagaaaatattgacaagaagaatcagtataaacttattcaatgcctcaaagcatttatgaataataagtttggattacaaaggattctaggagatgaaagaagtcttttactattggcaagagcaattgaccccaaacaacccaacatgatgactgaaatagtaaaaatactttctgctatttgcattgttggagaagagaacattctagataaacttttaggggctataacaacagcagcagaaagaaataacagggaacgattttcaccaattgtggaaggtttagaaaatcaggaagccttgcaattacaggtggcctgcatgcagtttataaatgcccttgtcacttctccttatgagcttgattttcgaatacatttaaggaatgaattcctccgttcaggactaaaaacaatgttaccagatctaaaagaaaaagagaatgatgagcttgatattcagttgaaagtatttgatgaaaacaaagaagatgacctaactgaattatcacaccgtctcaatgacattcgagcagaaatggatgatatgaatgaagtctaccatcttctatataatatgctgaaggacactgctgctgaaaattacttcttatctattctacaacattttttgcttatcagaaatgattattatatcaggccacaatattataaaataattgaggaatgtgtttcacagatagtgctacactgcagtggtatggatccagacttcaaatacaggcaaagattagacatcgatttaactcatctgatagattcttgtgtgaacaaggcgaaagttgaagaaagtgaacaaaaagctgcagagttttcaaagaagttcgatgaagaattcacagctcgacaggaagctcaagcagagcttcaaaaaagagatgagaaaatcaaagaacttgaagcagaaatccagcaacttcgaacccaggcacaagtactctcaagttcatcaggaattccaggtcctcctgcagcacctccattgccaggtgtagggccgcctccaccaccacccgcgccacctctacccggaggagctcctcttcctcctccaccacctcctttacctggaatgatggggataccaccaccacccccaccaccacttttatttgggggacctcctccaccaccaccccttggaggagttcctcctcccccaggaatatcacttaatctaccttatggaatgaagcagaaaaaaatgtataaacctgaagtgtccatgaagagaatcaattggtcaaagattgaacccacagaattatctgagaactgtttctggttaagagtcaaagaagacaagtttgagaatccagatctctttgccaaattggcattgaattttgctactcagataaaagttcaaaagaacgcagaagcattagaagaaaagaagactgggcctacaaagaagaaagtgaaagaactgagaattttggatcccaaaacagctcagaatctgtccatctttctgggatcatatcgcatgccatatgaagacataagaaacgttattctggaggttaatgaagacatgctgagtgaggctttaattcagaaccttgtgaaacatcttcctgagcagaagatactcaacgaattagcagagcttaagaatgaatatgatgacctctgtgagcctgaacaatttggagttgtgatgagctctgtgaaaatgttacagcctcgtctcagtagtatcctgttcaagctcacatttgaagaacacataaacaacatcaaaccaagcatcatagcagtaactcttgcctgtgaagaactgaagaaaagtgaaagctttaacagacttttagagttagttcttcttgttggaaactacatgaactcaggctcaagaaatgcccagtctttgggatttaagatcaacttcctttgtaagatcagagatactaaatcagcggatcaaaaaacaacccttttgcattttattgccgacatttgtgaggaaaaatatcgagatatcctaaaatttcctgaagaactggaacacgtagaaagtgcaagcaaagtttcagctcaaattctcaagagcaaccttgcatcaatggaacaacaaattgttcatctggaacgtgacatcaagaaattcccccaagcagaaaatcaacacgataagtttgtggaaaagatgaccatctttacaaagactgcccgagaacagtatgaaaaactctccaccatgcacaacaacatgatgaagctctatgagaatcttggagaatacttcatttttgactcaaagacagtgagcatagaagagttctttggtgatctcaacaacttccgaactttgtttttggaagcagtgagagaaaacaataagagaagagaaatggaagagaagaccaggagggcaaaacttgcaaaagagaaagctgaacaagaaaagttagaacgccagaagaaaaagaaacaactcattgatataaacaaagagggtgatgagactggtgtgatggataatcttctagaagccctacaatcaggtgcagcattcagagaccgtcgaaagcggattccaaggaatccagataacagacgagtacctttggaaaggtcacgctctcgccacaatggagctatctcatctaagtgattcctgatgccaaagaatatgaaaatatttaagtaaaaacaaaatgatgcattttgagaagaacaaagtgtgcactcagcggctggaaaggaaataagtgcatttctgcaaagatcaagataagctggatgaagtagtgtgcatttgtaatactattgcaagactcctcccacaattattctaatctgaacacagttatcaggattacaaaatgtgttccattttagtgtaaagatgtgtatcatttgtaattgtgtgtgacctgactgtgatgatggaagtgtaagaaattgaagagttctaaggctttcaaaaacactcagtcaaaaatttaaaatcttaaatgtgtaagtcacccccaccaaaaacaaaagagaagaaaaagaatagaaagaattatccagtgtcagcttccaatccctagtacatatataatagaaaagggccaagaaaaatatgcatcttgatttggagagaggctaatattatgcacactgtaagagaagccattttggaaattcacgaaagtactgctccaccccagttgagttatttagaattttatctcaagtgaaagctgatggattcatctgctttggctgaaattaaacttatcattagtctagctagcatttcagcatgatattgcaagcacttctcattgctaaaaataaataaaccaaagtttaaccgaatcagttagggaaagtgatttaaactttatttaaagaggtattttctaattatgcacagatatctactttatacaaatactttatatggctatttttgagaaaaccctcacattttaatgtttatgctagggatgaacctgaaaattctattacgtttatttagatttcaaaggcaaatattgattcctatgctctgtggtttatttcttttttctattgcttctttctcccttgagtcccttgaaggcagggaatagacttctagaaaacctgagaggaaaaagaattctttttacaggaggcagcagaaaactgtctgaaaggtcaattgttttatctccctttccactctctttccaatttcactttggtggtctgaagaagaaaaagaaattttatgtatgtatgtgtaaatatgtgtatatatttctatctcttgctacaataattccaactaagtgaacttctcaattatcatcatacttacttaccttatattaacaaattaagatgatgctgccaaaacaagtctagcagggaaaacaggttctacatttttcttaaataaattagggagtaaaagtta

SEQ ID NO: 126705 - DNA, 3449 bp, Homo sapiens
  Payload ID: 4843
  Gene Symbol: DIAPH3
  Gene Name: diaphanous-related formin 3
  Uniprot ID: Q9NSV4
  ENST ID: ENST00000267215
  CDS Start-End: 1-3339
atggaacggcaccagccgcggctgcaccacccggcccaaggctcagccgctgggactccctacccttcctcagcctctctccgcggctgccgggaaagcaagatgccgcgcaggaagggcccccaacaccctccgccgcccagtggccccgaggagcctggggagaagcgccccaagtttcatttaaatattaggacactgacggatgatatgctggacaaatttgccagcataagaattccagggagcaagaaagagagacctccacttcccaacctgaagactgcatttgcaagcagtgattgctcagcagcacctttagagatgatggagaactttccaaagccactgtcagagaatgaactcttagaactttttgaaaaaatgatggaagatatgaatttaaatgaagataaaaaggcaccattgcgggaaaaggacttcagtatcaaaaaagaaatggtgatgcagtacattaatactgcttctaagacaggaagtcttaagagaagccgacagatctcacctcaggaattcattcatgagctgaaaatggggtctgcagatgagagacttgtcacatgcctggagtctctccgagtgtctttgaccagcaatcctgtgagttgggtggaaagctttggacatgaagggcttggattattattagacattttggaaaaactgattagtggaaaaatccaagaaaaagttgtaaagaaaaatcaacataaagtcatacagtgtctaaaagccctgatgaatacgcagtatggcttggaaagaattatgagtgaggagaggagcctttccttattggccaaagccgtggatcccagacaccccaatatgatgacagatgtggttaaacttctctctgcggtatgcattgtaggggaagaaagcatccttgaagaagttttagaagctttaacttcagctggtgaagaaaaaaaaattgacagatttttttgtattgtggaaggcctccggcacaattcagttcaactgcaagtagcttgtatgcagctcatcaatgccctggttacatctcctgatgatttggatttcaggcttcacatcagaaatgaatttatgcgttgtggattgaaagagatattgccaaatttaaaatgcattaagaatgatggcctggatatccaacttaaagtctttgatgagcataaagaagaagatttgtttgagttatcccatcgccttgaagatattagagctgaacttgatgaagcatatgatgtttacaacatggtgtggagcacagttaaagaaactagagcagagggatattttatttctattcttcagcatcttttgctgattcgaaatgattattttataaggcaacaatacttcaaattaattgatgagtgtgtatcccagattgtattgcatagagatggaatggatccagacttcacatatcgaaaaagactagatttagatttaacccagtttgtagacatttgcatagatcaagcaaaactagaagagtttgaagagaaagcatcagaactttacaagaaatttgaaaaagagtttaccgaccaccaagaaactcaggctgaattgcagaaaaaagaggcaaagattaatgagcttcaagcagagctacaagcttttaagtctcagtttggtgccttgccagctgattgtaatattcctttgcctccctctaaagaaggtggaactggccactcagcacttcctcctccgcctccactgccttctggtggaggggtgccgcctccacctcctcccccaccacctcctccacttccaggaatgcggatgccattcagtggtcctgtgcctccaccacctcccctgggattccttggaggacaaaattctcctcctctaccaatcctgccatttgggttgaaaccaaagaaagaatttaaacctgaaatcagcatgagaagattgaattggttaaagatcagacctcatgaaatgactgaaaactgtttctggataaaagtaaatgaaaataagtatgaaaacgtggatttgctttgtaaacttgagaatacattttgttgccaacaaaaagagagaagagaagaggaagatattgaagagaagaaatcgattaagaaaaaaattaaagaacttaagtttttagattctaaaattgcccagaacctttcaatcttcctgagctcttttcgggtgccatatgaggaaatcagaatgatgatattggaagtagatgaaacacggttggcagagtctatgattcagaacttaataaagcatcttcctgatcaagagcaattaaattcattgtctcagttcaagagtgaatatagcaacttatgtgaacctgagcagtttgtggttgtgatgagcaatgtgaagagactacggccacggctcagtgctattctctttaagcttcagtttgaagagcaggtgaacaacatcaaacctgacatcatggctgtcagtactgcctgcgaagagataaagaagagcaaaagctttagcaagttgctggaacttgtattgctaatgggaaactacatgaatgctggctcccggaatgctcaaaccttcggatttaaccttagctctctctgtaaactaaaggacacaaaatcagcagatcagaaaacaacgctacttcatttcctggtagaaatatgtgaagagaagtaccctgatatactgaattttgtggatgatttggaacctttagacaaagctagtaaagtctctgtagaaacgctggaaaagaatttgaggcagatgggaaggcagcttcaacagcttgagaaggaattggaaacctttccccctcctgaggacttgcatgacaagtttgtgacaaagatgtccagatttgttatcagtgcaaaagaacaatatgagacactttcgaagttacacgaaaacatggaaaagttataccagagtataataggatactatgccattgatgtgaagaaggtgtctgtggaagactttcttactgacctgaataacttcagaaccacattcatgcaagcaataaaggagaatatcaaaaaaagagaagcagaggaaaaagaaaaacgtgtcagaatagctaaagaattagcagagcgagaaagactcgaacgccaacaaaagaaaaagcgtttattagaaatgaagactgagggtgatgagacaggagtgatggataatctgctggaggccttgcagtccggggctgccttccgcgacagaagaaaaaggacaccgatgccaaaagatgttcggcagagtctcagtccaatgtctcagaggcctgttctgaaagtttgtaaccatggtaataaaccgtatttataaattgcacattcttcttatctacttttatcctattgatctgtgattttagtagactgctgtgaaattctcaagttccaatataactaaaatagtaaaaatgtgtgcatgta

SEQ ID NO: 126706 - DNA, 3549 bp, Homo sapiens
  Payload ID: 4843
  Gene Symbol: DIAPH3
  Gene Name: diaphanous-related formin 3
  Uniprot ID: Q9NSV4
  ENST ID: ENST00000377908
  CDS Start-End: 1-3549
atggaacggcaccagccgcggctgcaccacccggcccaaggctcagccgctgggactccctacccttcctcagcctctctccgcggctgccgggaaagcaagatgccgcgcaggaagggcccccaacaccctccgccgcccagtggccccgaggagcctggggagaagcgccccaagtttctggacaaatttgccagcataagaattccagggagcaagaaagagagacctccacttcccaacctgaagactgcatttgcaagcagtgattgctcagcagcacctttagagatgatggagaactttccaaagccactgtcagagaatgaactcttagaactttttgaaaaaatgatggaagatatgaatttaaatgaagataaaaaggcaccattgcgggaaaaggacttcagtatcaaaaaagaaatggtgatgcagtacattaatactgcttctaagacaggaagtcttaagagaagccgacagatctcacctcaggaattcattcatgagctgaaaatggggtctgcagatgagagacttgtcacatgcctggagtctctccgagtgtctttgaccagcaatcctgtgagttgggtggaaagctttggacatgaagggcttggattattattagacattttggaaaaactgattagtggaaaaatccaagaaaaagttgtaaagaaaaatcaacataaagtcatacagtgtctaaaagccctgatgaatacgcagtatggcttggaaagaattatgagtgaggagaggagcctttccttattggccaaagccgtggatcccagacaccccaatatgatgacagatgtggttaaacttctctctgcggtatgcattgtaggggaagaaagcatccttgaagaagttttagaagctttaacttcagctggtgaagaaaaaaaaattgacagatttttttgtattgtggaaggcctccggcacaattcagttcaactgcaagtagcttgtatgcagctcatcaatgccctggttacatctcctgatgatttggatttcaggcttcacatcagaaatgaatttatgcgttgtggattgaaagagatattgccaaatttaaaatgcattaagaatgatggcctggatatccaacttaaagtctttgatgagcataaagaagaagatttgtttgagttatcccatcgccttgaagatattagagctgaacttgatgaagcatatgatgtttacaacatggtgtggagcacagttaaagaaactagagcagagggatattttatttctattcttcagcatcttttgctgattcgaaatgattattttataaggcaacaatacttcaaattaattgatgagtgtgtatcccagattgtattgcatagagatggaatggatccagacttcacatatcgaaaaagactagatttagatttaacccagtttgtagacatttgcatagatcaagcaaaactagaagagtttgaagagaaagcatcagaactttacaagaaatttgaaaaagagtttaccgaccaccaagaaactcaggctgaattgcagaaaaaagaggcaaagattaatgagcttcaagcagagctacaagcttttaagtctcagtttggtgccttgccagctgattgtaatattcctttgcctccctctaaagaaggtggaactggccactcagcacttcctcctccgcctccactgccttctggtggaggggtgccgcctccacctcctcccccaccacctcctccacttccaggaatgcggatgccattcagtggtcctgtgcctccaccacctcccctgggattccttggaggacaaaattctcctcctctaccaatcctgccatttgggttgaaaccaaagaaagaatttaaacctgaaatcagcatgagaagattgaattggttaaagatcagacctcatgaaatgactgaaaactgtttctggataaaagtaaatgaaaataagtatgaaaacgtggatttgctttgtaaacttgagaatacattttgttgccaacaaaaagagagaagagaagaggaagatattgaagagaagaaatcgattaagaaaaaaattaaagaacttaagtttttagattctaaaattgcccagaacctttcaatcttcctgagctcttttcgggtgccatatgaggaaatcagaatgatgatattggaagtagatgaaacacggttggcagagtctatgattcagaacttaataaagcatcttcctgatcaagagcaattaaattcattgtctcagttcaagagtgaatatagcaacttatgtgaacctgagcagtttgtggttgtgatgagcaatgtgaagagactacggccacggctcagtgctattctctttaagcttcagtttgaagagcaggtgaacaacatcaaacctgacatcatggctgtcagtactgcctgcgaagagataaagaagagcaaaagctttagcaagttgctggaacttgtattgctaatgggaaactacatgaatgctggctcccggaatgctcaaaccttcggatttaaccttagctctctctgtaaactaaaggacacaaaatcagcagatcagaaaacaacgctacttcatttcctggtagaaatatgtgaagagaagtaccctgatatactgaattttgtggatgatttggaacctttagacaaagctagtaaagtctctgtagaaacgctggaaaagaatttgaggcagatgggaaggcagcttcaacagcttgagaaggaattggaaacctttccccctcctgaggacttgcatgacaagtttgtgacaaagatgtccagatttgttatcagtgcaaaagaacaatatgagacactttcgaagttacacgaaaacatggaaaagttataccagagtataataggatactatgccattgatgtgaagaaggtgtctgtggaagactttcttactgacctgaataacttcagaaccacattcatgcaagcaataaaggagaatatcaaaaaaagagaagcagaggaaaaagaaaaacgtgtcagaatagctaaagaattagcagagcgagaaagactcgaacgccaacaaaagaaaaagcgtttattagaaatgaagactgagggtgatgagacaggagtgatggataatctgctggaggccttgcagtccggggctgccttccgcgacagaagaaaaaggacaccgatgccaaaagatgttcggcagagtctcagtccaatgtctcagaggcctgttctgaaagtttgtaaccatgaaaatcagaaagtgcagttgacagaagggtcacgttcacactacaatatcaattgcaactcaacaaggactccagtcgccaaggagcttaattataatctagacactcatacgtctactgggaggatcaaggcagctgagaagaaggaagcgtgtaatgtagaaagcaacagaaaaaaggaaacggaacttcttggctctttttctaaaaatgaatcagttcccgaagttgaagccctgctggcaagattacgagctttataa

SEQ ID NO: 126707 - DNA, 3372 bp, Homo sapiens
  Payload ID: 4843
  Gene Symbol: DIAPH3
  Gene Name: diaphanous-related formin 3
  Uniprot ID: Q9NSV4
  ENST ID: ENST00000400319
  CDS Start-End: 1-3372
atggaacggcaccagccgcggctgcaccacccggcccaaggctcagccgctgggactccctacccttcctcagcctctctccgcggctgccgggaaagcaagatgccgcgcaggaagggcccccaacaccctccgccgcccagtggccccgaggagcctggggagaagcgccccaagtttgaagatatgaatttaaatgaagataaaaaggcaccattgcgggaaaaggacttcagtatcaaaaaagaaatggtgatgcagtacattaatactgcttctaagacaggaagtcttaagagaagccgacagatctcacctcaggaattcattcatgagctgaaaatggggtctgcagatgagagacttgtcacatgcctggagtctctccgagtgtctttgaccagcaatcctgtgagttgggtggaaagctttggacatgaagggcttggattattattagacattttggaaaaactgattagtggaaaaatccaagaaaaagttgtaaagaaaaatcaacataaagtcatacagtgtctaaaagccctgatgaatacgcagtatggcttggaaagaattatgagtgaggagaggagcctttccttattggccaaagccgtggatcccagacaccccaatatgatgacagatgtggttaaacttctctctgcggtatgcattgtaggggaagaaagcatccttgaagaagttttagaagctttaacttcagctggtgaagaaaaaaaaattgacagatttttttgtattgtggaaggcctccggcacaattcagttcaactgcaagtagcttgtatgcagctcatcaatgccctggttacatctcctgatgatttggatttcaggcttcacatcagaaatgaatttatgcgttgtggattgaaagagatattgccaaatttaaaatgcattaagaatgatggcctggatatccaacttaaagtctttgatgagcataaagaagaagatttgtttgagttatcccatcgccttgaagatattagagctgaacttgatgaagcatatgatgtttacaacatggtgtggagcacagttaaagaaactagagcagagggatattttatttctattcttcagcatcttttgctgattcgaaatgattattttataaggcaacaatacttcaaattaattgatgagtgtgtatcccagattgtattgcatagagatggaatggatccagacttcacatatcgaaaaagactagatttagatttaacccagtttgtagacatttgcatagatcaagcaaaactagaagagtttgaagagaaagcatcagaactttacaagaaatttgaaaaagagtttaccgaccaccaagaaactcaggctgaattgcagaaaaaagaggcaaagattaatgagcttcaagcagagctacaagcttttaagtctcagtttggtgccttgccagctgattgtaatattcctttgcctccctctaaagaaggtggaactggccactcagcacttcctcctccgcctccactgccttctggtggaggggtgccgcctccacctcctcccccaccacctcctccacttccaggaatgcggatgccattcagtggtcctgtgcctccaccacctcccctgggattccttggaggacaaaattctcctcctctaccaatcctgccatttgggttgaaaccaaagaaagaatttaaacctgaaatcagcatgagaagattgaattggttaaagatcagacctcatgaaatgactgaaaactgtttctggataaaagtaaatgaaaataagtatgaaaacgtggatttgctttgtaaacttgagaatacattttgttgccaacaaaaagagagaagagaagaggaagatattgaagagaagaaatcgattaagaaaaaaattaaagaacttaagtttttagattctaaaattgcccagaacctttcaatcttcctgagctcttttcgggtgccatatgaggaaatcagaatgatgatattggaagtagatgaaacacggttggcagagtctatgattcagaacttaataaagcatcttcctgatcaagagcaattaaattcattgtctcagttcaagagtgaatatagcaacttatgtgaacctgagcagtttgtggttgtgatgagcaatgtgaagagactacggccacggctcagtgctattctctttaagcttcagtttgaagagcaggtgaacaacatcaaacctgacatcatggctgtcagtactgcctgcgaagagataaagaagagcaaaagctttagcaagttgctggaacttgtattgctaatgggaaactacatgaatgctggctcccggaatgctcaaaccttcggatttaaccttagctctctctgtaaactaaaggacacaaaatcagcagatcagaaaacaacgctacttcatttcctggtagaaatatgtgaagagaagtaccctgatatactgaattttgtggatgatttggaacctttagacaaagctagtaaagtctctgtagaaacgctggaaaagaatttgaggcagatgggaaggcagcttcaacagcttgagaaggaattggaaacctttccccctcctgaggacttgcatgacaagtttgtgacaaagatgtccagatttgttatcagtgcaaaagaacaatatgagacactttcgaagttacacgaaaacatggaaaagttataccagagtataataggatactatgccattgatgtgaagaaggtgtctgtggaagactttcttactgacctgaataacttcagaaccacattcatgcaagcaataaaggagaatatcaaaaaaagagaagcagaggaaaaagaaaaacgtgtcagaatagctaaagaattagcagagcgagaaagactcgaacgccaacaaaagaaaaagcgtttattagaaatgaagactgagggtgatgagacaggagtgatggataatctgctggaggccttgcagtccggggctgccttccgcgacagaagaaaaaggacaccgatgccaaaagatgttcggcagagtctcagtccaatgtctcagaggcctgttctgaaagtttgtaaccatgaaaatcagaaagtgcagttgacagaagggtcacgttcacactacaatatcaattgcaactcaacaaggactccagtcgccaaggagcttaattataatctagacactcatacgtctactgggaggatcaaggcagctgagaagaaggaagcgtgtaatgtagaaagcaacagaaaaaaggaaacggaacttcttggctctttttctaaaaatgaatcagttcccgaagttgaagccctgctggcaagattacgagctttataa

SEQ ID NO: 126708 - DNA, 3444 bp, Homo sapiens
  Payload ID: 4843
  Gene Symbol: DIAPH3
  Gene Name: diaphanous-related formin 3
  Uniprot ID: Q9NSV4
  ENST ID: ENST00000400320
  CDS Start-End: 1-3444
atggaacggcaccagccgcggctgcaccacccggcccaaggctcagccgctgggactccctacccttcctcagcctctctccgcggctgccgggaaagcaagatgccgcgcaggaagggcccccaacaccctccgccgcccagtggccccgaggagcctggggagaagcgccccaagtttctggacaaatttgccagcataagaattccagggagcaagaaagagagacctccacttcccaacctgaagactgcatttgcaagcagtgattgctcagcagcacctttagagatgatggagaactttccaaagccactgtcagagaatgaactcttagaactttttgaaaaaatgatgggaagtcttaagagaagccgacagatctcacctcaggaattcattcatgagctgaaaatggggtctgcagatgagagacttgtcacatgcctggagtctctccgagtgtctttgaccagcaatcctgtgagttgggtggaaagctttggacatgaagggcttggattattattagacattttggaaaaactgattagtggaaaaatccaagaaaaagttgtaaagaaaaatcaacataaagtcatacagtgtctaaaagccctgatgaatacgcagtatggcttggaaagaattatgagtgaggagaggagcctttccttattggccaaagccgtggatcccagacaccccaatatgatgacagatgtggttaaacttctctctgcggtatgcattgtaggggaagaaagcatccttgaagaagttttagaagctttaacttcagctggtgaagaaaaaaaaattgacagatttttttgtattgtggaaggcctccggcacaattcagttcaactgcaagtagcttgtatgcagctcatcaatgccctggttacatctcctgatgatttggatttcaggcttcacatcagaaatgaatttatgcgttgtggattgaaagagatattgccaaatttaaaatgcattaagaatgatggcctggatatccaacttaaagtctttgatgagcataaagaagaagatttgtttgagttatcccatcgccttgaagatattagagctgaacttgatgaagcatatgatgtttacaacatggtgtggagcacagttaaagaaactagagcagagggatattttatttctattcttcagcatcttttgctgattcgaaatgattattttataaggcaacaatacttcaaattaattgatgagtgtgtatcccagattgtattgcatagagatggaatggatccagacttcacatatcgaaaaagactagatttagatttaacccagtttgtagacatttgcatagatcaagcaaaactagaagagtttgaagagaaagcatcagaactttacaagaaatttgaaaaagagtttaccgaccaccaagaaactcaggctgaattgcagaaaaaagaggcaaagattaatgagcttcaagcagagctacaagcttttaagtctcagtttggtgccttgccagctgattgtaatattcctttgcctccctctaaagaaggtggaactggccactcagcacttcctcctccgcctccactgccttctggtggaggggtgccgcctccacctcctcccccaccacctcctccacttccaggaatgcggatgccattcagtggtcctgtgcctccaccacctcccctgggattccttggaggacaaaattctcctcctctaccaatcctgccatttgggttgaaaccaaagaaagaatttaaacctgaaatcagcatgagaagattgaattggttaaagatcagacctcatgaaatgactgaaaactgtttctggataaaagtaaatgaaaataagtatgaaaacgtggatttgctttgtaaacttgagaatacattttgttgccaacaaaaagagagaagagaagaggaagatattgaagagaagaaatcgattaagaaaaaaattaaagaacttaagtttttagattctaaaattgcccagaacctttcaatcttcctgagctcttttcgggtgccatatgaggaaatcagaatgatgatattggaagtagatgaaacacggttggcagagtctatgattcagaacttaataaagcatcttcctgatcaagagcaattaaattcattgtctcagttcaagagtgaatatagcaacttatgtgaacctgagcagtttgtggttgtgatgagcaatgtgaagagactacggccacggctcagtgctattctctttaagcttcagtttgaagagcaggtgaacaacatcaaacctgacatcatggctgtcagtactgcctgcgaagagataaagaagagcaaaagctttagcaagttgctggaacttgtattgctaatgggaaactacatgaatgctggctcccggaatgctcaaaccttcggatttaaccttagctctctctgtaaactaaaggacacaaaatcagcagatcagaaaacaacgctacttcatttcctggtagaaatatgtgaagagaagtaccctgatatactgaattttgtggatgatttggaacctttagacaaagctagtaaagtctctgtagaaacgctggaaaagaatttgaggcagatgggaaggcagcttcaacagcttgagaaggaattggaaacctttccccctcctgaggacttgcatgacaagtttgtgacaaagatgtccagatttgttatcagtgcaaaagaacaatatgagacactttcgaagttacacgaaaacatggaaaagttataccagagtataataggatactatgccattgatgtgaagaaggtgtctgtggaagactttcttactgacctgaataacttcagaaccacattcatgcaagcaataaaggagaatatcaaaaaaagagaagcagaggaaaaagaaaaacgtgtcagaatagctaaagaattagcagagcgagaaagactcgaacgccaacaaaagaaaaagcgtttattagaaatgaagactgagggtgatgagacaggagtgatggataatctgctggaggccttgcagtccggggctgccttccgcgacagaagaaaaaggacaccgatgccaaaagatgttcggcagagtctcagtccaatgtctcagaggcctgttctgaaagtttgtaaccatgaaaatcagaaagtgcagttgacagaagggtcacgttcacactacaatatcaattgcaactcaacaaggactccagtcgccaaggagcttaattataatctagacactcatacgtctactgggaggatcaaggcagctgagaagaaggaagcgtgtaatgtagaaagcaacagaaaaaaggaaacggaacttcttggctctttttctaaaaatgaatcagttcccgaagttgaagccctgctggcaagattacgagctttataa

SEQ ID NO: 126709 - DNA, 4804 bp, Homo sapiens
  Payload ID: 4843
  Gene Symbol: DIAPH3
  Gene Name: diaphanous-related formin 3
  Uniprot ID: Q9NSV4
  ENST ID: ENST00000400324
  CDS Start-End: 222-3803
attgatccggcggcgcgggattggccagtcccgggccaacacgggtggcgggagttttcagatgtgttggctgcggccccgacttcagcggttgggctaggctgtgctgactgtttgggtggcggaccccgggagtaaaacctgttgtcgatccctcagcttccagcttgcggcttgctgagtggccaccttctttccggtccccggagctgcggggaaagatggaacggcaccagccgcggctgcaccacccggcccaaggctcagccgctgggactccctacccttcctcagcctctctccgcggctgccgggaaagcaagatgccgcgcaggaagggcccccaacaccctccgccgcccagtggccccgaggagcctggggagaagcgccccaagtttcatttaaatattaggacactgacggatgatatgctggacaaatttgccagcataagaattccagggagcaagaaagagagacctccacttcccaacctgaagactgcatttgcaagcagtgattgctcagcagcacctttagagatgatggagaactttccaaagccactgtcagagaatgaactcttagaactttttgaaaaaatgatggaagatatgaatttaaatgaagataaaaaggcaccattgcgggaaaaggacttcagtatcaaaaaagaaatggtgatgcagtacattaatactgcttctaagacaggaagtcttaagagaagccgacagatctcacctcaggaattcattcatgagctgaaaatggggtctgcagatgagagacttgtcacatgcctggagtctctccgagtgtctttgaccagcaatcctgtgagttgggtggaaagctttggacatgaagggcttggattattattagacattttggaaaaactgattagtggaaaaatccaagaaaaagttgtaaagaaaaatcaacataaagtcatacagtgtctaaaagccctgatgaatacgcagtatggcttggaaagaattatgagtgaggagaggagcctttccttattggccaaagccgtggatcccagacaccccaatatgatgacagatgtggttaaacttctctctgcggtatgcattgtaggggaagaaagcatccttgaagaagttttagaagctttaacttcagctggtgaagaaaaaaaaattgacagatttttttgtattgtggaaggcctccggcacaattcagttcaactgcaagtagcttgtatgcagctcatcaatgccctggttacatctcctgatgatttggatttcaggcttcacatcagaaatgaatttatgcgttgtggattgaaagagatattgccaaatttaaaatgcattaagaatgatggcctggatatccaacttaaagtctttgatgagcataaagaagaagatttgtttgagttatcccatcgccttgaagatattagagctgaacttgatgaagcatatgatgtttacaacatggtgtggagcacagttaaagaaactagagcagagggatattttatttctattcttcagcatcttttgctgattcgaaatgattattttataaggcaacaatacttcaaattaattgatgagtgtgtatcccagattgtattgcatagagatggaatggatccagacttcacatatcgaaaaagactagatttagatttaacccagtttgtagacatttgcatagatcaagcaaaactagaagagtttgaagagaaagcatcagaactttacaagaaatttgaaaaagagtttaccgaccaccaagaaactcaggctgaattgcagaaaaaagaggcaaagattaatgagcttcaagcagagctacaagcttttaagtctcagtttggtgccttgccagctgattgtaatattcctttgcctccctctaaagaaggtggaactggccactcagcacttcctcctccgcctccactgccttctggtggaggggtgccgcctccacctcctcccccaccacctcctccacttccaggaatgcggatgccattcagtggtcctgtgcctccaccacctcccctgggattccttggaggacaaaattctcctcctctaccaatcctgccatttgggttgaaaccaaagaaagaatttaaacctgaaatcagcatgagaagattgaattggttaaagatcagacctcatgaaatgactgaaaactgtttctggataaaagtaaatgaaaataagtatgaaaacgtggatttgctttgtaaacttgagaatacattttgttgccaacaaaaagagagaagagaagaggaagatattgaagagaagaaatcgattaagaaaaaaattaaagaacttaagtttttagattctaaaattgcccagaacctttcaatcttcctgagctcttttcgggtgccatatgaggaaatcagaatgatgatattggaagtagatgaaacacggttggcagagtctatgattcagaacttaataaagcatcttcctgatcaagagcaattaaattcattgtctcagttcaagagtgaatatagcaacttatgtgaacctgagcagtttgtggttgtgatgagcaatgtgaagagactacggccacggctcagtgctattctctttaagcttcagtttgaagagcaggtgaacaacatcaaacctgacatcatggctgtcagtactgcctgcgaagagataaagaagagcaaaagctttagcaagttgctggaacttgtattgctaatgggaaactacatgaatgctggctcccggaatgctcaaaccttcggatttaaccttagctctctctgtaaactaaaggacacaaaatcagcagatcagaaaacaacgctacttcatttcctggtagaaatatgtgaagagaagtaccctgatatactgaattttgtggatgatttggaacctttagacaaagctagtaaagtctctgtagaaacgctggaaaagaatttgaggcagatgggaaggcagcttcaacagcttgagaaggaattggaaacctttccccctcctgaggacttgcatgacaagtttgtgacaaagatgtccagatttgttatcagtgcaaaagaacaatatgagacactttcgaagttacacgaaaacatggaaaagttataccagagtataataggatactatgccattgatgtgaagaaggtgtctgtggaagactttcttactgacctgaataacttcagaaccacattcatgcaagcaataaaggagaatatcaaaaaaagagaagcagaggaaaaagaaaaacgtgtcagaatagctaaagaattagcagagcgagaaagactcgaacgccaacaaaagaaaaagcgtttattagaaatgaagactgagggtgatgagacaggagtgatggataatctgctggaggccttgcagtccggggctgccttccgcgacagaagaaaaaggacaccgatgccaaaagatgttcggcagagtctcagtccaatgtctcagaggcctgttctgaaagtttgtaaccatgaaaatcagaaagtgcagttgacagaagggtcacgttcacactacaatatcaattgcaactcaacaaggactccagtcgccaaggagcttaattataatctagacactcatacgtctactgggaggatcaaggcagctgagaagaaggaagcgtgtaatgtagaaagcaacagaaaaaaggaaacggaacttcttggctctttttctaaaaatgaatcagttcccgaagttgaagccctgctggcaagattacgagctttataagttaaactggtttttaaaaaaaatgattaagccaaatataaagccatgctctaaactataacacttgaaaaaattgcttttatgtaagtgactttatatagttttaaattatgatatatattagaaaaataaagctaaatatatgattgcaatgctttttctatgtactggaggttttggtttattcaagattgtaccgggctttaatccttttttttttttttttgtctcctggtattcctcagttctttatttggtggttaaattatacatattgctttagagagcaggtaggtggccatgtgttcagcagtgtgtccttaagaaaataccatctttctaagccactggaatttttactttactatttttaacattaatggatgtcaggtcatcaacctcaagtctttacatatccatgtatattccatatatattgtttatataggcccaagtttctccttaattgggatctatatactaccagcacaacatcaaaaacatgtaattgaatacatcagagctatatatgtaaggaaatgactggtgaccccattatcatcattgttgaattcatgttaagtagaccctctaggggaccataaggcaattgagcacataacgaaaaatgatgcaataagaatgtatgcactctctttgccaaatgcatgtgcttttgtgtaacgtggatgtaaacagaattgcagtgctgccgaaattcttgatcttggctaagagagtatttttccccttgtaattatgactctgagataaaattgccattttgaaatttccaaagtaacaactttttttattttatgaataaacttgggattgcaatttctctgatctgacaatcaataactttaacaaagatctaaataagtgtttcaaggaaagttttcctaagcaaatgtaatattacctcatttgggcatcattactctgttaattctatatcaaaggaaataaacttgctacttgcactaaatgaaaaaaaa

SEQ ID NO: 126710 - DNA, 2735 bp, Homo sapiens
  Payload ID: 4843
  Gene Symbol: DIAPH3
  Gene Name: diaphanous-related formin 3
  Uniprot ID: Q9NSV4
  ENST ID: ENST00000465066
  CDS Start-End: 180-2729
ggaacctggcattgatcctcagtttagaacaggccagttaccatattgtccggagtgggtccttgacattcaggaaagatacatccttagacctttcaaaatttgtcatgcctctctaacctaaaacagccctcattaaatgcactttaatccgagcactgtatggcttggaaagaattatgagtgaggagaggagcctttccttattggccaaagccgtggatcccagacaccccaatatgatgacagatgtggttaaacttctctctgcggtatgcattgtaggggaagaaagcatccttgaagaagttttagaagctttaacttcagctggtgaagaaaaaaaaattgacagatttttttgtattgtggaaggcctccggcacaattcagttcaactgcaagtagcttgtatgcagctcatcaatgccctggttacatctcctgatgatttggatttcaggcttcacatcagaaatgaatttatgcgttgtggattgaaagagatattgccaaatttaaaatgcattaagaatgatggcctggatatccaacttaaagtctttgatgagcataaagaagaagatttgtttgagttatcccatcgccttgaagatattagagctgaacttgatgaagcatatgatgtttacaacatggtgtggagcacagttaaagaaactagagcagagggatattttatttctattcttcagcatcttttgctgattcgaaatgattattttataaggcaacaatacttcaaattaattgatgagtgtgtatcccagattgtattgcatagagatggaatggatccagacttcacatatcgaaaaagactagatttagatttaacccagtttgtagacatttgcatagatcaagcaaaactagaagagtttgaagagaaagcatcagaactttacaagaaatttgaaaaagagtttaccgaccaccaagaaactcaggctgaattgcagaaaaaagaggcaaagattaatgagcttcaagcagagctacaagcttttaagtctcagtttggtgccttgccagctgattgtaatattcctttgcctccctctaaagaaggtggaactggccactcagcacttcctcctccgcctccactgccttctggtggaggggtgccgcctccacctcctcccccaccacctcctccacttccaggaatgcggatgccattcagtggtcctgtgcctccaccacctcccctgggattccttggaggacaaaattctcctcctctaccaatcctgccatttgggttgaaaccaaagaaagaatttaaacctgaaatcagcatgagaagattgaattggttaaagatcagacctcatgaaatgactgaaaactgtttctggataaaagtaaatgaaaataagtatgaaaacgtggatttgctttgtaaacttgagaatacattttgttgccaacaaaaagagagaagagaagaggaagatattgaagagaagaaatcgattaagaaaaaaattaaagaacttaagtttttagattctaaaattgcccagaacctttcaatcttcctgagctcttttcgggtgccatatgaggaaatcagaatgatgatattggaagtagatgaaacacggttggcagagtctatgattcagaacttaataaagcatcttcctgatcaagagcaattaaattcattgtctcagttcaagagtgaatatagcaacttatgtgaacctgagcagtttgtggttgtgatgagcaatgtgaagagactacggccacggctcagtgctattctctttaagcttcagtttgaagagcaggtgaacaacatcaaacctgacatcatggctgtcagtactgcctgcgaagagataaagaagagcaaaagctttagcaagttgctggaacttgtattgctaatgggaaactacatgaatgctggctcccggaatgctcaaaccttcggatttaaccttagctctctctgtaaactaaaggacacaaaatcagcagatcagaaaacaacgctacttcatttcctggtagaaatatgtgaagagaagtaccctgatatactgaattttgtggatgatttggaacctttagacaaagctagtaaagtctctgtagaaacgctggaaaagaatttgaggcagatgggaaggcagcttcaacagcttgagaaggaattggaaacctttccccctcctgaggacttgcatgacaagtttgtgacaaagatgtccagatttgttatcagtgcaaaagaacaatatgagacactttcgaagttacacgaaaacatggaaaagttataccagagtataataggatactatgccattgatgtgaagaaggtgtctgtggaagactttcttactgacctgaataacttcagaaccacattcatgcaagcaataaaggagaatatcaaaaaaagagaagcagaggaaaaagaaaaacgtgtcagaatagctaaagaattagcagagcgagaaagactcgaacgccaacaaaagaaaaagcgtttattagaaatgaagactgagggtgatgagacaggagtgatggataatctgctggaggccttgcagtccggggctgccttccgcgacagaagaaaaaggacaccgatgccaaaagatgttcggcagagtctcagtccaatgtctcagaggcctgttctgaaagtttgtaaccatggtaataaaccgtatttataaattgca

SEQ ID NO: 126711 - DNA, 2249 bp, Homo sapiens
  Payload ID: 4843
  Gene Symbol: DIAPH3
  Gene Name: diaphanous-related formin 3
  Uniprot ID: Q9NSV4
  ENST ID: ENST00000498416
  CDS Start-End: 149-2224
ggccagttaccatattgtccggagtgggtccttgacattcaggaaagatacatccttagacctttcaaaatttgtcatgcctctctaacctaaaacagccctcattaaatgcactttaatccgagcactgtatggcttggaaagaattatgagtgaggagaggagcctttccttattggccaaagccgtggatcccagacaccccaatatgatgacagatgtggttaaacttctctctgcggtatgcattgtaggggaagaaagcatccttgaagaagttttagaagctttaacttcagctggtgaagaaaaaaaaattgacagatttttttgtattgtggaaggcctccggcacaattcagttcaactgcaagtagcttgtatgcagctcatcaatgccctggttacatctcctgatgatttggatttcaggcttcacatcagaaatgaatttatgcgttgtggattgaaagagatattgccaaatttaaaatgcattaagaatgatggcctggatatccaacttaaagtctttgatgagcataaagaagaagatttgtttgagttatcccatcgccttgaagatattagagctgaacttgatgaagcatatgatgtttacaacatggtgtggagcacagttaaagaaactagagcagagggatattttatttctattcttcagcatcttttgctgattcgaaatgattattttataaggcaacaatacttcaaattaattgatgagtgtgtatcccagattgtattgcatagagatggaatggatccagacttcacatatcgaaaaagactagatttagatttaacccagtttgtagacatttgcatagatcaagcaaaactagaagagtttgaagagaaagcatcagaactttacaagaaatttgaaaaagagtttaccgaccaccaagaaactcaggctgaattgcagaaaaaagaggcaaagattaatgagcttcaagcagagctacaagcttttaagtctcagtttggtgccttgccagctgattgtaatattcctttgcctccctctaaagaaggtggaactggccactcagcacttcctcctccgcctccactgccttctggtggaggggtgccgcctccacctcctcccccaccacctcctccacttccaggaatgcggatgccattcagtggtcctgtgcctccaccacctcccctgggattccttggaggacaaaattctcctcctctaccaatcctgccatttgggttgaaaccaaagaaagaatttaaacctgaaatcagcatgagaagattgaattggttaaagatcagacctcatgaaatgactgaaaactgtttctggataaaagtaaatgaaaataagtatgaaaacgtggatttgctttgtaaacttgagaatacattttgttgccaacaaaaagagagaagagaagaggaagatattgaagagaagaaatcgattaagaaaaaaattaaagaacttaagtttttagattctaaaattgcccagaacctttcaatcttcctgagctcttttcgggtgccatatgaggaaatcagaatgatgatattggaagtagatgaaacacggttggcagagtctatgattcagaacttaataaagcatcttcctgatcaagagcaattaaattcattgtctcagttcaagagtgaatatagcaacttatgtgaacctgagcagtttgtggttgtgatgagcaatgtgaagagactacggccacggctcagtgctattctctttaagcttcagtttgaagagcaggtgaacaacatcaaacctgacatcatggctgtcagtactgcctgcgaagagataaagaagagcaaaagctttagcaagttgctggaacttgtattgctaatgggaaactacatgaatgctggctcccggaatgctcaaaccttcggatttaaccttagctctctctgtaaactaaaggacacaaaatcagcagatcagaaaacaacgctacttcatttcctggtagaaatatgtgaagagaagtaccctgatatactgaattttgtggatgatttggaacctttagacaaagctagtaaaggtttgtgcctttttaagaaacatttcatggctctgatcttcagtgctaaaagactgaaaattataccttttatttgtatgtactttccactttctcacagtgttttcatacccaatatctcattttaaaaataaagagagttgtaggatatta

SEQ ID NO: 126712 - DNA, 714 bp, Homo sapiens
  Payload ID: 4844
  Gene Symbol: DBI
  Gene Name: diazepam binding inhibitor (GABA receptor modulator, acyl-CoA binding protein)
  Uniprot ID: P07108
  ENST ID: ENST00000311521
  CDS Start-End: 172-486
gtgcacagccaggctgcgaaggtgcagcgggcgggaggcccgttgggggctcagccggctgccagaagctctcgggctctttccttccgtgcccctcacttgctcatgggcccatgcctagccctgattcgttggacagagcctttgtagacccttgtctgagaccgagctatgtggggcgacctctggctcctcccgcctgcctctgccaatccgggcactgggacagaggctgagtttgagaaagctgcagaggaggttaggcaccttaagaccaagccatcggatgaggagatgctgttcatctatggccactacaaacaagcaactgtgggcgacataaatacagaacggcccgggatgttggacttcacgggcaaggccaagtgggatgcctggaatgagctgaaagggacttccaaggaagatgccatgaaagcttacatcaacaaagtagaagagctaaagaaaaaatacgggatatgagagactggatttggttactgtgccatgtgtttatcctaaactgagacaatgccttgtttttttctaataccgtggatggtgggaattcgggaaaataaccagttaaaccagctactcaaggctgctcaccatacggctctaacagattaggggctaaaacgattactgactttccttgagtagtttttatctgaaatcaattaaaagtgtatttgttactttaaataa

SEQ ID NO: 126713 - DNA, 637 bp, Homo sapiens
  Payload ID: 4844
  Gene Symbol: DBI
  Gene Name: diazepam binding inhibitor (GABA receptor modulator, acyl-CoA binding protein)
  Uniprot ID: P07108
  ENST ID: ENST00000355857
  CDS Start-End: 132-395
ggtgctcgcccgagcagggttggggcgagtggaccgcgcctctaaaggcgcttgccagtgcaatctgggcgatcgcttcctggtcctcgcctcctccgctgtctccctggagttcttgcaagtcggccaggatgtctcaggctgagtttgagaaagctgcagaggaggttaggcaccttaagaccaagccatcggatgaggagatgctgttcatctatggccactacaaacaagcaactgtgggcgacataaatacagaacggcccgggatgttggacttcacgggcaaggccaagtgggatgcctggaatgagctgaaagggacttccaaggaagatgccatgaaagcttacatcaacaaagtagaagagctaaagaaaaaatacgggatatgagagactggatttggttactgtgccatgtgtttatcctaaactgagacaatgccttgtttttttctaataccgtggatggtgggaattcgggaaaataaccagttaaaccagctactcaaggctgctcaccatacggctctaacagattaggggctaaaacgattactgactttccttgagtagtttttatctgaaatcaattaaaagtgtatttgttactttaaataactttagtgatctga

SEQ ID NO: 126714 - DNA, 599 bp, Homo sapiens
  Payload ID: 4844
  Gene Symbol: DBI
  Gene Name: diazepam binding inhibitor (GABA receptor modulator, acyl-CoA binding protein)
  Uniprot ID: P07108
  ENST ID: ENST00000393103
  CDS Start-End: 244-510
ggaggggaccaacgggctccggcgctgacaccgcggcactcatgccctgtcccctttcagctgtttccagcatactgtgccccgtctgtcctcaggccagggcttcgctgcagccccggccactccctagtgcctggcccggtggtggccaggcagttggccgcgctgcttctcccgcagaggggacccccactgggggcgaaggcttggcctgccctcttcactgctgtatttccagacctgatgcctgcgtttgctgagtttgagaaagctgcagaggaggttaggcaccttaagaccaagccatcggatgaggagatgctgttcatctatggccactacaaacaagcaactgtgggcgacataaatacagaacggcccgggatgttggacttcacgggcaaggccaagtgggatgcctggaatgagctgaaagggacttccaaggaagatgccatgaaagcttacatcaacaaagtagaagagctaaagaaaaaatacgggatatgagagactggatttggttactgtgccatgtgtttatcctaaactgagacaatgccttgtttttttctaataccgtggatggtgggaattcg

SEQ ID NO: 126715 - DNA, 576 bp, Homo sapiens
  Payload ID: 4844
  Gene Symbol: DBI
  Gene Name: diazepam binding inhibitor (GABA receptor modulator, acyl-CoA binding protein)
  Uniprot ID: P07108
  ENST ID: ENST00000409094
  CDS Start-End: 99-413
gcgatcgcttcctggtcctcgcctcctccgctgtctccctggagttcttgcaagtcggccaggatgtctcagtgtagacccttgtctgagaccgagctatgtggggcgacctctggctcctcccgcctgcctctgccaatccgggcactgggacagaggctgagtttgagaaagctgcagaggaggttaggcaccttaagaccaagccatcggatgaggagatgctgttcatctatggccactacaaacaagcaactgtgggcgacataaatacagaacggcccgggatgttggacttcacgggcaaggccaagtgggatgcctggaatgagctgaaagggacttccaaggaagatgccatgaaagcttacatcaacaaagtagaagagctaaagaaaaaatacgggatatgagagactggatttggttactgtgccatgtgtttatcctaaactgagacaatgccttgtttttttctaataccgtggatggtgggaattcgggaaaataaccagttaaaccagctactcaaggctgctcaccatacggctctaacagattaggggctaaaacgat

SEQ ID NO: 126716 - DNA, 740 bp, Homo sapiens
  Payload ID: 4844
  Gene Symbol: DBI
  Gene Name: diazepam binding inhibitor (GABA receptor modulator, acyl-CoA binding protein)
  Uniprot ID: P07108
  ENST ID: ENST00000535757
  CDS Start-End: 194-508
gctcgcccgagcagggttggggcgagtggaccgcgcctctaaaggcgcttgccagtgcaatctgggcgatcgcttcctggtcctcgcctcctccgctgtctccctggagttcttgcaagtcggccaggatgtctcaggtacagcgcgtgcacagccaggctgcgaagtgtagacccttgtctgagaccgagctatgtggggcgacctctggctcctcccgcctgcctctgccaatccgggcactgggacagaggctgagtttgagaaagctgcagaggaggttaggcaccttaagaccaagccatcggatgaggagatgctgttcatctatggccactacaaacaagcaactgtgggcgacataaatacagaacggcccgggatgttggacttcacgggcaaggccaagtgggatgcctggaatgagctgaaagggacttccaaggaagatgccatgaaagcttacatcaacaaagtagaagagctaaagaaaaaatacgggatatgagagactggatttggttactgtgccatgtgtttatcctaaactgagacaatgccttgtttttttctaataccgtggatggtgggaattcgggaaaataaccagttaaaccagctactcaaggctgctcaccatacggctctaacagattaggggctaaaacgattactgactttccttgagtagtttttatctgaaatcaattaaaagtgtatttgttactttaaataacttt

SEQ ID NO: 126717 - DNA, 757 bp, Homo sapiens
  Payload ID: 4844
  Gene Symbol: DBI
  Gene Name: diazepam binding inhibitor (GABA receptor modulator, acyl-CoA binding protein)
  ENST ID: ENST00000542275
  CDS Start-End: 237-668
caggatgtctcaggtacagcgcgtgcacagccaggctgcgaaggtgcagcgggcgggaggcccgttgggggctcagccggctgccagaagctctcgggctctttccttccgtgcccctcacttgctcatgggcccatgcctagccctgattcgttggacagagccttgtgagcgggattttccgtttggggatttctaaatctgctgcccaccccgcaactgccggaaagttgcccatggggtggacttcgctgtgtagcgggagaggggtgggagtcgagggtgcttggagagatgggggaaggggttgcacggattggaggagcgaggagactcagtccccatcccgaagcacagggcaggacgtcgcggcggagtggggaagcgaggagtccgtggccgagagcttggaggctgagtttgagaaagctgcagaggaggttaggcaccttaagaccaagccatcggatgaggagatgctgttcatctatggccactacaaacaagcaactgtgggcgacataaatacagaacggcccgggatgttggacttcacgggcaaggccaagtgggatgcctggaatgagctgaaagggacttccaaggaagatgccatgaaagcttacatcaacaaagtagaagagctaaagaaaaaatacgggatatgagagactggatttggttactgtgccatgtgtttatcctaaactgagacaatgccttgtttttttctaataccgtggatggtgggaattcg

SEQ ID NO: 126718 - DNA, 654 bp, Homo sapiens
  Payload ID: 4844
  Gene Symbol: DBI
  Gene Name: diazepam binding inhibitor (GABA receptor modulator, acyl-CoA binding protein)
  ENST ID: ENST00000535617
  CDS Start-End: 129-422
gctcgcccgagcagggttggggcgagtggaccgcgcctctaaaggcgcttgccagtgcaatctgggcgatcgcttcctggtcctcgcctcctccgctgtctccctggagttcttgcaagtcggccaggatgtctcaggtacagcgcgtgcacagccaggctgcgaaggctgagtttgagaaagctgcagaggaggttaggcaccttaagaccaagccatcggatgaggagatgctgttcatctatggccactacaaacaagcaactgtgggcgacataaatacagaacggcccgggatgttggacttcacgggcaaggccaagtgggatgcctggaatgagctgaaagggacttccaaggaagatgccatgaaagcttacatcaacaaagtagaagagctaaagaaaaaatacgggatatgagagactggatttggttactgtgccatgtgtttatcctaaactgagacaatgccttgtttttttctaataccgtggatggtgggaattcgggaaaataaccagttaaaccagctactcaaggctgctcaccatacggctctaacagattaggggctaaaacgattactgactttccttgagtagtttttatctgaaatcaattaaaagtgtatttgttactttaaataacttt

SEQ ID NO: 126719 - DNA, 554 bp, Homo sapiens
  Payload ID: 4844
  Gene Symbol: DBI
  Gene Name: diazepam binding inhibitor (GABA receptor modulator, acyl-CoA binding protein)
  Uniprot ID: P07108
  ENST ID: ENST00000627093
  CDS Start-End: 76-465
agtgcaatctgggcgatcgcttcctggtcctcgcctcctccgctgtctccctggagttcttgcaagtcggccaggatgtctcagcacagggcaggacgtcgcggcggagtggggaagcgaggagtccgtggccgagagcttggaggtcaggggaagtacggggccggctgctcagagtgcgggacgaggagaatcgcggcccggggagaggctgagtttgagaaagctgcagaggaggttaggcaccttaagaccaagccatcggatgaggagatgctgttcatctatggccactacaaacaagcaactgtgggcgacataaatacagaacggcccgggatgttggacttcacgggcaaggccaagtgggatgcctggaatgagctgaaagggacttccaaggaagatgccatgaaagcttacatcaacaaagtagaagagctaaagaaaaaatacgggatatgagagactggatttggttactgtgccatgtgtttatcctaaactgagacaatgccttgtttttttctaataccgtggatggtgggaattcg

SEQ ID NO: 126720 - DNA, 620 bp, Homo sapiens
  Payload ID: 4844
  Gene Symbol: DBI
  Gene Name: diazepam binding inhibitor (GABA receptor modulator, acyl-CoA binding protein)
  Uniprot ID: P07108
  ENST ID: ENST00000627305
  CDS Start-End: 85-531
tgcccaccccgcaactgccggaaagttgcccatggggtggacttcgctgtgtagcgggagaggggtgggagtcgagggtgcttgatggagagatgggggaaggggttgcacggattggaggagcgaggagactcagtccccatcccgaagcacagggcaggacgtcgcggcggagtggggaagcgaggagtccgtggccgagagcttggaggtcaggggaagtacggggccggctgctcagagtgcgggacgaggagaatcgcggcccggggagaggctgagtttgagaaagctgcagaggaggttaggcaccttaagaccaagccatcggatgaggagatgctgttcatctatggccactacaaacaagcaactgtgggcgacataaatacagaacggcccgggatgttggacttcacgggcaaggccaagtgggatgcctggaatgagctgaaagggacttccaaggaagatgccatgaaagcttacatcaacaaagtagaagagctaaagaaaaaatacgggatatgagagactggatttggttactgtgccatgtgtttatcctaaactgagacaatgccttgtttttttctaataccgtggatggtgggaattcg

SEQ ID NO: 126721 - DNA, 887 bp, Homo sapiens
  Payload ID: 4845
  Gene Symbol: DCXR
  Gene Name: dicarbonyl/L-xylulose reductase
  Uniprot ID: Q7Z4W1
  ENST ID: ENST00000306869
  CDS Start-End: 51-785
agagcttcaagttccgcagccccagtgcggagggcggagactgcgccgacatggagctgttcctcgcgggccgccgggtgctggtcaccggggcaggcaaaggtatagggcgcggcacggtccaggcgctgcacgcgacgggcgcgcgggtggtggctgtgagccggactcaggcggatcttgacagccttgtccgcgagtgcccggggatagaacccgtgtgcgtggacctgggtgactgggaggccaccgagcgggcgctgggcagcgtgggccccgtggacctgctggtgaacaacgccgctgtcgccctgctgcagcccttcctggaggtcaccaaggaggcctttgacagatcctttgaggtgaacctgcgtgcggtcatccaggtgtcgcagattgtggccaggggcttaatagcccggggagtcccaggggccatcgtgaatgtctccagccagtgctcccagcgggcagtaactaaccatagcgtctactgctccaccaagggtgccctggacatgctgaccaaggtgatggccctagagctcgggccccacaagatccgagtgaatgcagtaaaccccacagtggtgatgacgtccatgggccaggccacctggagtgacccccacaaggccaagactatgctgaaccgaatcccacttggcaagtttgctgaggtagagcacgtggtgaacgccatcctctttctgctgagtgaccgaagtggcatgaccacgggttccactttgccggtggaagggggcttctgggcctgctgagctccctccacacacctcaagccccatgccgtgctcatcctacccccaatccctccaataaacctgattctgctgcccagactatgtgctattcctaggctg

SEQ ID NO: 126722 - DNA, 430 bp, Homo sapiens
  Payload ID: 4845
  Gene Symbol: DCXR
  Gene Name: dicarbonyl/L-xylulose reductase
  ENST ID: ENST00000579155
  CDS Start-End: 8-430
cgccgacatggagctgttcctcgcgggccgccgggtgctggtcaccggggcaggcaaaggtgggcggcggggaaagtgcccggggatagaacccgtgtgcgtggacctgggtgactgggaggccaccgagcgggcgctgggcagcgtgggccccgtggacctgctggtgaacaacgccgctgtcgccctgctgcagcccttcctggaggtcaccaaggaggcctttgacagatcctttgaggtgaacctgcgtgcggtcatccaggtgtcgcagattgtggccaggggcttaatagcccggggagtcccaggggccatcgtgaatgtctccagccagtgctcccagcgggcagtaactaaccatagcgtctactgctccaccaagggtgccctggacatgctgaccaaggtgatggccctagagctcggg

SEQ ID NO: 126723 - DNA, 676 bp, Homo sapiens
  Payload ID: 4845
  Gene Symbol: DCXR
  Gene Name: dicarbonyl/L-xylulose reductase
  ENST ID: ENST00000582900
  CDS Start-End: 6-676
ccgacatggagctgttcctcgcgggccgccgggtgctggtcaccggggcaggcaaagggcgcggcacggtccaggcgctgcacgcgacgggcgcgcgggtggtggctgtgagccggactcaggcggatcttgacagccttgtccgcgagtgcccggggatagaacccgtgtgcgtggacctgggtgactgggaggccaccgagcgggcgctgggcagcgtgggccccgtggacctgctggtgaacaacgccgctgtcgccctgctgcagcccttcctggaggtcaccaaggaggcctttgacagatcctttgaggtgaacctgcgtgcggtcatccaggtgtcgcagattgtggccaggggcttaatagcccggggagtcccaggggccatcgtgaatgtctccagccagtgctcccagcgggcagtaactaaccatagcgtctactgctccaccaagggtgccctggacatgctgaccaaggtgatggccctagagctcgggccccacaagatccgagtgaatgcagtaaaccccacagtggtgatgacgtccatgggccaggccacctggagtgacccccacaaggccaagactatgctgaaccgaatcccacttggcaagtttgctgaggtagagcacgtggtgaacgccatcctctttctgctgagtgaccg

SEQ ID NO: 126724 - DNA, 429 bp, Homo sapiens
  Payload ID: 4845
  Gene Symbol: DCXR
  Gene Name: dicarbonyl/L-xylulose reductase
  ENST ID: ENST00000577712
  CDS Start-End: 1-429
ggagctgttcctcgcgggccgccgggtgctggtcaccggggcaggcaaagtgcccggggatagaacccgtgtgcgtggacctgggtgactgggaggccaccgagcgggcgctgggcagcgtgggccccgtggacctgctggtgaacaacgccgctgtcgccctgctgcagcccttcctggaggtcaccaaggaggcctttgacagatcctttgaggtgaacctgcgtgcggtcatccaggtgtcgcagattgtggccaggggcttaatagcccggggagtcccaggggccatcgtgaatgtctccagccagtgctcccagcgggcagtaactaaccatagcgtctactgctccaccaagggtgccctggacatgctgaccaaggtgatggccctagagctcgggccccacaagatccgagtgaatgcag

SEQ ID NO: 126725 - DNA, 573 bp, Homo sapiens
  Payload ID: 4845
  Gene Symbol: DCXR
  Gene Name: dicarbonyl/L-xylulose reductase
  ENST ID: ENST00000577532
  CDS Start-End: 1-531
gtgtgcgtggacctgggtgactgggaggccaccgagcgggcgctgggcagcgtgggccccgtggacctgctggtgaacaacgccgctgtcgccctgctgcagcccttcctggaggtcaccaaggaggcctttgacagatcctttgaggtgaacctgcgtgcggtcatccaggtgtcgcagattgtggccaggggcttaatagcccggggagtcccaggggccatcgtgaatgtctccagccagtgctcccagcgggcagtaactaaccatagcgtctactgctccaccaagggtgccctggacatgctgaccaaggtgatggccctagagctcgggccccacaagatccgagtgaatgcagtaaaccccacagtggtgatgacgtccatgggccaggccacctggagtgacccccacaaggccaagactatgctgaaccgaatcccacttggcaagtttgctggtcccacagatgtacataaccgaggggcagagaaaacagtcgtgtatgcagaaataagtaggaagtgacgtttgccgattttgcttttaataacacaaattgtaagcttc

SEQ ID NO: 126726 - DNA, 341 bp, Homo sapiens
  Payload ID: 4845
  Gene Symbol: DCXR
  Gene Name: dicarbonyl/L-xylulose reductase
  ENST ID: ENST00000579004
  CDS Start-End: 1-260
tgatggccctagagctcgggccccacaagatccgagtgaatgcagtaaaccccacagtggtgatgacgtccatgggccaggccacctggagtgacccccacaaggccaagactatgctgaaccgaatcccacttggcaagtttgctggtgagtcagaggtagagcacgtggtgaacgccatcctctttctgctgagtgaccgaagtggcatgaccacgggttccactttgccggtggaagggggcttctgggcctgctgagctccctccacacacctcaagccccatgccgtgctcatcctacccccaatccctccaataaacctgattctgctgcccaga

SEQ ID NO: 126727 - DNA, 766 bp, Homo sapiens
  Payload ID: 4845
  Gene Symbol: DCXR
  Gene Name: dicarbonyl/L-xylulose reductase
  ENST ID: ENST00000581584
  CDS Start-End: 1-676
gctgttcctcgcgggccgccgggtgctggtcaccggggcaggcaaaggtatagggcgcggcacggtccaggcgctgcacgcgacgggcgcgcgggtggtggctgtgagccggactcaggcggatcttgacagccttgtccgcgagtgcccggggatagaacccgtgtgcgtggacctgggtgactgggaggccaccgagcgggcgctgggcagcgtgggccccgtggacctgctggtgaacaacgccgctgtcgccctgctgcagcccttcctggaggtcaccaaggaggcctttgacagatcctttgaggtgaacctgcgtgcggtcatccaggtgtcgcagattgtggccaggggcttaatagcccggggagtcccaggggccatcgtgaatgtctccagccagtgctcccagcgggcagtaactaaccatagcgtctactgctccaccaagggtgccctggacatgctgaccaaggtgatggccctagagctcgggccccacaagatccgagtgaatgcagtaaaccccacagtggtgatgacgtccatgggccaggccacctggagtgacccccacaaggccaagactatgctgaaccgaatcccacttggcaagtttgctggtgagtcaggtgggagcccagccagcgtggtgccagcagtccctaggtagagcacgtggtgaacgccatcctctttctgctgagtgaccgaagtggcatgaccacgggttccactttgccggtggaagggggcttctggg

SEQ ID NO: 126728 - DNA, 452 bp, Homo sapiens
  Payload ID: 4845
  Gene Symbol: DCXR
  Gene Name: dicarbonyl/L-xylulose reductase
  ENST ID: ENST00000579821
  CDS Start-End: 1-301
gctggtgaacaacgccgctgtcgccctgctgcagcccttcctggaggtcaccaaggaggcctttgacagatcctttgaggtgaacctgcgtgcggtcatccaggtgtcgcagattgtggccaggggcttaatagcccggggagtcccaggggccatcgtgaatgtctccagccagtgctcccagcgggcagtaactaaccatagcgtctactgctccaccaagggtgccctggacatgctgaccaaggtgatggccctagagctcgggccccacaagctgtcccggtgtagatccgagtgaatgcagtaaaccccacagtggtgatgacgtccatgggccaggccacctggagtgacccccacaaggccaagactatgctgaaccgaatcccacttggcaagtttgctgaggtagagcacgtggtgaacgccatcctctttctgctgagtga

SEQ ID NO: 126729 - DNA, 10277 bp, Homo sapiens
  Payload ID: 4846
  Gene Symbol: DICER1
  Gene Name: dicer 1, ribonuclease type III
  Uniprot ID: Q9UPY3
  ENST ID: ENST00000343455
  CDS Start-End: 239-6007
cggaggcgcggcgcaggctgctgcaggcccaggtgaatggagtaacctgacagcggggacgaggcgacggcgagcgcgaggaaatggcggcgggggcggcggcgccgggcggctccgggaggcctgggctgtgacgcgcgcgccggagcggggtccgatggttctcgaaggcccgcggcgccccgtgctgcagtaagctgtgctagaacaaaaatgcaatgaaagaaacactggatgaatgaaaagccctgctttgcaacccctcagcatggcaggcctgcagctcatgacccctgcttcctcaccaatgggtcctttctttggactgccatggcaacaagaagcaattcatgataacatttatacgccaagaaaatatcaggttgaactgcttgaagcagctctggatcataataccatcgtctgtttaaacactggctcagggaagacatttattgcagtactactcactaaagagctgtcctatcagatcaggggagacttcagcagaaatggaaaaaggacggtgttcttggtcaactctgcaaaccaggttgctcaacaagtgtcagctgtcagaactcattcagatctcaaggttggggaatactcaaacctagaagtaaatgcatcttggacaaaagagagatggaaccaagagtttactaagcaccaggttctcattatgacttgctatgtcgccttgaatgttttgaaaaatggttacttatcactgtcagacattaaccttttggtgtttgatgagtgtcatcttgcaatcctagaccacccctatcgagaaattatgaagctctgtgaaaattgtccatcatgtcctcgcattttgggactaactgcttccattttaaatgggaaatgtgatccagaggaattggaagaaaagattcagaaactagagaaaattcttaagagtaatgctgaaactgcaactgacctggtggtcttagacaggtatacttctcagccatgtgagattgtggtggattgtggaccatttactgacagaagtgggctttatgaaagactgctgatggaattagaagaagcacttaattttatcaatgattgtaatatatctgtacattcaaaagaaagagattctactttaatttcgaaacagatactatcagactgtcgtgccgtattggtagttctgggaccctggtgtgcagataaagtagctggaatgatggtaagagaactacagaaatacatcaaacatgagcaagaggagctgcacaggaaatttttattgtttacagacactttcctaaggaaaatacatgcactatgtgaagagcacttctcacctgcctcacttgacctgaaatttgtaactcctaaagtaatcaaactgctcgaaatcttacgcaaatataaaccatatgagcgacagcagtttgaaagcgttgagtggtataataatagaaatcaggataattatgtgtcatggagtgattctgaggatgatgatgaggatgaagaaattgaagaaaaagagaagccagagacaaattttccttctccttttaccaacattttgtgcggaattatttttgtggaaagaagatacacagcagttgtcttaaacagattgataaaggaagctggcaaacaagatccagagctggcttatatcagtagcaatttcataactggacatggcattgggaagaatcagcctcgcaacaaacagatggaagcagaattcagaaaacaggaagaggtacttaggaaatttcgagcacatgagaccaacctgcttattgcaacaagtattgtagaagagggtgttgatataccaaaatgcaacttggtggttcgttttgatttgcccacagaatatcgatcctatgttcaatctaaaggaagagcaagggcacccatctctaattatataatgttagcggatacagacaaaataaaaagttttgaagaagaccttaaaacctacaaagctattgaaaagatcttgagaaacaagtgttccaagtcggttgatactggtgagactgacattgatcctgtcatggatgatgatgacgttttcccaccatatgtgttgaggcctgacgatggtggtccacgagtcacaatcaacacggccattggacacatcaatagatactgtgctagattaccaagtgatccgtttactcatctagctcctaaatgcagaacccgagagttgcctgatggtacattttattcaactctttatctgccaattaactcacctcttcgagcctccattgttggtccaccaatgagctgtgtacgattggctgaaagagttgtagctctcatttgctgtgagaaactgcacaaaattggcgaactggatgaccatttgatgccagttgggaaagagactgttaaatatgaagaggagcttgatttgcatgatgaagaagagaccagtgttccaggaagaccaggttccacgaaacgaaggcagtgctacccaaaagcaattccagagtgtttgagggatagttatcccagacctgatcagccctgttacctgtatgtgataggaatggttttaactacacctttacctgatgaactcaactttagaaggcggaagctctatcctcctgaagataccacaagatgctttggaatactgacggccaaacccatacctcagattccacactttcctgtgtacacacgctctggagaggttaccatatccattgagttgaagaagtctggtttcatgttgtctctacaaatgcttgagttgattacaagacttcaccagtatatattctcacatattcttcggcttgaaaaacctgcactagaatttaaacctacagacgctgattcagcatactgtgttctacctcttaatgttgttaatgactccagcactttggatattgactttaaattcatggaagatattgagaagtctgaagctcgcataggcattcccagtacaaagtatacaaaagaaacaccctttgtttttaaattagaagattaccaagatgccgttatcattccaagatatcgcaattttgatcagcctcatcgattttatgtagctgatgtgtacactgatcttaccccactcagtaaatttccttcccctgagtatgaaacttttgcagaatattataaaacaaagtacaaccttgacctaaccaatctcaaccagccactgctggatgtggaccacacatcttcaagacttaatcttttgacacctcgacatttgaatcagaaggggaaagcgcttcctttaagcagtgctgagaagaggaaagccaaatgggaaagtctgcagaataaacagatactggttccagaactctgtgctatacatccaattccagcatcactgtggagaaaagctgtttgtctccccagcatactttatcgccttcactgccttttgactgcagaggagctaagagcccagactgccagcgatgctggcgtgggagtcagatcacttcctgcggattttagataccctaacttagacttcgggtggaaaaaatctattgacagcaaatctttcatctcaatttctaactcctcttcagctgaaaatgataattactgtaagcacagcacaattgtccctgaaaatgctgcacatcaaggtgctaatagaacctcctctctagaaaatcatgaccaaatgtctgtgaactgcagaacgttgctcagcgagtcccctggtaagctccacgttgaagtttcagcagatcttacagcaattaatggtctttcttacaatcaaaatctcgccaatggcagttatgatttagctaacagagacttttgccaaggaaatcagctaaattactacaagcaggaaatacccgtgcaaccaactacctcatattccattcagaatttatacagttacgagaaccagccccagcccagcgatgaatgtactctcctgagtaataaataccttgatggaaatgctaacaaatctacctcagatggaagtcctgtgatggccgtaatgcctggtacgacagacactattcaagtgctcaagggcaggatggattctgagcagagcccttctattgggtactcctcaaggactcttggccccaatcctggacttattcttcaggctttgactctgtcaaacgctagtgatggatttaacctggagcggcttgaaatgcttggcgactcctttttaaagcatgccatcaccacatatctattttgcacttaccctgatgcgcatgagggccgcctttcatatatgagaagcaaaaaggtcagcaactgtaatctgtatcgccttggaaaaaagaagggactacccagccgcatggtggtgtcaatatttgatccccctgtgaattggcttcctcctggttatgtagtaaatcaagacaaaagcaacacagataaatgggaaaaagatgaaatgacaaaagactgcatgctggcgaatggcaaactggatgaggattacgaggaggaggatgaggaggaggagagcctgatgtggagggctccgaaggaagaggctgactatgaagatgatttcctggagtatgatcaggaacatatcagatttatagataatatgttaatggggtcaggagcttttgtaaagaaaatctctctttctcctttttcaaccactgattctgcatatgaatggaaaatgcccaaaaaatcctccttaggtagtatgccattttcatcagattttgaggattttgactacagctcttgggatgcaatgtgctatctggatcctagcaaagctgttgaagaagatgactttgtggtggggttctggaatccatcagaagaaaactgtggtgttgacacgggaaagcagtccatttcttacgacttgcacactgagcagtgtattgctgacaaaagcatagcggactgtgtggaagccctgctgggctgctatttaaccagctgtggggagagggctgctcagcttttcctctgttcactggggctgaaggtgctcccggtaattaaaaggactgatcgggaaaaggccctgtgccctactcgggagaatttcaacagccaacaaaagaacctttcagtgagctgtgctgctgcttctgtggccagttcacgctcttctgtattgaaagactcggaatatggttgtttgaagattccaccaagatgtatgtttgatcatccagatgcagataaaacactgaatcaccttatatcggggtttgaaaattttgaaaagaaaatcaactacagattcaagaataaggcttaccttctccaggcttttacacatgcctcctaccactacaatactatcactgattgttaccagcgcttagaattcctgggagatgcgattttggactacctcataaccaagcacctttatgaagacccgcggcagcactccccgggggtcctgacagacctgcggtctgccctggtcaacaacaccatctttgcatcgctggctgtaaagtacgactaccacaagtacttcaaagctgtctctcctgagctcttccatgtcattgatgactttgtgcagtttcagcttgagaagaatgaaatgcaaggaatggattctgagcttaggagatctgaggaggatgaagagaaagaagaggatattgaagttccaaaggccatgggggatatttttgagtcgcttgctggtgccatttacatggatagtgggatgtcactggagacagtctggcaggtgtactatcccatgatgcggccactaatagaaaagttttctgcaaatgtaccccgttcccctgtgcgagaattgcttgaaatggaaccagaaactgccaaatttagcccggctgagagaacttacgacgggaaggtcagagtcactgtggaagtagtaggaaaggggaaatttaaaggtgttggtcgaagttacaggattgccaaatctgcagcagcaagaagagccctccgaagcctcaaagctaatcaacctcaggttcccaatagctgaaaccgctttttaaaattcaaaacaagaaacaaaacaaaaaaaattaaggggaaaattatttaaatcggaaaggaagacttaaagttgttagtgagtggaatgaattgaaggcagaatttaaagtttggttgataacaggatagataacagaataaaacatttaacatatgtataaaattttggaactaattgtagttttagttttttgcgcaaacacaatcttatcttctttcctcacttctgctttgtttaaatcacaagagtgctttaatgatgacatttagcaagtgctcaaaataattgacaggttttgtttttttttttttgagtttatgtcagctttgcttagtgttagaaggccatggagcttaaacctccagcagtccctaggatgatgtagattcttctccatctctccgtgtgtgcagtagtgccagtcctgcagtagttgataagctgaatagaaagataaggttttcgagaggagaagtgcgccaatgttgtcttttctttccacgttatactgtgtaaggtgatgttcccggtcgctgttgcacctgatagtaagggacagatttttaatgaacattggctggcatgttggtgaatcacattttagttttctgatgccacatagtcttgcataaaaaagggttcttgccttaaaagtgaaaccttcatggatagtctttaatctctgatctttttggaacaaactgttttacattcctttcattttattatgcattagacgttgagacagcgtgatacttacaactcactagtatagttgtaacttattacaggatcatactaaaatttctgtcatatgtatactgaagacattttaaaaaccagaatatgtagtctacggatattttttatcataaaaatgatctttggctaaacaccccattttactaaagtcctcctgccaggtagttcccactgatggaaatgtttatggcaaataattttgccttctaggctgttgctctaacaaaataaaccttagacatatcacacctaaaatatgctgcagattttataattgattggttacttatttaagaagcaaaacacagcacctttacccttagtctcctcacataaatttcttactatacttttcataatgttgcatgcatatttcacctaccaaagctgtgctgttaatgccgtgaaagtttaacgtttgcgataaactgccgtaattttgatacatctgtgatttaggtcattaatttagataaactagctcattatttccatctttggaaaaggaaaaaaaaaaaaacttctttaggcatttgcctaagtttctttaattagacttgtaggcactcttcacttaaatacctcagttcttcttttcttttgcatgcatttttcccctgtttggtgctatgtttatgtattatgcttgaaattttaatttttttttttttgcactgtaactataatacctcttaatttacctttttaaaagctgtgggtcagtcttgcactcccatcaacataccagtagaggtttgctgcaatttgccccgttaattatgcttgaagtttaagaaagctgagcagaggtgtctcatatttcccagcacatgattctgaacttgatgcttcgtggaatgctgcatttatatgtaagtgacatttgaatactgtccttcctgctttatctgcatcatccacccacagagaaatgcctctgtgcgagtgcaccgacagaaaactgtcagctctgctttctaaggaaccctgagtgaggggggtattaagcttctccagtgttttttgttgtctccaatcttaaacttaaattgagatctaaattattaaacgagtttttgagcaaattaggtgacttgttttaaaaatatttaattccgatttggaaccttagatgtctatttgattttttaaaaaaccttaatgtaagatatgaccagttaaaacaaagcaattcttgaattatataactgtaaaagtgtgcagttaacaaggctggatgtgaattttattctgagggtgatttgtgatcaagtttaatcacaaatctcttaatatttataaactacctgatgccaggagcttagggctttgcattgtgtctaatacattgatcccagtgttacgggattctcttgattcctggcaccaaaatcagattgttttcacagttatgattcccagtgggagaaaaatgcctcaatatatttgtaaccttaagaagagtatttttttgttaatactaagatgttcaaacttagacatgattaggtcatacattctcaggggttcaaatttccttctaccattcaaatgttttatcaacagcaaacttcagccgtttcactttttgttggagaaaaatagtagattttaatttgactcacagtttgaagcattctgtgatcccctggttactgagttaaaaaataaaaaagtacgagttagacatatgaaatggttatgaacgcttttgtgctgctgatttttaatgctgtaaagttttcctgtgtttagcttgttgaaatgttttgcatctgtcaattaaggaaaaaaaaaatcactctatgttgccccactttagagccctgtgtgccaccctgtgttcctgtgattgcaatgtgagaccgaatgtaatatggaaaacctaccagtggggtgtggttgtgccctgagcacgtgtgtaaaggactggggaggcgtgtcttgaaaaagcaactgcagaaattccttatgatgattgtgtgcaagttagttaacatgaaccttcatttgtaaattttttaaaatttcttttataatatgctttccgcagtcctaactatgctgcgttttataatagctttttcccttctgttctgttcatgtagcacagataagcattgcacttggtaccatgctttacctcatttcaagaaaatatgcttaacagagaggaaaaaaatgtggtttggccttgctgctgttttgatttatggaatttgaaaaagataattataatgcctgcaatgtgtcatatactcgcacaacttaaataggtcatttttgtctgtggcatttttactgtttgtgaaagtatgaaacagatttgttaactgaactcttaattatgtttttaaaatgtttgttatatttcttttcttttttcttttatattacgtgaagtgatgaaatttagaatgacctctaacactcctgtaattgtcttttaaaatactgatatttttatttgttaataatactttgccctcagaaagattctgataccctgccttgacaacatgaaacttgaggctgctttggttcatgaatccaggtgttcccccggcagtcggcttcttcagtcgctccctggaggcaggtgggcactgcagaggatcactggaatccagatcgagcgcagttcatgcacaaggccccgttgatttaaaatattggatcttgctctgttagggtgtctaatccctttacacaagattgaagccaccaaactgagaccttgatacctttttttaactgcatctgaaattatgttaagagtctttaacccatttgcattatctgcagaagagaaactcatgtcatgtttattacctatatggttgttttaattacatttgaataattatatttttccaaccactgattacttttcaggaatttaattatttccagataaatttctttattttatattgtacatgaaaagttttaaagatatgtttaagaccaagactattaaaatgatttttaaagttgttggagacgccaatagcaatatctaggaaatttgcattgagaccattgtattttccactagcagtgaaaatgatttttcacaactaacttgtaaatatattttaatcattacttctttttttctagtccatttttatttggacatcaaccacagacaatttaaattttatagatgcactaagaattcactgcagcagcaggttacatagcaaaaatgcaaaggtgaacaggaagtaaatttctggcttttctgctgtaaatagtgaaggaaaattactaaaatcaagtaaaactaatgcatattatttgattgacaataaaatatttaccatcacatgctgcagctgttttttaaggaacatgatgtcattcattcatacagtaatcatgctgcagaaatttgcagtctgcaccttatggatcacaattacctttagttgttttttttgtaataattgtagccaagtaaatctccaataaagttatcgtctgttca

SEQ ID NO: 126730 - DNA, 10220 bp, Homo sapiens
  Payload ID: 4846
  Gene Symbol: DICER1
  Gene Name: dicer 1, ribonuclease type III
  Uniprot ID: Q9UPY3
  ENST ID: ENST00000393063
  CDS Start-End: 183-5951
ggaaactctgaaagaacttagaatcagcattttgagagcagaagcttgggcatgctgtgattttccaataaactgctatcacaatgtcaaaatgcagttcagacaagagcaacacagagatctcaaacattaaaacgtaagctgtgctagaacaaaaatgcaatgaaagaaacactggatgaatgaaaagccctgctttgcaacccctcagcatggcaggcctgcagctcatgacccctgcttcctcaccaatgggtcctttctttggactgccatggcaacaagaagcaattcatgataacatttatacgccaagaaaatatcaggttgaactgcttgaagcagctctggatcataataccatcgtctgtttaaacactggctcagggaagacatttattgcagtactactcactaaagagctgtcctatcagatcaggggagacttcagcagaaatggaaaaaggacggtgttcttggtcaactctgcaaaccaggttgctcaacaagtgtcagctgtcagaactcattcagatctcaaggttggggaatactcaaacctagaagtaaatgcatcttggacaaaagagagatggaaccaagagtttactaagcaccaggttctcattatgacttgctatgtcgccttgaatgttttgaaaaatggttacttatcactgtcagacattaaccttttggtgtttgatgagtgtcatcttgcaatcctagaccacccctatcgagaaattatgaagctctgtgaaaattgtccatcatgtcctcgcattttgggactaactgcttccattttaaatgggaaatgtgatccagaggaattggaagaaaagattcagaaactagagaaaattcttaagagtaatgctgaaactgcaactgacctggtggtcttagacaggtatacttctcagccatgtgagattgtggtggattgtggaccatttactgacagaagtgggctttatgaaagactgctgatggaattagaagaagcacttaattttatcaatgattgtaatatatctgtacattcaaaagaaagagattctactttaatttcgaaacagatactatcagactgtcgtgccgtattggtagttctgggaccctggtgtgcagataaagtagctggaatgatggtaagagaactacagaaatacatcaaacatgagcaagaggagctgcacaggaaatttttattgtttacagacactttcctaaggaaaatacatgcactatgtgaagagcacttctcacctgcctcacttgacctgaaatttgtaactcctaaagtaatcaaactgctcgaaatcttacgcaaatataaaccatatgagcgacagcagtttgaaagcgttgagtggtataataatagaaatcaggataattatgtgtcatggagtgattctgaggatgatgatgaggatgaagaaattgaagaaaaagagaagccagagacaaattttccttctccttttaccaacattttgtgcggaattatttttgtggaaagaagatacacagcagttgtcttaaacagattgataaaggaagctggcaaacaagatccagagctggcttatatcagtagcaatttcataactggacatggcattgggaagaatcagcctcgcaacaaacagatggaagcagaattcagaaaacaggaagaggtacttaggaaatttcgagcacatgagaccaacctgcttattgcaacaagtattgtagaagagggtgttgatataccaaaatgcaacttggtggttcgttttgatttgcccacagaatatcgatcctatgttcaatctaaaggaagagcaagggcacccatctctaattatataatgttagcggatacagacaaaataaaaagttttgaagaagaccttaaaacctacaaagctattgaaaagatcttgagaaacaagtgttccaagtcggttgatactggtgagactgacattgatcctgtcatggatgatgatgacgttttcccaccatatgtgttgaggcctgacgatggtggtccacgagtcacaatcaacacggccattggacacatcaatagatactgtgctagattaccaagtgatccgtttactcatctagctcctaaatgcagaacccgagagttgcctgatggtacattttattcaactctttatctgccaattaactcacctcttcgagcctccattgttggtccaccaatgagctgtgtacgattggctgaaagagttgtagctctcatttgctgtgagaaactgcacaaaattggcgaactggatgaccatttgatgccagttgggaaagagactgttaaatatgaagaggagcttgatttgcatgatgaagaagagaccagtgttccaggaagaccaggttccacgaaacgaaggcagtgctacccaaaagcaattccagagtgtttgagggatagttatcccagacctgatcagccctgttacctgtatgtgataggaatggttttaactacacctttacctgatgaactcaactttagaaggcggaagctctatcctcctgaagataccacaagatgctttggaatactgacggccaaacccatacctcagattccacactttcctgtgtacacacgctctggagaggttaccatatccattgagttgaagaagtctggtttcatgttgtctctacaaatgcttgagttgattacaagacttcaccagtatatattctcacatattcttcggcttgaaaaacctgcactagaatttaaacctacagacgctgattcagcatactgtgttctacctcttaatgttgttaatgactccagcactttggatattgactttaaattcatggaagatattgagaagtctgaagctcgcataggcattcccagtacaaagtatacaaaagaaacaccctttgtttttaaattagaagattaccaagatgccgttatcattccaagatatcgcaattttgatcagcctcatcgattttatgtagctgatgtgtacactgatcttaccccactcagtaaatttccttcccctgagtatgaaacttttgcagaatattataaaacaaagtacaaccttgacctaaccaatctcaaccagccactgctggatgtggaccacacatcttcaagacttaatcttttgacacctcgacatttgaatcagaaggggaaagcgcttcctttaagcagtgctgagaagaggaaagccaaatgggaaagtctgcagaataaacagatactggttccagaactctgtgctatacatccaattccagcatcactgtggagaaaagctgtttgtctccccagcatactttatcgccttcactgccttttgactgcagaggagctaagagcccagactgccagcgatgctggcgtgggagtcagatcacttcctgcggattttagataccctaacttagacttcgggtggaaaaaatctattgacagcaaatctttcatctcaatttctaactcctcttcagctgaaaatgataattactgtaagcacagcacaattgtccctgaaaatgctgcacatcaaggtgctaatagaacctcctctctagaaaatcatgaccaaatgtctgtgaactgcagaacgttgctcagcgagtcccctggtaagctccacgttgaagtttcagcagatcttacagcaattaatggtctttcttacaatcaaaatctcgccaatggcagttatgatttagctaacagagacttttgccaaggaaatcagctaaattactacaagcaggaaatacccgtgcaaccaactacctcatattccattcagaatttatacagttacgagaaccagccccagcccagcgatgaatgtactctcctgagtaataaataccttgatggaaatgctaacaaatctacctcagatggaagtcctgtgatggccgtaatgcctggtacgacagacactattcaagtgctcaagggcaggatggattctgagcagagcccttctattgggtactcctcaaggactcttggccccaatcctggacttattcttcaggctttgactctgtcaaacgctagtgatggatttaacctggagcggcttgaaatgcttggcgactcctttttaaagcatgccatcaccacatatctattttgcacttaccctgatgcgcatgagggccgcctttcatatatgagaagcaaaaaggtcagcaactgtaatctgtatcgccttggaaaaaagaagggactacccagccgcatggtggtgtcaatatttgatccccctgtgaattggcttcctcctggttatgtagtaaatcaagacaaaagcaacacagataaatgggaaaaagatgaaatgacaaaagactgcatgctggcgaatggcaaactggatgaggattacgaggaggaggatgaggaggaggagagcctgatgtggagggctccgaaggaagaggctgactatgaagatgatttcctggagtatgatcaggaacatatcagatttatagataatatgttaatggggtcaggagcttttgtaaagaaaatctctctttctcctttttcaaccactgattctgcatatgaatggaaaatgcccaaaaaatcctccttaggtagtatgccattttcatcagattttgaggattttgactacagctcttgggatgcaatgtgctatctggatcctagcaaagctgttgaagaagatgactttgtggtggggttctggaatccatcagaagaaaactgtggtgttgacacgggaaagcagtccatttcttacgacttgcacactgagcagtgtattgctgacaaaagcatagcggactgtgtggaagccctgctgggctgctatttaaccagctgtggggagagggctgctcagcttttcctctgttcactggggctgaaggtgctcccggtaattaaaaggactgatcgggaaaaggccctgtgccctactcgggagaatttcaacagccaacaaaagaacctttcagtgagctgtgctgctgcttctgtggccagttcacgctcttctgtattgaaagactcggaatatggttgtttgaagattccaccaagatgtatgtttgatcatccagatgcagataaaacactgaatcaccttatatcggggtttgaaaattttgaaaagaaaatcaactacagattcaagaataaggcttaccttctccaggcttttacacatgcctcctaccactacaatactatcactgattgttaccagcgcttagaattcctgggagatgcgattttggactacctcataaccaagcacctttatgaagacccgcggcagcactccccgggggtcctgacagacctgcggtctgccctggtcaacaacaccatctttgcatcgctggctgtaaagtacgactaccacaagtacttcaaagctgtctctcctgagctcttccatgtcattgatgactttgtgcagtttcagcttgagaagaatgaaatgcaaggaatggattctgagcttaggagatctgaggaggatgaagagaaagaagaggatattgaagttccaaaggccatgggggatatttttgagtcgcttgctggtgccatttacatggatagtgggatgtcactggagacagtctggcaggtgtactatcccatgatgcggccactaatagaaaagttttctgcaaatgtaccccgttcccctgtgcgagaattgcttgaaatggaaccagaaactgccaaatttagcccggctgagagaacttacgacgggaaggtcagagtcactgtggaagtagtaggaaaggggaaatttaaaggtgttggtcgaagttacaggattgccaaatctgcagcagcaagaagagccctccgaagcctcaaagctaatcaacctcaggttcccaatagctgaaaccgctttttaaaattcaaaacaagaaacaaaacaaaaaaaattaaggggaaaattatttaaatcggaaaggaagacttaaagttgttagtgagtggaatgaattgaaggcagaatttaaagtttggttgataacaggatagataacagaataaaacatttaacatatgtataaaattttggaactaattgtagttttagttttttgcgcaaacacaatcttatcttctttcctcacttctgctttgtttaaatcacaagagtgctttaatgatgacatttagcaagtgctcaaaataattgacaggttttgtttttttttttttgagtttatgtcagctttgcttagtgttagaaggccatggagcttaaacctccagcagtccctaggatgatgtagattcttctccatctctccgtgtgtgcagtagtgccagtcctgcagtagttgataagctgaatagaaagataaggttttcgagaggagaagtgcgccaatgttgtcttttctttccacgttatactgtgtaaggtgatgttcccggtcgctgttgcacctgatagtaagggacagatttttaatgaacattggctggcatgttggtgaatcacattttagttttctgatgccacatagtcttgcataaaaaagggttcttgccttaaaagtgaaaccttcatggatagtctttaatctctgatctttttggaacaaactgttttacattcctttcattttattatgcattagacgttgagacagcgtgatacttacaactcactagtatagttgtaacttattacaggatcatactaaaatttctgtcatatgtatactgaagacattttaaaaaccagaatatgtagtctacggatattttttatcataaaaatgatctttggctaaacaccccattttactaaagtcctcctgccaggtagttcccactgatggaaatgtttatggcaaataattttgccttctaggctgttgctctaacaaaataaaccttagacatatcacacctaaaatatgctgcagattttataattgattggttacttatttaagaagcaaaacacagcacctttacccttagtctcctcacataaatttcttactatacttttcataatgttgcatgcatatttcacctaccaaagctgtgctgttaatgccgtgaaagtttaacgtttgcgataaactgccgtaattttgatacatctgtgatttaggtcattaatttagataaactagctcattatttccatctttggaaaaggaaaaaaaaaaaaacttctttaggcatttgcctaagtttctttaattagacttgtaggcactcttcacttaaatacctcagttcttcttttcttttgcatgcatttttcccctgtttggtgctatgtttatgtattatgcttgaaattttaatttttttttttttgcactgtaactataatacctcttaatttacctttttaaaagctgtgggtcagtcttgcactcccatcaacataccagtagaggtttgctgcaatttgccccgttaattatgcttgaagtttaagaaagctgagcagaggtgtctcatatttcccagcacatgattctgaacttgatgcttcgtggaatgctgcatttatatgtaagtgacatttgaatactgtccttcctgctttatctgcatcatccacccacagagaaatgcctctgtgcgagtgcaccgacagaaaactgtcagctctgctttctaaggaaccctgagtgaggggggtattaagcttctccagtgttttttgttgtctccaatcttaaacttaaattgagatctaaattattaaacgagtttttgagcaaattaggtgacttgttttaaaaatatttaattccgatttggaaccttagatgtctatttgattttttaaaaaaccttaatgtaagatatgaccagttaaaacaaagcaattcttgaattatataactgtaaaagtgtgcagttaacaaggctggatgtgaattttattctgagggtgatttgtgatcaagtttaatcacaaatctcttaatatttataaactacctgatgccaggagcttagggctttgcattgtgtctaatacattgatcccagtgttacgggattctcttgattcctggcaccaaaatcagattgttttcacagttatgattcccagtgggagaaaaatgcctcaatatatttgtaaccttaagaagagtatttttttgttaatactaagatgttcaaacttagacatgattaggtcatacattctcaggggttcaaatttccttctaccattcaaatgttttatcaacagcaaacttcagccgtttcactttttgttggagaaaaatagtagattttaatttgactcacagtttgaagcattctgtgatcccctggttactgagttaaaaaataaaaaagtacgagttagacatatgaaatggttatgaacgcttttgtgctgctgatttttaatgctgtaaagttttcctgtgtttagcttgttgaaatgttttgcatctgtcaattaaggaaaaaaaaaatcactctatgttgccccactttagagccctgtgtgccaccctgtgttcctgtgattgcaatgtgagaccgaatgtaatatggaaaacctaccagtggggtgtggttgtgccctgagcacgtgtgtaaaggactggggaggcgtgtcttgaaaaagcaactgcagaaattccttatgatgattgtgtgcaagttagttaacatgaaccttcatttgtaaattttttaaaatttcttttataatatgctttccgcagtcctaactatgctgcgttttataatagctttttcccttctgttctgttcatgtagcacagataagcattgcacttggtaccatgctttacctcatttcaagaaaatatgcttaacagagaggaaaaaaatgtggtttggccttgctgctgttttgatttatggaatttgaaaaagataattataatgcctgcaatgtgtcatatactcgcacaacttaaataggtcatttttgtctgtggcatttttactgtttgtgaaagtatgaaacagatttgttaactgaactcttaattatgtttttaaaatgtttgttatatttcttttcttttttcttttatattacgtgaagtgatgaaatttagaatgacctctaacactcctgtaattgtcttttaaaatactgatatttttatttgttaataatactttgccctcagaaagattctgataccctgccttgacaacatgaaacttgaggctgctttggttcatgaatccaggtgttcccccggcagtcggcttcttcagtcgctccctggaggcaggtgggcactgcagaggatcactggaatccagatcgagcgcagttcatgcacaaggccccgttgatttaaaatattggatcttgctctgttagggtgtctaatccctttacacaagattgaagccaccaaactgagaccttgatacctttttttaactgcatctgaaattatgttaagagtctttaacccatttgcattatctgcagaagagaaactcatgtcatgtttattacctatatggttgttttaattacatttgaataattatatttttccaaccactgattacttttcaggaatttaattatttccagataaatttctttattttatattgtacatgaaaagttttaaagatatgtttaagaccaagactattaaaatgatttttaaagttgttggagacgccaatagcaatatctaggaaatttgcattgagaccattgtattttccactagcagtgaaaatgatttttcacaactaacttgtaaatatattttaatcattacttctttttttctagtccatttttatttggacatcaaccacagacaatttaaattttatagatgcactaagaattcactgcagcagcaggttacatagcaaaaatgcaaaggtgaacaggaagtaaatttctggcttttctgctgtaaatagtgaaggaaaattactaaaatcaagtaaaactaatgcatattatttgattgacaataaaatatttaccatcacatgctgcagctgttttttaaggaacatgatgtcattcattcatacagtaatcatgctgcagaaatttgcagtctgcaccttatggatcacaattacctttagttgttttttttgtaataattgtagccaagtaaatctccaataaagttatcgtctgttc

SEQ ID NO: 126731 - DNA, 607 bp, Homo sapiens
  Payload ID: 4846
  Gene Symbol: DICER1
  Gene Name: dicer 1, ribonuclease type III
  ENST ID: ENST00000531162
  CDS Start-End: 397-607
gtccgatggttctcgaaggcccgcggcgccccgtgctgcaggttacctagggtatgaattaatacagacttggaaactctgaaagaacttagaatcagcattttgagagcagaagcttgggcatgctgtgattttccaataaactgctatcacaatgtcaaaatgcagttcagacaagagcaacacagagatctcaaacattaaaacgtttcatagagtaatagcaatgaacactccaaagcagtgcaagagaggaaattcccttctgtggggcgaggaaatcctgctgacagtaaagccagtggtaggctttcacacagatatttgaatccctgaccctctgtttgaaggtaagctgtgctagaacaaaaatgcaatgaaagaaacactggatgaatgaaaagccctgctttgcaacccctcagcatggcaggcctgcagctcatgacccctgcttcctcaccaatgggtcctttctttggactgccatggcaacaagaagcaattcatgataacatttatacgccaagaaaatatcaggttgaactgcttgaagcagctctggatcataataccatcgtctgtttaaacactggctcagggaaga

SEQ ID NO: 126732 - DNA, 498 bp, Homo sapiens
  Payload ID: 4846
  Gene Symbol: DICER1
  Gene Name: dicer 1, ribonuclease type III
  ENST ID: ENST00000529720
  CDS Start-End: 288-498
gtccgatggttctcgaaggcccgcggcgccccgtgctgcaggttacctagggtatgaattaatacagacttggaaactctgaaagaacttagaatcagcattttgagagttactactgggttatttggatttctcagccaaagcagaagcttgggcatgctgtgattttccaataaactgctatcacaatgtcaaaatgcagttcagacaagagcaacacagagatctcaaacattaaaacgtaagctgtgctagaacaaaaatgcaatgaaagaaacactggatgaatgaaaagccctgctttgcaacccctcagcatggcaggcctgcagctcatgacccctgcttcctcaccaatgggtcctttctttggactgccatggcaacaagaagcaattcatgataacatttatacgccaagaaaatatcaggttgaactgcttgaagcagctctggatcataataccatcgtctgtttaaacactggctcagggaaga

SEQ ID NO: 126733 - DNA, 6179 bp, Homo sapiens
  Payload ID: 4846
  Gene Symbol: DICER1
  Gene Name: dicer 1, ribonuclease type III
  Uniprot ID: Q9UPY3
  ENST ID: ENST00000527414
  CDS Start-End: 234-6002
gctggtttcatcctaaggctggatcttttcatgggtctgtgtagtgtaattgcagcagcaaatgggactaataatttcatgagtcatctttagagggaaagaaagacaactgcttctcttcaaccatcaaatgaaagtcctaaattttttgctgttggatgagcatgaaccaattcctctggccagggtaagctgtgctagaacaaaaatgcaatgaaagaaacactggatgaatgaaaagccctgctttgcaacccctcagcatggcaggcctgcagctcatgacccctgcttcctcaccaatgggtcctttctttggactgccatggcaacaagaagcaattcatgataacatttatacgccaagaaaatatcaggttgaactgcttgaagcagctctggatcataataccatcgtctgtttaaacactggctcagggaagacatttattgcagtactactcactaaagagctgtcctatcagatcaggggagacttcagcagaaatggaaaaaggacggtgttcttggtcaactctgcaaaccaggttgctcaacaagtgtcagctgtcagaactcattcagatctcaaggttggggaatactcaaacctagaagtaaatgcatcttggacaaaagagagatggaaccaagagtttactaagcaccaggttctcattatgacttgctatgtcgccttgaatgttttgaaaaatggttacttatcactgtcagacattaaccttttggtgtttgatgagtgtcatcttgcaatcctagaccacccctatcgagaaattatgaagctctgtgaaaattgtccatcatgtcctcgcattttgggactaactgcttccattttaaatgggaaatgtgatccagaggaattggaagaaaagattcagaaactagagaaaattcttaagagtaatgctgaaactgcaactgacctggtggtcttagacaggtatacttctcagccatgtgagattgtggtggattgtggaccatttactgacagaagtgggctttatgaaagactgctgatggaattagaagaagcacttaattttatcaatgattgtaatatatctgtacattcaaaagaaagagattctactttaatttcgaaacagatactatcagactgtcgtgccgtattggtagttctgggaccctggtgtgcagataaagtagctggaatgatggtaagagaactacagaaatacatcaaacatgagcaagaggagctgcacaggaaatttttattgtttacagacactttcctaaggaaaatacatgcactatgtgaagagcacttctcacctgcctcacttgacctgaaatttgtaactcctaaagtaatcaaactgctcgaaatcttacgcaaatataaaccatatgagcgacagcagtttgaaagcgttgagtggtataataatagaaatcaggataattatgtgtcatggagtgattctgaggatgatgatgaggatgaagaaattgaagaaaaagagaagccagagacaaattttccttctccttttaccaacattttgtgcggaattatttttgtggaaagaagatacacagcagttgtcttaaacagattgataaaggaagctggcaaacaagatccagagctggcttatatcagtagcaatttcataactggacatggcattgggaagaatcagcctcgcaacaaacagatggaagcagaattcagaaaacaggaagaggtacttaggaaatttcgagcacatgagaccaacctgcttattgcaacaagtattgtagaagagggtgttgatataccaaaatgcaacttggtggttcgttttgatttgcccacagaatatcgatcctatgttcaatctaaaggaagagcaagggcacccatctctaattatataatgttagcggatacagacaaaataaaaagttttgaagaagaccttaaaacctacaaagctattgaaaagatcttgagaaacaagtgttccaagtcggttgatactggtgagactgacattgatcctgtcatggatgatgatgacgttttcccaccatatgtgttgaggcctgacgatggtggtccacgagtcacaatcaacacggccattggacacatcaatagatactgtgctagattaccaagtgatccgtttactcatctagctcctaaatgcagaacccgagagttgcctgatggtacattttattcaactctttatctgccaattaactcacctcttcgagcctccattgttggtccaccaatgagctgtgtacgattggctgaaagagttgtagctctcatttgctgtgagaaactgcacaaaattggcgaactggatgaccatttgatgccagttgggaaagagactgttaaatatgaagaggagcttgatttgcatgatgaagaagagaccagtgttccaggaagaccaggttccacgaaacgaaggcagtgctacccaaaagcaattccagagtgtttgagggatagttatcccagacctgatcagccctgttacctgtatgtgataggaatggttttaactacacctttacctgatgaactcaactttagaaggcggaagctctatcctcctgaagataccacaagatgctttggaatactgacggccaaacccatacctcagattccacactttcctgtgtacacacgctctggagaggttaccatatccattgagttgaagaagtctggtttcatgttgtctctacaaatgcttgagttgattacaagacttcaccagtatatattctcacatattcttcggcttgaaaaacctgcactagaatttaaacctacagacgctgattcagcatactgtgttctacctcttaatgttgttaatgactccagcactttggatattgactttaaattcatggaagatattgagaagtctgaagctcgcataggcattcccagtacaaagtatacaaaagaaacaccctttgtttttaaattagaagattaccaagatgccgttatcattccaagatatcgcaattttgatcagcctcatcgattttatgtagctgatgtgtacactgatcttaccccactcagtaaatttccttcccctgagtatgaaacttttgcagaatattataaaacaaagtacaaccttgacctaaccaatctcaaccagccactgctggatgtggaccacacatcttcaagacttaatcttttgacacctcgacatttgaatcagaaggggaaagcgcttcctttaagcagtgctgagaagaggaaagccaaatgggaaagtctgcagaataaacagatactggttccagaactctgtgctatacatccaattccagcatcactgtggagaaaagctgtttgtctccccagcatactttatcgccttcactgccttttgactgcagaggagctaagagcccagactgccagcgatgctggcgtgggagtcagatcacttcctgcggattttagataccctaacttagacttcgggtggaaaaaatctattgacagcaaatctttcatctcaatttctaactcctcttcagctgaaaatgataattactgtaagcacagcacaattgtccctgaaaatgctgcacatcaaggtgctaatagaacctcctctctagaaaatcatgaccaaatgtctgtgaactgcagaacgttgctcagcgagtcccctggtaagctccacgttgaagtttcagcagatcttacagcaattaatggtctttcttacaatcaaaatctcgccaatggcagttatgatttagctaacagagacttttgccaaggaaatcagctaaattactacaagcaggaaatacccgtgcaaccaactacctcatattccattcagaatttatacagttacgagaaccagccccagcccagcgatgaatgtactctcctgagtaataaataccttgatggaaatgctaacaaatctacctcagatggaagtcctgtgatggccgtaatgcctggtacgacagacactattcaagtgctcaagggcaggatggattctgagcagagcccttctattgggtactcctcaaggactcttggccccaatcctggacttattcttcaggctttgactctgtcaaacgctagtgatggatttaacctggagcggcttgaaatgcttggcgactcctttttaaagcatgccatcaccacatatctattttgcacttaccctgatgcgcatgagggccgcctttcatatatgagaagcaaaaaggtcagcaactgtaatctgtatcgccttggaaaaaagaagggactacccagccgcatggtggtgtcaatatttgatccccctgtgaattggcttcctcctggttatgtagtaaatcaagacaaaagcaacacagataaatgggaaaaagatgaaatgacaaaagactgcatgctggcgaatggcaaactggatgaggattacgaggaggaggatgaggaggaggagagcctgatgtggagggctccgaaggaagaggctgactatgaagatgatttcctggagtatgatcaggaacatatcagatttatagataatatgttaatggggtcaggagcttttgtaaagaaaatctctctttctcctttttcaaccactgattctgcatatgaatggaaaatgcccaaaaaatcctccttaggtagtatgccattttcatcagattttgaggattttgactacagctcttgggatgcaatgtgctatctggatcctagcaaagctgttgaagaagatgactttgtggtggggttctggaatccatcagaagaaaactgtggtgttgacacgggaaagcagtccatttcttacgacttgcacactgagcagtgtattgctgacaaaagcatagcggactgtgtggaagccctgctgggctgctatttaaccagctgtggggagagggctgctcagcttttcctctgttcactggggctgaaggtgctcccggtaattaaaaggactgatcgggaaaaggccctgtgccctactcgggagaatttcaacagccaacaaaagaacctttcagtgagctgtgctgctgcttctgtggccagttcacgctcttctgtattgaaagactcggaatatggttgtttgaagattccaccaagatgtatgtttgatcatccagatgcagataaaacactgaatcaccttatatcggggtttgaaaattttgaaaagaaaatcaactacagattcaagaataaggcttaccttctccaggcttttacacatgcctcctaccactacaatactatcactgattgttaccagcgcttagaattcctgggagatgcgattttggactacctcataaccaagcacctttatgaagacccgcggcagcactccccgggggtcctgacagacctgcggtctgccctggtcaacaacaccatctttgcatcgctggctgtaaagtacgactaccacaagtacttcaaagctgtctctcctgagctcttccatgtcattgatgactttgtgcagtttcagcttgagaagaatgaaatgcaaggaatggattctgagcttaggagatctgaggaggatgaagagaaagaagaggatattgaagttccaaaggccatgggggatatttttgagtcgcttgctggtgccatttacatggatagtgggatgtcactggagacagtctggcaggtgtactatcccatgatgcggccactaatagaaaagttttctgcaaatgtaccccgttcccctgtgcgagaattgcttgaaatggaaccagaaactgccaaatttagcccggctgagagaacttacgacgggaaggtcagagtcactgtggaagtagtaggaaaggggaaatttaaaggtgttggtcgaagttacaggattgccaaatctgcagcagcaagaagagccctccgaagcctcaaagctaatcaacctcaggttcccaatagctgaaaccgctttttaaaattcaaaacaagaaacaaaacaaaaaaaattaaggggaaaattatttaaatcggaaaggaagacttaaagttgttagtgagtggaatgaattgaaggcagaatttaaagtttggttgataacaggatagataacagaataaaacatttaacatatgtataaaa

SEQ ID NO: 126734 - DNA, 10331 bp, Homo sapiens
  Payload ID: 4846
  Gene Symbol: DICER1
  Gene Name: dicer 1, ribonuclease type III
  Uniprot ID: Q9UPY3
  ENST ID: ENST00000526495
  CDS Start-End: 293-6061
gcggaagtgggtgtttgttatttccccaaatgcggaggcccctgcaccactaacgcgaggaaacgcaggcgagtgggaaggttacctagggtatgaattaatacagacttggaaactctgaaagaacttagaatcagcattttgagagcagaagcttgggcatgctgtgattttccaataaactgctatcacaatgtcaaaatgcagttcagacaagagcaacacagagatctcaaacattaaaacgtaagctgtgctagaacaaaaatgcaatgaaagaaacactggatgaatgaaaagccctgctttgcaacccctcagcatggcaggcctgcagctcatgacccctgcttcctcaccaatgggtcctttctttggactgccatggcaacaagaagcaattcatgataacatttatacgccaagaaaatatcaggttgaactgcttgaagcagctctggatcataataccatcgtctgtttaaacactggctcagggaagacatttattgcagtactactcactaaagagctgtcctatcagatcaggggagacttcagcagaaatggaaaaaggacggtgttcttggtcaactctgcaaaccaggttgctcaacaagtgtcagctgtcagaactcattcagatctcaaggttggggaatactcaaacctagaagtaaatgcatcttggacaaaagagagatggaaccaagagtttactaagcaccaggttctcattatgacttgctatgtcgccttgaatgttttgaaaaatggttacttatcactgtcagacattaaccttttggtgtttgatgagtgtcatcttgcaatcctagaccacccctatcgagaaattatgaagctctgtgaaaattgtccatcatgtcctcgcattttgggactaactgcttccattttaaatgggaaatgtgatccagaggaattggaagaaaagattcagaaactagagaaaattcttaagagtaatgctgaaactgcaactgacctggtggtcttagacaggtatacttctcagccatgtgagattgtggtggattgtggaccatttactgacagaagtgggctttatgaaagactgctgatggaattagaagaagcacttaattttatcaatgattgtaatatatctgtacattcaaaagaaagagattctactttaatttcgaaacagatactatcagactgtcgtgccgtattggtagttctgggaccctggtgtgcagataaagtagctggaatgatggtaagagaactacagaaatacatcaaacatgagcaagaggagctgcacaggaaatttttattgtttacagacactttcctaaggaaaatacatgcactatgtgaagagcacttctcacctgcctcacttgacctgaaatttgtaactcctaaagtaatcaaactgctcgaaatcttacgcaaatataaaccatatgagcgacagcagtttgaaagcgttgagtggtataataatagaaatcaggataattatgtgtcatggagtgattctgaggatgatgatgaggatgaagaaattgaagaaaaagagaagccagagacaaattttccttctccttttaccaacattttgtgcggaattatttttgtggaaagaagatacacagcagttgtcttaaacagattgataaaggaagctggcaaacaagatccagagctggcttatatcagtagcaatttcataactggacatggcattgggaagaatcagcctcgcaacaaacagatggaagcagaattcagaaaacaggaagaggtacttaggaaatttcgagcacatgagaccaacctgcttattgcaacaagtattgtagaagagggtgttgatataccaaaatgcaacttggtggttcgttttgatttgcccacagaatatcgatcctatgttcaatctaaaggaagagcaagggcacccatctctaattatataatgttagcggatacagacaaaataaaaagttttgaagaagaccttaaaacctacaaagctattgaaaagatcttgagaaacaagtgttccaagtcggttgatactggtgagactgacattgatcctgtcatggatgatgatgacgttttcccaccatatgtgttgaggcctgacgatggtggtccacgagtcacaatcaacacggccattggacacatcaatagatactgtgctagattaccaagtgatccgtttactcatctagctcctaaatgcagaacccgagagttgcctgatggtacattttattcaactctttatctgccaattaactcacctcttcgagcctccattgttggtccaccaatgagctgtgtacgattggctgaaagagttgtagctctcatttgctgtgagaaactgcacaaaattggcgaactggatgaccatttgatgccagttgggaaagagactgttaaatatgaagaggagcttgatttgcatgatgaagaagagaccagtgttccaggaagaccaggttccacgaaacgaaggcagtgctacccaaaagcaattccagagtgtttgagggatagttatcccagacctgatcagccctgttacctgtatgtgataggaatggttttaactacacctttacctgatgaactcaactttagaaggcggaagctctatcctcctgaagataccacaagatgctttggaatactgacggccaaacccatacctcagattccacactttcctgtgtacacacgctctggagaggttaccatatccattgagttgaagaagtctggtttcatgttgtctctacaaatgcttgagttgattacaagacttcaccagtatatattctcacatattcttcggcttgaaaaacctgcactagaatttaaacctacagacgctgattcagcatactgtgttctacctcttaatgttgttaatgactccagcactttggatattgactttaaattcatggaagatattgagaagtctgaagctcgcataggcattcccagtacaaagtatacaaaagaaacaccctttgtttttaaattagaagattaccaagatgccgttatcattccaagatatcgcaattttgatcagcctcatcgattttatgtagctgatgtgtacactgatcttaccccactcagtaaatttccttcccctgagtatgaaacttttgcagaatattataaaacaaagtacaaccttgacctaaccaatctcaaccagccactgctggatgtggaccacacatcttcaagacttaatcttttgacacctcgacatttgaatcagaaggggaaagcgcttcctttaagcagtgctgagaagaggaaagccaaatgggaaagtctgcagaataaacagatactggttccagaactctgtgctatacatccaattccagcatcactgtggagaaaagctgtttgtctccccagcatactttatcgccttcactgccttttgactgcagaggagctaagagcccagactgccagcgatgctggcgtgggagtcagatcacttcctgcggattttagataccctaacttagacttcgggtggaaaaaatctattgacagcaaatctttcatctcaatttctaactcctcttcagctgaaaatgataattactgtaagcacagcacaattgtccctgaaaatgctgcacatcaaggtgctaatagaacctcctctctagaaaatcatgaccaaatgtctgtgaactgcagaacgttgctcagcgagtcccctggtaagctccacgttgaagtttcagcagatcttacagcaattaatggtctttcttacaatcaaaatctcgccaatggcagttatgatttagctaacagagacttttgccaaggaaatcagctaaattactacaagcaggaaatacccgtgcaaccaactacctcatattccattcagaatttatacagttacgagaaccagccccagcccagcgatgaatgtactctcctgagtaataaataccttgatggaaatgctaacaaatctacctcagatggaagtcctgtgatggccgtaatgcctggtacgacagacactattcaagtgctcaagggcaggatggattctgagcagagcccttctattgggtactcctcaaggactcttggccccaatcctggacttattcttcaggctttgactctgtcaaacgctagtgatggatttaacctggagcggcttgaaatgcttggcgactcctttttaaagcatgccatcaccacatatctattttgcacttaccctgatgcgcatgagggccgcctttcatatatgagaagcaaaaaggtcagcaactgtaatctgtatcgccttggaaaaaagaagggactacccagccgcatggtggtgtcaatatttgatccccctgtgaattggcttcctcctggttatgtagtaaatcaagacaaaagcaacacagataaatgggaaaaagatgaaatgacaaaagactgcatgctggcgaatggcaaactggatgaggattacgaggaggaggatgaggaggaggagagcctgatgtggagggctccgaaggaagaggctgactatgaagatgatttcctggagtatgatcaggaacatatcagatttatagataatatgttaatggggtcaggagcttttgtaaagaaaatctctctttctcctttttcaaccactgattctgcatatgaatggaaaatgcccaaaaaatcctccttaggtagtatgccattttcatcagattttgaggattttgactacagctcttgggatgcaatgtgctatctggatcctagcaaagctgttgaagaagatgactttgtggtggggttctggaatccatcagaagaaaactgtggtgttgacacgggaaagcagtccatttcttacgacttgcacactgagcagtgtattgctgacaaaagcatagcggactgtgtggaagccctgctgggctgctatttaaccagctgtggggagagggctgctcagcttttcctctgttcactggggctgaaggtgctcccggtaattaaaaggactgatcgggaaaaggccctgtgccctactcgggagaatttcaacagccaacaaaagaacctttcagtgagctgtgctgctgcttctgtggccagttcacgctcttctgtattgaaagactcggaatatggttgtttgaagattccaccaagatgtatgtttgatcatccagatgcagataaaacactgaatcaccttatatcggggtttgaaaattttgaaaagaaaatcaactacagattcaagaataaggcttaccttctccaggcttttacacatgcctcctaccactacaatactatcactgattgttaccagcgcttagaattcctgggagatgcgattttggactacctcataaccaagcacctttatgaagacccgcggcagcactccccgggggtcctgacagacctgcggtctgccctggtcaacaacaccatctttgcatcgctggctgtaaagtacgactaccacaagtacttcaaagctgtctctcctgagctcttccatgtcattgatgactttgtgcagtttcagcttgagaagaatgaaatgcaaggaatggattctgagcttaggagatctgaggaggatgaagagaaagaagaggatattgaagttccaaaggccatgggggatatttttgagtcgcttgctggtgccatttacatggatagtgggatgtcactggagacagtctggcaggtgtactatcccatgatgcggccactaatagaaaagttttctgcaaatgtaccccgttcccctgtgcgagaattgcttgaaatggaaccagaaactgccaaatttagcccggctgagagaacttacgacgggaaggtcagagtcactgtggaagtagtaggaaaggggaaatttaaaggtgttggtcgaagttacaggattgccaaatctgcagcagcaagaagagccctccgaagcctcaaagctaatcaacctcaggttcccaatagctgaaaccgctttttaaaattcaaaacaagaaacaaaacaaaaaaaattaaggggaaaattatttaaatcggaaaggaagacttaaagttgttagtgagtggaatgaattgaaggcagaatttaaagtttggttgataacaggatagataacagaataaaacatttaacatatgtataaaattttggaactaattgtagttttagttttttgcgcaaacacaatcttatcttctttcctcacttctgctttgtttaaatcacaagagtgctttaatgatgacatttagcaagtgctcaaaataattgacaggttttgtttttttttttttgagtttatgtcagctttgcttagtgttagaaggccatggagcttaaacctccagcagtccctaggatgatgtagattcttctccatctctccgtgtgtgcagtagtgccagtcctgcagtagttgataagctgaatagaaagataaggttttcgagaggagaagtgcgccaatgttgtcttttctttccacgttatactgtgtaaggtgatgttcccggtcgctgttgcacctgatagtaagggacagatttttaatgaacattggctggcatgttggtgaatcacattttagttttctgatgccacatagtcttgcataaaaaagggttcttgccttaaaagtgaaaccttcatggatagtctttaatctctgatctttttggaacaaactgttttacattcctttcattttattatgcattagacgttgagacagcgtgatacttacaactcactagtatagttgtaacttattacaggatcatactaaaatttctgtcatatgtatactgaagacattttaaaaaccagaatatgtagtctacggatattttttatcataaaaatgatctttggctaaacaccccattttactaaagtcctcctgccaggtagttcccactgatggaaatgtttatggcaaataattttgccttctaggctgttgctctaacaaaataaaccttagacatatcacacctaaaatatgctgcagattttataattgattggttacttatttaagaagcaaaacacagcacctttacccttagtctcctcacataaatttcttactatacttttcataatgttgcatgcatatttcacctaccaaagctgtgctgttaatgccgtgaaagtttaacgtttgcgataaactgccgtaattttgatacatctgtgatttaggtcattaatttagataaactagctcattatttccatctttggaaaaggaaaaaaaaaaaaacttctttaggcatttgcctaagtttctttaattagacttgtaggcactcttcacttaaatacctcagttcttcttttcttttgcatgcatttttcccctgtttggtgctatgtttatgtattatgcttgaaattttaatttttttttttttgcactgtaactataatacctcttaatttacctttttaaaagctgtgggtcagtcttgcactcccatcaacataccagtagaggtttgctgcaatttgccccgttaattatgcttgaagtttaagaaagctgagcagaggtgtctcatatttcccagcacatgattctgaacttgatgcttcgtggaatgctgcatttatatgtaagtgacatttgaatactgtccttcctgctttatctgcatcatccacccacagagaaatgcctctgtgcgagtgcaccgacagaaaactgtcagctctgctttctaaggaaccctgagtgaggggggtattaagcttctccagtgttttttgttgtctccaatcttaaacttaaattgagatctaaattattaaacgagtttttgagcaaattaggtgacttgttttaaaaatatttaattccgatttggaaccttagatgtctatttgattttttaaaaaaccttaatgtaagatatgaccagttaaaacaaagcaattcttgaattatataactgtaaaagtgtgcagttaacaaggctggatgtgaattttattctgagggtgatttgtgatcaagtttaatcacaaatctcttaatatttataaactacctgatgccaggagcttagggctttgcattgtgtctaatacattgatcccagtgttacgggattctcttgattcctggcaccaaaatcagattgttttcacagttatgattcccagtgggagaaaaatgcctcaatatatttgtaaccttaagaagagtatttttttgttaatactaagatgttcaaacttagacatgattaggtcatacattctcaggggttcaaatttccttctaccattcaaatgttttatcaacagcaaacttcagccgtttcactttttgttggagaaaaatagtagattttaatttgactcacagtttgaagcattctgtgatcccctggttactgagttaaaaaataaaaaagtacgagttagacatatgaaatggttatgaacgcttttgtgctgctgatttttaatgctgtaaagttttcctgtgtttagcttgttgaaatgttttgcatctgtcaattaaggaaaaaaaaaatcactctatgttgccccactttagagccctgtgtgccaccctgtgttcctgtgattgcaatgtgagaccgaatgtaatatggaaaacctaccagtggggtgtggttgtgccctgagcacgtgtgtaaaggactggggaggcgtgtcttgaaaaagcaactgcagaaattccttatgatgattgtgtgcaagttagttaacatgaaccttcatttgtaaattttttaaaatttcttttataatatgctttccgcagtcctaactatgctgcgttttataatagctttttcccttctgttctgttcatgtagcacagataagcattgcacttggtaccatgctttacctcatttcaagaaaatatgcttaacagagaggaaaaaaatgtggtttggccttgctgctgttttgatttatggaatttgaaaaagataattataatgcctgcaatgtgtcatatactcgcacaacttaaataggtcatttttgtctgtggcatttttactgtttgtgaaagtatgaaacagatttgttaactgaactcttaattatgtttttaaaatgtttgttatatttcttttcttttttcttttatattacgtgaagtgatgaaatttagaatgacctctaacactcctgtaattgtcttttaaaatactgatatttttatttgttaataatactttgccctcagaaagattctgataccctgccttgacaacatgaaacttgaggctgctttggttcatgaatccaggtgttcccccggcagtcggcttcttcagtcgctccctggaggcaggtgggcactgcagaggatcactggaatccagatcgagcgcagttcatgcacaaggccccgttgatttaaaatattggatcttgctctgttagggtgtctaatccctttacacaagattgaagccaccaaactgagaccttgatacctttttttaactgcatctgaaattatgttaagagtctttaacccatttgcattatctgcagaagagaaactcatgtcatgtttattacctatatggttgttttaattacatttgaataattatatttttccaaccactgattacttttcaggaatttaattatttccagataaatttctttattttatattgtacatgaaaagttttaaagatatgtttaagaccaagactattaaaatgatttttaaagttgttggagacgccaatagcaatatctaggaaatttgcattgagaccattgtattttccactagcagtgaaaatgatttttcacaactaacttgtaaatatattttaatcattacttctttttttctagtccatttttatttggacatcaaccacagacaatttaaattttatagatgcactaagaattcactgcagcagcaggttacatagcaaaaatgcaaaggtgaacaggaagtaaatttctggcttttctgctgtaaatagtgaaggaaaattactaaaatcaagtaaaactaatgcatattatttgattgacaataaaatatttaccatcacatgctgcagctgttttttaaggaacatgatgtcattcattcatacagtaatcatgctgcagaaatttgcagtctgcaccttatggatcacaattacctttagttgttttttttgtaataattgtagccaagtaaatctccaataaagttatcgtctgttca

SEQ ID NO: 126735 - DNA, 5621 bp, Homo sapiens
  Payload ID: 4846
  Gene Symbol: DICER1
  Gene Name: dicer 1, ribonuclease type III
  Uniprot ID: Q9UPY3
  ENST ID: ENST00000541352
  CDS Start-End: 10-5499
actggatgaatgaaaagccctgctttgcaacccctcagcatggcaggcctgcagctcatgacccctgcttcctcaccaatgggtcctttctttggactgccatggcaacaagaagcaattcatgataacatttatacgccaagaaaatatcaggttgaactgcttgaagcagctctggatcataataccatcgtctgtttaaacactggctcagggaagacatttattgcagtactactcactaaagagctgtcctatcagatcaggggagacttcagcagaaatggaaaaaggacggtgttcttggtcaactctgcaaaccaggttgctcaacaagtgtcagctgtcagaactcattcagatctcaaggttggggaatactcaaacctagaagtaaatgcatcttggacaaaagagagatggaaccaagagtttactaagcaccaggttctcattatgacttgctatgtcgccttgaatgttttgaaaaatggttacttatcactgtcagacattaaccttttggtgtttgatgagtgtcatcttgcaatcctagaccacccctatcgagaaattatgaagctctgtgaaaattgtccatcatgtcctcgcattttgggactaactgcttccattttaaatgggaaatgtgatccagaggaattggaagaaaagattcagaaactagagaaaattcttaagagtaatgctgaaactgcaactgacctggtggtcttagacaggtatacttctcagccatgtgagattgtggtggattgtggaccatttactgacagaagtgggctttatgaaagactgctgatggaattagaagaagcacttaattttatcaatgattgtaatatatctgtacattcaaaagaaagagattctactttaatttcgaaacagatactatcagactgtcgtgccgtattggtagttctgggaccctggtgtgcagataaagtagctggaatgatggtaagagaactacagaaatacatcaaacatgagcaagaggagctgcacaggaaatttttattgtttacagacactttcctaaggaaaatacatgcactatgtgaagagcacttctcacctgcctcacttgacctgaaatttgtaactcctaaagtaatcaaactgctcgaaatcttacgcaaatataaaccatatgagcgacagcagtttgaaagcgttgagtggtataataatagaaatcaggataattatgtgtcatggagtgattctgaggatgatgatgaggatgaagaaattgaagaaaaagagaagccagagacaaattttccttctccttttaccaacattttgtgcggaattatttttgtggaaagaagatacacagcagttgtcttaaacagattgataaaggaagctggcaaacaagatccagagctggcttatatcagtagcaatttcataactggacatggcattgggaagaatcagcctcgcaacaaacagatggaagcagaattcagaaaacaggaagaggtacttaggaaatttcgagcacatgagaccaacctgcttattgcaacaagtattgtagaagagggtgttgatataccaaaatgcaacttggtggttcgttttgatttgcccacagaatatcgatcctatgttcaatctaaaggaagagcaagggcacccatctctaattatataatgttagcggatacagacaaaataaaaagttttgaagaagaccttaaaacctacaaagctattgaaaagatcttgagaaacaagtgttccaagtcggttgatactggtgagactgacattgatcctgtcatggatgatgatgacgttttcccaccatatgtgttgaggcctgacgatggtggtccacgagtcacaatcaacacggccattggacacatcaatagatactgtgctagattaccaagtgatccgtttactcatctagctcctaaatgcagaacccgagagttgcctgatggtacattttattcaactctttatctgccaattaactcacctcttcgagcctccattgttggtccaccaatgagctgtgtacgattggctgaaagagttgtagctctcatttgctgtgagaaactgcacaaaattggcgaactggatgaccatttgatgccagttgggaaagagactgttaaatatgaagaggagcttgatttgcatgatgaagaagagaccagtgttccaggaagaccaggttccacgaaacgaaggcagtgctacccaaaagcaattccagagtgtttgagggatagttatcccagacctgatcagccctgttacctgtatgtgataggaatggttttaactacacctttacctgatgaactcaactttagaaggcggaagctctatcctcctgaagataccacaagatgctttggaatactgacggccaaacccatacctcagattccacactttcctgtgtacacacgctctggagaggttaccatatccattgagttgaagaagtctggtttcatgttgtctctacaaatgcttgagttgattacaagacttcaccagtatatattctcacatattcttcggcttgaaaaacctgcactagaatttaaacctacagacgctgattcagcatactgtgttctacctcttaatgttgttaatgactccagcactttggatattgactttaaattcatggaagatattgagaagtctgaagctcgcataggcattcccagtacaaagtatacaaaagaaacaccctttgtttttaaattagaagattaccaagatgccgttatcattccaagatatcgcaattttgatcagcctcatcgattttatgtagctgatgtgtacactgatcttaccccactcagtaaatttccttcccctgagtatgaaacttttgcagaatattataaaacaaagtacaaccttgacctaaccaatctcaaccagccactgctggatgtggaccacacatcttcaagacttaatcttttgacacctcgacatttgaatcagaaggggaaagcgcttcctttaagcagtgctgagaagaggaaagccaaatgggaaagtctgcagaataaacagatactggttccagaactctgtgctatacatccaattccagcatcactgtggagaaaagctgtttgtctccccagcatactttatcgccttcactgccttttgactgcagaggagctaagagcccagactgccagcgatgctggcgtgggagtcagatcacttcctgcggattttagataccctaacttagacttcgggtggaaaaaatctattgacagcaaatctttcatctcaatttctaactcctcttcagctgaaaatgataattactgtaagcacagcacaattgtccctgaaaatgctgcacatcaaggtgctaatagaacctcctctctagaaaatcatgaccaaatgtctgtgaactgcagaacgttgctcagcgagtcccctggtaagctccacgttgaagtttcagcagatcttacagcaattaatggtctttcttacaatcaaaatctcgccaatggcagttatgatttagctaacagagacttttgccaaggaaatcagctaaattactacaagcaggaaatacccgtgcaaccaactacctcatattccattcagaatttatacagttacgagaaccagccccagcccagcgatgaatgtactctcctgagtaataaataccttgatggaaatgctaacaaatctacctcagatggaagtcctgtgatggccgtaatgcctggtacgacagacactattcaagtgctcaagggcaggatggattctgagcagagcccttctattgggtactcctcaaggactcttggccccaatcctggacttattcttcaggctttgactctgtcaaacgctagtgatggatttaacctggagcggcttgaaatgcttggcgactcctttttaaagcatgccatcaccacatatctattttgcacttaccctgatgcgcatgagggccgcctttcatatatgagaagcaaaaaggtcagcaactgtaatctgtatcgccttggaaaaaagaagggactacccagccgcatggtggtgtcaatatttgatccccctgtgaattggcttcctcctggttatgtagtaaatcaagacaaaagcaacacagataaatgggaaaaagatgaaatgacaaaagactgcatgctggcgaatggcaaactggatgaggattacgaggaggaggatgaggaggaggagagcctgatgtggagggctccgaaggaagaggctgactatgaagatgatttcctggagtatgatcaggaacatatcagatttatagataatatgttaatggggtcaggagcttttgtaaagaaaatctctctttctcctttttcaaccactgattctgcatatgaatggaaaatgcccaaaaaatcctccttaggtagtatgccattttcatcagattttgaggattttgactacagctcttgggatgcaatgtgctatctggatcctagcaaagctgttgaagaagatgactttgtggtggggttctggaatccatcagaagaaaactgtggtgttgacacgggaaagcagtccatttcttacgacttgcacactgagcagtgtattgctgacaaaagcatagcggactgtgtggaagccctgctgggctgctatttaaccagctgtggggagagggctgctcagcttttcctctgttcactggggctgaaggtgctcccggtaattaaaaggactgatcgggaaaaggccctgtgccctactcgggagaatttcaacagccaacaaaagaacctttcagtgagctgtgctgctgcttctgtggccagttcacgctcttctgtattgaaagactcggaatatggttgtttgaagattccaccaagatgtatgtttgatcatccagatgcagataaaacactgaatcaccttatatcggggtttgaaaattttgaaaagaaaatcaactacagattcaagaataaggcttaccttctccaggcttttacacatgcctcctaccactacaatactatcactgattgttaccagcgcttagaattcctgggagatgcgattttggactacctcataaccaagcacctttatgaagacccgcggcagcactccccgggggtcctgacagacctgcggtctgccctggtcaacaacaccatctttgcatcgctggctgtaaagtacgactaccacaagtacttcaaagctgtctctcctgagctcttccatgtcattgatgactttgtgcagtttcagcttgagaagaatgaaatgcaaggaatggattctgagaaaagttttctgcaaatgtaccccgttcccctgtgcgagaattgcttgaaatggaaccagaaactgccaaatttagcccggctgagagaacttacgacgggaaggtcagagtcactgtggaagtagtaggaaaggggaaatttaaaggtgttggtcgaagttacaggattgccaaatctgcagcagcaagaagagccctccgaagcctcaaagctaatcaacctcaggttcccaatagctgaaaccgc

SEQ ID NO: 126736 - DNA, 2776 bp, Homo sapiens
  Payload ID: 4846
  Gene Symbol: DICER1
  Gene Name: dicer 1, ribonuclease type III
  Uniprot ID: Q9UPY3
  ENST ID: ENST00000556045
  CDS Start-End: 284-2746
ctcaaccagccactgctggatgtggaccacacatcttcaagacttaatcttttgacacctcgacatttgaatcagaaggggaaagcgcttcctttaagcagtgctgagaagaggaaagccaaatgggaaagtctgcagaataaacagatactggttccagaactctgtgctatacatccaattccagcatcactgtggagaaaagctgtttgtctccccagcatactttatcgccttcactgccttttgactgcagaggagctaagagcccagactgccagcgatgctggcgtgggagtcagatcacttcctgcggattttagctgaaaatgataattactgtaagcacagcacaattgtccctgaaaatgctgcacatcaaggtgctaatagaacctcctctctagaaaatcatgaccaaatgtctgtgaactgcagaacgttgctcagcgagtcccctggtaagctccacgttgaagtttcagcagatcttacagcaattaatggtctttcttacaatcaaaatctcgccaatggcagttatgatttagctaacagagacttttgccaaggaaatcagctaaattactacaagcaggaaatacccgtgcaaccaactacctcatattccattcagaatttatacagttacgagaaccagccccagcccagcgatgaatgtactctcctgagtaataaataccttgatggaaatgctaacaaatctacctcagatggaagtcctgtgatggccgtaatgcctggtacgacagacactattcaagtgctcaagggcaggatggattctgagcagagcccttctattgggtactcctcaaggactcttggccccaatcctggacttattcttcaggctttgactctgtcaaacgctagtgatggatttaacctggagcggcttgaaatgcttggcgactcctttttaaagcatgccatcaccacatatctattttgcacttaccctgatgcgcatgagggccgcctttcatatatgagaagcaaaaaggtcagcaactgtaatctgtatcgccttggaaaaaagaagggactacccagccgcatggtggtgtcaatatttgatccccctgtgaattggcttcctcctggttatgtagtaaatcaagacaaaagcaacacagataaatgggaaaaagatgaaatgacaaaagactgcatgctggcgaatggcaaactggatgaggattacgaggaggaggatgaggaggaggagagcctgatgtggagggctccgaaggaagaggctgactatgaagatgatttcctggagtatgatcaggaacatatcagatttatagataatatgttaatggggtcaggagcttttgtaaagaaaatctctctttctcctttttcaaccactgattctgcatatgaatggaaaatgcccaaaaaatcctccttaggtagtatgccattttcatcagattttgaggattttgactacagctcttgggatgcaatgtgctatctggatcctagcaaagctgttgaagaagatgactttgtggtggggttctggaatccatcagaagaaaactgtggtgttgacacgggaaagcagtccatttcttacgacttgcacactgagcagtgtattgctgacaaaagcatagcggactgtgtggaagccctgctgggctgctatttaaccagctgtggggagagggctgctcagcttttcctctgttcactggggctgaaggtgctcccggtaattaaaaggactgatcgggaaaaggccctgtgccctactcgggagaatttcaacagccaacaaaagaacctttcagtgagctgtgctgctgcttctgtggccagttcacgctcttctgtattgaaagactcggaatatggttgtttgaagattccaccaagatgtatgtttgatcatccagatgcagataaaacactgaatcaccttatatcggggtttgaaaattttgaaaagaaaatcaactacagattcaagaataaggcttaccttctccaggcttttacacatgcctcctaccactacaatactatcactgattgttaccagcgcttagaattcctgggagatgcgattttggactacctcataaccaagcacctttatgaagacccgcggcagcactccccgggggtcctgacagacctgcggtctgccctggtcaacaacaccatctttgcatcgctggctgtaaagtacgactaccacaagtacttcaaagctgtctctcctgagctcttccatgtcattgatgactttgtgcagtttcagcttgagaagaatgaaatgcaaggaatggattctgagcttaggagatctgaggaggatgaagagaaagaagaggatattgaagttccaaaggccatgggggatatttttgagtcgcttgctggtgccatttacatggatagtgggatgtcactggagacagtctggcaggtgtactatcccatgatgcggccactaatagaaaagttttctgcaaatgtaccccgttcccctgtgcgagaattgcttgaaatggaaccagaaactgccaaatttagcccggctgagagaacttacgacgggaaggtcagagtcactgtggaagtagtaggaaaggggaaatttaaaggtgttggtcgaagttacaggattgccaaatctgcagcagcaagaagagccctccgaagcctcaaagctaatcaacctcaggttcccaatagctgaaaccgctttttaaaattcaaaacaagaaac

SEQ ID NO: 126737 - DNA, 1609 bp, Homo sapiens
  Payload ID: 4846
  Gene Symbol: DICER1
  Gene Name: dicer 1, ribonuclease type III
  ENST ID: ENST00000532939
  CDS Start-End: 1-1183
tttaaagcatgccatcaccacatatctattttgcacttaccctgatgcgcatgagggccgcctttcatatatgagaagcaaaaaggtcagcaactgtaatctgtatcgccttggaaaaaagaagggactacccagccgcatggtggtgtcaatatttgatccccctgtgaattggcttcctcctggttatgtagtaaatcaagacaaaagcaacacagataaatgggaaaaagatgaaatgacaaaagactgcatgctggcgaatggcaaactggatgaggattacgaggaggaggatgaggaggaggagagcctgatgtggagggctccgaaggaagaggctgactatgaagatgatttcctggagtatgatcaggaacatatcagatttatagataatatgttaatggggtcaggagcttttgtaaagaaaatctctctttctcctttttcaaccactgattctgcatatgaatggaaaatgcccaaaaaatcctccttaggtagtatgccattttcatcagattttgaggattttgactacagctcttgggatgcaatgtgctatctggatcctagcaaagctgttgaagaagatgactttgtggtggggttctggaatccatcagaagaaaactgtggtgttgacacgggaaagcagtccatttcttacgacttgcacactgagcagtgtattgctgacaaaagcatagcggactgtgtggaagccctgctgggctgctatttaaccagctgtggggagagggctgctcagcttttcctctgttcactggggctgaaggtgctcccggtaattaaaaggactgatcgggaaaaggccctgtgccctactcgggagaatttcaacagccaacaaaagaacctttcagtgagctgtgctgctgcttctgtggccagttcacgctcttctgtattgaaagactcggaatatggttgtttgaagattccaccaagatgtatgtttgatcatccagatgcagataaaacactgaatcaccttatatcggggtttgaaaattttgaaaagaaaatcaactacagattcaagaataaggcttaccttctccaggcttttacacatgcctcctaccactacaatactatcactggtaaggagcccacgaccagacttcatttctgggaaaatgagactttgtgttgatctcatcgtgttggccttgtaaaagtgatctatgcatgtacagtgttcatgcttaatattcaagggatggggcggggaacaaaaggaatagaaagaattcttttccttgttatttggggagcacgtattgctttataactttggttgttgggagtatggctatcatataccctcatcagtgtcattttatatctgcctaattagagaaattttaaccttagtattttgatgtgttttccccattttatcctccgcaaatatctttctcttgcccattcagtgctgcttttggtttttgatttagttgtatattctggatgtatttccacagccttttattgttcttcctggacaaaaagacccctcctttagggtctttttaaagatggatagattaaaagattaaaagcaatgatttcacaagaa

SEQ ID NO: 126738 - DNA, 1790 bp, Homo sapiens
  Payload ID: 4847
  Gene Symbol: DKK1
  Gene Name: dickkopf WNT signaling pathway inhibitor 1
  Uniprot ID: O94907
  ENST ID: ENST00000373970
  CDS Start-End: 140-940
ccctgcagtcaggactctgggaccgcagggggctcccggaccctgactctgcagccgaaccggcacggtttcgtggggacccaggcttgcaaagtgacggtcattttctctttctttctccctcttgagtccttctgagatgatggctctgggcgcagcgggagctacccgggtctttgtcgcgatggtagcggcggctctcggcggccaccctctgctgggagtgagcgccaccttgaactcggttctcaattccaacgctatcaagaacctgcccccaccgctgggcggcgctgcggggcacccaggctctgcagtcagcgccgcgccgggaatcctgtacccgggcgggaataagtaccagaccattgacaactaccagccgtacccgtgcgcagaggacgaggagtgcggcactgatgagtactgcgctagtcccacccgcggaggggacgcaggcgtgcaaatctgtctcgcctgcaggaagcgccgaaaacgctgcatgcgtcacgctatgtgctgccccgggaattactgcaaaaatggaatatgtgtgtcttctgatcaaaatcatttccgaggagaaattgaggaaaccatcactgaaagctttggtaatgatcatagcaccttggatgggtattccagaagaaccaccttgtcttcaaaaatgtatcacaccaaaggacaagaaggttctgtttgtctccggtcatcagactgtgcctcaggattgtgttgtgctagacacttctggtccaagatctgtaaacctgtcctgaaagaaggtcaagtgtgtaccaagcataggagaaaaggctctcatggactagaaatattccagcgttgttactgtggagaaggtctgtcttgccggatacagaaagatcaccatcaagccagtaattcttctaggcttcacacttgtcagagacactaaaccagctatccaaatgcagtgaactccttttatataatagatgctatgaaaaccttttatgaccttcatcaactcaatcctaaggatatacaagttctgtggtttcagttaagcattccaataacaccttccaaaaacctggagtgtaagagctttgtttctttatggaactcccctgtgattgcagtaaattactgtattgtaaattctcagtgtggcacttacctgtaaatgcaatgaaacttttaattatttttctaaaggtgctgcactgcctatttttcctcttgttatgtaaatttttgtacacattgattgttatcttgactgacaaatattctatattgaactgaagtaaatcatttcagcttatagttcttaaaagcataaccctttaccccatttaattctagagtctagaacgcaaggatctcttggaatgacaaatgataggtacctaaaatgtaacatgaaaatactagcttattttctgaaatgtactatcttaatgcttaaattatatttccctttaggctgtgatagtttttgaaataaaatttaacatttaatatcatgaaatgttataagtagacatacattttgggattgtgatcttagaggtttgtgtgtgtgtacgtatgtgtgtgttctacaagaacggaagtgtgatatgtttaaagatgatcagagaaaagacagtgtctaaatataagacaatattgatcagctctagaataactttaaagaaagacgtgttctgcattgataaactcaaatgatcatggcagaatgagagtgaatcttacattactactttcaaaaatagtttccaataaattaataataccta

SEQ ID NO: 126739 - DNA, 3638 bp, Homo sapiens
  Payload ID: 4848
  Gene Symbol: DKK2
  Gene Name: dickkopf WNT signaling pathway inhibitor 2
  Uniprot ID: Q9UBU2
  ENST ID: ENST00000285311
  CDS Start-End: 707-1486
gcgggagcccgcggcgagcgtagcgcaagtccgctccctaggcatcgctgcgctggcagcgattcgctgtctcttgtgagtcaggggacaacgcttcggggcaactgtgagtgcgcgtgtgggggacctcgattctcttcagatctcgaggattcggtccggggacgtctcctgatcccctactaaagcgcctgctaactttgaaaaggagcactgtgtcctgcaaagtttgacacataaaggataggaaaagagaggagagaaaagcaactgagttgaaggagaaggagctgatgcgggcctcctgatcaattaagaggagagttaaaccgccgagatcccggcgggaccaaggaggtgcggggcaagaaggaacggaagcggtgcgatccacagggctgggttttcttgcaccttgggtcacgcctccttggcgagaaagcgcctcgcatttgattgcttccagttattgcagaacttcctgtcctggtggagaagcgggtctcgcttgggttccgctaatttctgtcctgaggcgtgagactgagttcatagggtcctgggtccccgaaccaggaagggttgagggaacacaatctgcaagcccccgcgacccaagtgaggggccccgtgttggggtcctccctccctttgcattcccacccctccgggctttgcgtcttcctggggaccccctcgccgggagatggccgcgttgatgcggagcaaggattcgtcctgctgcctgctcctactggccgcggtgctgatggtggagagctcacagatcggcagttcgcgggccaaactcaactccatcaagtcctctctgggcggggagacgcctggtcaggccgccaatcgatctgcgggcatgtaccaaggactggcattcggcggcagtaagaagggcaaaaacctggggcaggcctacccttgtagcagtgataaggagtgtgaagttgggaggtattgccacagtccccaccaaggatcatcggcctgcatggtgtgtcggagaaaaaagaagcgctgccaccgagatggcatgtgctgccccagtacccgctgcaataatggcatctgtatcccagttactgaaagcatcttaacccctcacatcccggctctggatggtactcggcacagagatcgaaaccacggtcattactcaaaccatgacttgggatggcagaatctaggaagaccacacactaagatgtcacatataaaagggcatgaaggagacccctgcctacgatcatcagactgcattgaagggttttgctgtgctcgtcatttctggaccaaaatctgcaaaccagtgctccatcagggggaagtctgtaccaaacaacgcaagaagggttctcatgggctggaaattttccagcgttgcgactgtgcgaagggcctgtcttgcaaagtatggaaagatgccacctactcctccaaagccagactccatgtgtgtcagaaaatttgatcaccattgaggaacatcatcaattgcagactgtgaagttgtgtatttaatgcattatagcatggtggaaaataaggttcagatgcagaagaatggctaaaataagaaacgtgataagaatatagatgatcacaaaaagggagaaagaaaacatgaactgaatagattagaatgggtgacaaatgcagtgcagccagtgtttccattatgcaacttgtctatgtaaataatgtacacatttgtggaaaatgctattattaagagaacaagcacacagtggaaattactgatgagtagcatgtgactttccaagagtttaggttgtgctggaggagaggtttccttcagattgctgattgcttatacaaataacctacatgccagatttctattcaacgttagagtttaacaaaatactcctagaataacttgttatacaataggttctaaaaataaaattgctaaacaagaaatgaaaacatggagcattgttaatttacaacagaaaattaccttttgatttgtaacactacttctgctgttcaatcaagagtcttggtagataagaaaaaaatcagtcaatatttccaaataattgcaaaataatggccagttgtttaggaaggcctttaggaagacaaataaataacaaacaaacagccacaaatacttttttttcaaaattttagttttacctgtaattaataagaactgatacaagacaaaaacagttccttcagattctacggaatgacagtatatctctctttatcctatgtgattcctgctctgaatgcattatattttccaaactatacccataaattgtgactagtaaaatacttacacagagcagaattttcacagatggcaaaaaaatttaaagatgtccaatatatgtgggaaaagagctaacagagagatcattatttcttaaagattggccataacctgtattttgatagaattagattggtaaatacatgtattcatacatactctgtggtaatagagacttgagctggatctgtactgcactggagtaagcaagaaaattgggaaaactttttcgtttgttcaggttttggcaacacatagatcatatgtctgaggcacaagttggctgttcatctttgaaaccaggggatgcacagtctaaatgaatatctgcatgggatttgctatcataatatttactatgcagatgaattcagtgtgaggtcctgtgtccgtactatcctcaaattatttattttatagtgctgagatcctcaaataatctcaatttcaggaggtttcacaaaatggactcctgaagtagacagagtagtgaggtttcattgccctctataagcttctgactagccaatggcatcatccaattttcttcccaaacctctgcagcatctgctttattgccaaagggctagtttcggttttctgcagccattgcggttaaaaaatataagtaggataacttgtaaaacctgcatattgctaatctatagacaccacagtttctaaattctttgaaaccactttactactttttttaaacttaactcagttctaaatactttgtctggagcacaaaacaataaaaggttatcttatagtcgtgactttaaacttttgtagaccacaattcactttttagttttcttttacttaaatcccatctgcagtctcaaatttaagttctcccagtagagattgagtttgagcctgtatatctattaaaaatttcaacttcccacatatatttactaagatgattaagacttacattttctgcacaggtctgcaaaaacaaaaattataaactagtccatccaagaaccaaagtttgtataaacaggttgctataagcttggtgaaatgaaaatggaacatttcaatcaaacatttcctatataacaattattatatttacaatttggtttctgcaatatttttcttatgtccacccttttaaaaattattatttgaagtaatttatttacaggaaatgttaatgagatgtattttcttatagagatatttcttacagaaagctttgtagcagaatatatttgcagctattgactttgtaatttaggaaaaatgtataataagataaaatctattaaatttttctcctctaaaaactgaa

SEQ ID NO: 126740 - DNA, 925 bp, Homo sapiens
  Payload ID: 4848
  Gene Symbol: DKK2
  Gene Name: dickkopf WNT signaling pathway inhibitor 2
  ENST ID: ENST00000513208
  CDS Start-End: 235-714
atcttgtctctgcaggaaaaggaaagaaaacacctggagatcctgcgtttggtggtgaccaagtatccttttgagacaataaaggaaataatgtataaccaggctgtgcagttattccacgtgtgaatatatcacctagcatgaccttgaggataggcctacccttgtagcagtgataaggagtgtgaagttgggaggtattgccacagtccccaccaaggatcatcggcctgcatggtgtgtcggagaaaaaagaagcgctgccaccgagatggcatgtgctgccccagtacccgctgcaataatggcatctgtatcccagttactgaaagcatcttaacccctcacatcccggctctggatggtactcggcacagagatcgaaaccacggtcattactcaaaccatgacttgggatggcagaatctaggaagaccacacactaagatgtcacatataaaagggcatgaaggagacccctgcctacgatcatcagactgcattgaagggttttgctgtgctcgtcatttctggaccaaaatctgcaaaccagtgctccatcagggggaagtctgtaccaaacaacgcaagaagggttctcatgggctggaaattttccagcgttgcgactgtgcgaagggcctgtcttgcaaagtatggaaagatgccacctactcctccaaagccagactccatgtgtgtcagaaaatttgatcaccattgaggaacatcatcaattgcagactgtgaagttgtgtatttaatgcattatagcatggtggaaaataaggttcagatgcagaagaatggctaaaataagaaacgtgataagaatatagatgatcacaaaaagggagaaagaaaacatgaactgaatagattagaatgggtgacaaatgcagtgcagccagtgtttccattatgc

SEQ ID NO: 126741 - DNA, 908 bp, Homo sapiens
  Payload ID: 4848
  Gene Symbol: DKK2
  Gene Name: dickkopf WNT signaling pathway inhibitor 2
  ENST ID: ENST00000510463
  CDS Start-End: 258-899
gctatctggagagaaagagcatgttaaattagaaacagatgggaagaatgacacacatagctctggaattcacagtgcagggcggcagagttcagtcaggttcttgacatcctgacaatcttgtctctgcaggaaaaggaaagaaaacacctggagatcctgcgtttggtggtgaccaagtatccttttgagacaataaaggaaataatgtataaccaggctgtgcagttattccacgtgtgaatatatcacctagcatgaccttgaggatagattactgtcaaggcctcctggttggtgtctcttcctctggcctcaatatcatccaaatacaatgccaagcctacccttgtagcagtgataaggagtgtgaagttgggaggtattgccacagtccccaccaaggatcatcggcctgcatggtgtgtcggagaaaaaagaagcgctgccaccgagatggcatgtgctgccccagtacccgctgcaataatggcatctgtatcccagttactgaaagcatcttaacccctcacatcccggctctggatggtactcggcacagagatcgaaaccacggtcattactcaaaccatgacttgggatggcagaatctaggaagaccacacactaagatgtcacatataaaagggcatgaaggagacccctgcctacgatcatcagactgcattgaagggttttgctgtgctcgtcatttctggaccaaaatctgcaaaccagtgctccatcagggggaagtctgtaccaaacaacgcaagaagggttctcatgggctggaaattttccagcgttgcgactgtgcgaagggcctgtcttgcaaagtatggaaagatgccacctactcctccaaagccagactccatgtgtgtcagaaaatttgatcaccattg

SEQ ID NO: 126742 - DNA, 2636 bp, Homo sapiens
  Payload ID: 4849
  Gene Symbol: DKK3
  Gene Name: dickkopf WNT signaling pathway inhibitor 3
  Uniprot ID: Q9UBP4
  ENST ID: ENST00000326932
  CDS Start-End: 226-1278
ggcggagagggagcctggtgggcgggcggggcgcgtcttgcgggctccctcgggtaccggcgctgccgcaccccgccgcgctcccgcacccgcggcccgcccaccgcgccgctcccgcatctgcacccgcagcccggcggcctcccggcgggagcgagcagatccagtccggcccgcagcgcaactcggtccagtcggggcggcggctgcgggcgcagagcggagatgcagcggcttggggccaccctgctgtgcctgctgctggcggcggcggtccccacggcccccgcgcccgctccgacggcgacctcggctccagtcaagcccggcccggctctcagctacccgcaggaggaggccaccctcaatgagatgttccgcgaggttgaggaactgatggaggacacgcagcacaaattgcgcagcgcggtggaagagatggaggcagaagaagctgctgctaaagcatcatcagaagtgaacctggcaaacttacctcccagctatcacaatgagaccaacacagacacgaaggttggaaataataccatccatgtgcaccgagaaattcacaagataaccaacaaccagactggacaaatggtcttttcagagacagttatcacatctgtgggagacgaagaaggcagaaggagccacgagtgcatcatcgacgaggactgtgggcccagcatgtactgccagtttgccagcttccagtacacctgccagccatgccggggccagaggatgctctgcacccgggacagtgagtgctgtggagaccagctgtgtgtctggggtcactgcaccaaaatggccaccaggggcagcaatgggaccatctgtgacaaccagagggactgccagccggggctgtgctgtgccttccagagaggcctgctgttccctgtgtgcacacccctgcccgtggagggcgagctttgccatgaccccgccagccggcttctggacctcatcacctgggagctagagcctgatggagccttggaccgatgcccttgtgccagtggcctcctctgccagccccacagccacagcctggtgtatgtgtgcaagccgaccttcgtggggagccgtgaccaagatggggagatcctgctgcccagagaggtccccgatgagtatgaagttggcagcttcatggaggaggtgcgccaggagctggaggacctggagaggagcctgactgaagagatggcgctgagggagcctgcggctgccgccgctgcactgctgggaggggaagagatttagatctggaccaggctgtgggtagatgtgcaatagaaatagctaatttatttccccaggtgtgtgctttaggcgtgggctgaccaggcttcttcctacatcttcttcccagtaagtttcccctctggcttgacagcatgaggtgttgtgcatttgttcagctcccccaggctgttctccaggcttcacagtctggtgcttgggagagtcaggcagggttaaactgcaggagcagtttgccacccctgtccagattattggctgctttgcctctaccagttggcagacagccgtttgttctacatggctttgataattgtttgaggggaggagatggaaacaatgtggagtctccctctgattggttttggggaaatgtggagaagagtgccctgctttgcaaacatcaacctggcaaaaatgcaacaaatgaattttccacgcagttctttccatgggcataggtaagctgtgccttcagctgttgcagatgaaatgttctgttcaccctgcattacatgtgtttattcatccagcagtgttgctcagctcctacctctgtgccagggcagcattttcatatccaagatcaattccctctctcagcacagcctggggagggggtcattgttctcctcgtccatcagggatctcagaggctcagagactgcaagctgcttgcccaagtcacacagctagtgaagaccagagcagtttcatctggttgtgactctaagctcagtgctctctccactaccccacaccagccttggtgccaccaaaagtgctccccaaaaggaaggagaatgggatttttcttttgaggcatgcacatctggaattaaggtcaaactaattctcacatccctctaaaagtaaactactgttaggaacagcagtgttctcacagtgtggggcagccgtccttctaatgaagacaatgatattgacactgtccctctttggcagttgcattagtaactttgaaaggtatatgactgagcgtagcatacaggttaacctgcagaaacagtacttaggtaattgtagggcgaggattataaatgaaatttgcaaaatcacttagcagcaactgaagacaattatcaaccacgtggagaaaatcaaaccgagcagggctgtgtgaaacatggttgtaatatgcgactgcgaacactgaactctacgccactccacaaatgatgttttcaggtgtcatggactgttgccaccatgtattcatccagagttcttaaagtttaaagttgcacatgattgtataagcatgctttctttgagttttaaattatgtataaacataagttgcatttagaaatcaagcataaatcacttcaactgct

SEQ ID NO: 126743 - DNA, 2650 bp, Homo sapiens
  Payload ID: 4849
  Gene Symbol: DKK3
  Gene Name: dickkopf WNT signaling pathway inhibitor 3
  Uniprot ID: Q9UBP4
  ENST ID: ENST00000396505
  CDS Start-End: 240-1292
cgacgccaaggggagggggctgacctgtgcttggtccaccccaggtaggggctgagagaggcttgaggtggaagtgggggtcgggcactctgacctggtcgaggaggggctagggtttgaaccggggacagagtctaggtgagctggggcttgggagctattagcgtagaggatccgggttcggttgctctggcgagggctccagcatcacaggcggcggctgcgggcgcagagcggagatgcagcggcttggggccaccctgctgtgcctgctgctggcggcggcggtccccacggcccccgcgcccgctccgacggcgacctcggctccagtcaagcccggcccggctctcagctacccgcaggaggaggccaccctcaatgagatgttccgcgaggttgaggaactgatggaggacacgcagcacaaattgcgcagcgcggtggaagagatggaggcagaagaagctgctgctaaagcatcatcagaagtgaacctggcaaacttacctcccagctatcacaatgagaccaacacagacacgaaggttggaaataataccatccatgtgcaccgagaaattcacaagataaccaacaaccagactggacaaatggtcttttcagagacagttatcacatctgtgggagacgaagaaggcagaaggagccacgagtgcatcatcgacgaggactgtgggcccagcatgtactgccagtttgccagcttccagtacacctgccagccatgccggggccagaggatgctctgcacccgggacagtgagtgctgtggagaccagctgtgtgtctggggtcactgcaccaaaatggccaccaggggcagcaatgggaccatctgtgacaaccagagggactgccagccggggctgtgctgtgccttccagagaggcctgctgttccctgtgtgcacacccctgcccgtggagggcgagctttgccatgaccccgccagccggcttctggacctcatcacctgggagctagagcctgatggagccttggaccgatgcccttgtgccagtggcctcctctgccagccccacagccacagcctggtgtatgtgtgcaagccgaccttcgtggggagccgtgaccaagatggggagatcctgctgcccagagaggtccccgatgagtatgaagttggcagcttcatggaggaggtgcgccaggagctggaggacctggagaggagcctgactgaagagatggcgctgagggagcctgcggctgccgccgctgcactgctgggaggggaagagatttagatctggaccaggctgtgggtagatgtgcaatagaaatagctaatttatttccccaggtgtgtgctttaggcgtgggctgaccaggcttcttcctacatcttcttcccagtaagtttcccctctggcttgacagcatgaggtgttgtgcatttgttcagctcccccaggctgttctccaggcttcacagtctggtgcttgggagagtcaggcagggttaaactgcaggagcagtttgccacccctgtccagattattggctgctttgcctctaccagttggcagacagccgtttgttctacatggctttgataattgtttgaggggaggagatggaaacaatgtggagtctccctctgattggttttggggaaatgtggagaagagtgccctgctttgcaaacatcaacctggcaaaaatgcaacaaatgaattttccacgcagttctttccatgggcataggtaagctgtgccttcagctgttgcagatgaaatgttctgttcaccctgcattacatgtgtttattcatccagcagtgttgctcagctcctacctctgtgccagggcagcattttcatatccaagatcaattccctctctcagcacagcctggggagggggtcattgttctcctcgtccatcagggatctcagaggctcagagactgcaagctgcttgcccaagtcacacagctagtgaagaccagagcagtttcatctggttgtgactctaagctcagtgctctctccactaccccacaccagccttggtgccaccaaaagtgctccccaaaaggaaggagaatgggatttttcttttgaggcatgcacatctggaattaaggtcaaactaattctcacatccctctaaaagtaaactactgttaggaacagcagtgttctcacagtgtggggcagccgtccttctaatgaagacaatgatattgacactgtccctctttggcagttgcattagtaactttgaaaggtatatgactgagcgtagcatacaggttaacctgcagaaacagtacttaggtaattgtagggcgaggattataaatgaaatttgcaaaatcacttagcagcaactgaagacaattatcaaccacgtggagaaaatcaaaccgagcagggctgtgtgaaacatggttgtaatatgcgactgcgaacactgaactctacgccactccacaaatgatgttttcaggtgtcatggactgttgccaccatgtattcatccagagttcttaaagtttaaagttgcacatgattgtataagcatgctttctttgagttttaaattatgtataaacataagttgcatttagaaatcaagcataaatcacttcaactgct

SEQ ID NO: 126744 - DNA, 521 bp, Homo sapiens
  Payload ID: 4849
  Gene Symbol: DKK3
  Gene Name: dickkopf WNT signaling pathway inhibitor 3
  ENST ID: ENST00000529338
  CDS Start-End: 126-521
tctgctgagctcagcctctcttggtggatgtggggcggggcgctcgagtaggacccgacgccaaggggagggggctgacctgtgcttggtccaccccaggcggcggctgcgggcgcagagcggagatgcagcggcttggggccaccctgctgtgcctgctgctggcggcggcggtccccacggcccccgcgcccgctccgacggcgacctcggctccagtcaagcccggcccggctctcagctacccgcaggaggaggccaccctcaatgagatgttccgcgaggttgaggaactgatggaggacacgcagcacaaattgcgcagcgcggtggaagagatggaggcagaagaagctgctgctaaagcatcatcagaagtgaacctggcaaacttacctcccagctatcacaatgagaccaacacagacacgaaggttggaaataataccatccatgtgcaccgagaaattcacaaggagtgcatcatcgacgaggactgtgggcccagcatgtactgccag

SEQ ID NO: 126745 - DNA, 1326 bp, Homo sapiens
  Payload ID: 4849
  Gene Symbol: DKK3
  Gene Name: dickkopf WNT signaling pathway inhibitor 3
  ENST ID: ENST00000525493
  CDS Start-End: 159-1253
gcgttatcctggctggagcacggtgtcaatcacggcagactaaggccagcggtgatggcttgaatgccaggctgggggctgggatttttcctgaggatttcacaggacagaggttggcttggaaagaccaaggcggcggctgcgggcgcagagcggagatgcagcggcttggggccaccctgctgtgcctgctgctggcggcggcggtccccacggcccccgcgcccgctccgacggcgacctcggctccagtcaagcccggcccggctctcagctacccgcaggaggaggccaccctcaatgagatgttccgcgaggttgaggaactgatggaggacacgcagcacaaattgcgcagcgcggtggaagagatggaggcagaagaagctgctgctaaagcatcatcagaagtgaacctggcaaacttacctcccagctatcacaatgagaccaacacagacacgaaggttggaaataataccatccatgtgcaccgagaaattcacaagataaccaacaaccagactggacaaatggtcttttcagagacagttatcacatctgtgggagacgaagaaggcagaaggagccacgagtgcatcatcgacgaggactgtgggcccagcatgtactgccagtttgccagcttccagtacacctgccagccatgccggggccagaggatgctctgcacccgggacagtgagtgctgtggagaccagctgtgtgtctggggtcactgcaccaaaatggccaccaggggcagcaatgggaccatctgtgacaaccagagggactgccagccggggctgtgctgtgccttccagagaggcctgctgttccctgtgtgcacacccctgcccgtggagggcgagctttgccatgaccccgccagccggcttctggacctcatcacctgggagctagagcctgatggagccttggaccgatgcccttgtgccagtggcctcctctgccagccccacaggctcccacgtttagagcctggctttgtcccatctctccccagccacagcctggtgtatgtgtgcaagccgaccttcgtggggagccgtgaccaagatggggagatcctgctgcccagagaggtccccgatgagtatgaagttggcagcttcatggaggaggtgcgccaggagctggaggacctggagaggagcctgactgaagagatggcgctgagggagcctgcggctgccgccgctgcactgctgggaggggaagagatttagatctggaccaggctgtgggtagatgtgcaatagaaatagctaatttatttccccaggtgtgtgctttaggcgt

SEQ ID NO: 126746 - DNA, 903 bp, Homo sapiens
  Payload ID: 4849
  Gene Symbol: DKK3
  Gene Name: dickkopf WNT signaling pathway inhibitor 3
  ENST ID: ENST00000533813
  CDS Start-End: 200-903
agatccagtccggcccgcagcgcaactcggtccagtcggggtgggtgaggggcggcggcgggggaggggacgactctgctgagctcagcctctcttggtggatgtggggcggggcgctcgagtaggacccgacgccaaggggagggggctgacctgtgcttggtccaccccaggcggcggctgcgggcgcagagcggagatgcagcggcttggggccaccctgctgtgcctgctgctggcggcggcggtccccacggcccccgcgcccgctccgacggcgacctcggctccagtcaagcccggcccggctctcagctacccgcaggaggaggccaccctcaatgagatgttccgcgaggttgaggaactgatggaggacacgcagcacaaattgcgcagcgcggtggaagagatggaggcagaagaagctgctgctaaagcatcatcagaagtgaacctggcaaacttacctcccagctatcacaatgagaccaacacagacacgaaggttggaaataataccatccatgtgcaccgagaaattcacaagataaccaacaaccagactggacaaatggtcttttcagagacagttatcacatctgtgggagacgaagaaggcagaaggagccacgagtgcatcatcgacgaggactgtgggcccagcatgtactgccagtttgccagcttccagtacacctgccagccatgccggggccagaggatgctctgcacccgggacagtgagtgctgtggagaccagctgtgtgtctggggtcactgcaccaaaatggccaccaggggcagcaatgggaccatctgtgacaaccagagggactgccagccggggctgtgctgtgccttccagagaggcctgctgttccctgtgtgcacacccctgcc

SEQ ID NO: 126747 - DNA, 592 bp, Homo sapiens
  Payload ID: 4849
  Gene Symbol: DKK3
  Gene Name: dickkopf WNT signaling pathway inhibitor 3
  ENST ID: ENST00000534511
  CDS Start-End: 43-592
gttccgggacacacaggcggcggctgcgggcgcagagcggagatgcagcggcttggggccaccctgctgtgcctgctgctggcggcggcggtccccacggcccccgcgcccgctccgacggcgacctcggctccagtcaagcccggcccggctctcagctacccgcaggaggaggccaccctcaatgagatgttccgcgaggttgaggaactgatggaggacacgcagcacaaattgcgcagcgcggtggaagagatggaggcagaagaagctgctgctaaagcatcatcagaagtgaacctggcaaacttacctcccagctatcacaatgagaccaacacagacacgaaggttggaaataataccatccatgtgcaccgagaaattcacaaggagtgcatcatcgacgaggactgtgggcccagcatgtactgccagtttgccagcttccagtacacctgccagccatgccggggccagaggatgctctgcacccgggacagtgagtgctgtggagaccagctgtgtgtctggggtcactgcaccaaaatggccaccaggggcagcaatgggaccatctgtgacaaccaga

SEQ ID NO: 126748 - DNA, 894 bp, Homo sapiens
  Payload ID: 4850
  Gene Symbol: DKK4
  Gene Name: dickkopf WNT signaling pathway inhibitor 4
  Uniprot ID: Q9UBT3
  ENST ID: ENST00000220812
  CDS Start-End: 188-862
gtcagactttgctcagccgatttcacgcaccttactcagactaaggtttacttctttcagaaaaagcagtgacaaacagacgacgtgctgagctgccagcttagtggaagctctgctctgggtggagagcagcctcgctttggtgacgcacagtgctgggaccctccaggagccccgggattgaaggatggtggcggccgtcctgctggggctgagctggctctgctctcccctgggagctctggtcctggacttcaacaacatcaggagctctgctgacctgcatggggcccggaagggctcacagtgcctgtctgacacggactgcaataccagaaagttctgcctccagccccgcgatgagaagccgttctgtgctacatgtcgtgggttgcggaggaggtgccagcgagatgccatgtgctgccctgggacactctgtgtgaacgatgtttgtactacgatggaagatgcaaccccaatattagaaaggcagcttgatgagcaagatggcacacatgcagaaggaacaactgggcacccagtccaggaaaaccaacccaaaaggaagccaagtattaagaaatcacaaggcaggaagggacaagagggagaaagttgtctgagaacttttgactgtggccctggactttgctgtgctcgtcatttttggacgaaaatttgtaagccagtccttttggagggacaggtctgctccagaagagggcataaagacactgctcaagctccagaaatcttccagcgttgcgactgtggccctggactactgtgtcgaagccaattgaccagcaatcggcagcatgctcgattaagagtatgccaaaaaatagaaaagctataaatatttcaaaataaagaagaatccacattgca

SEQ ID NO: 126749 - DNA, 1222 bp, Homo sapiens
  Payload ID: 4851
  Gene Symbol: DKKL1
  Gene Name: dickkopf-like 1
  Uniprot ID: Q9UK85
  ENST ID: ENST00000221498
  CDS Start-End: 406-1134
agggccgcaatcagagaacaccgccaggacttccaggacttggtctccaggactgaggtcaactgacgtgggcgtggtctgactgtgtgggcgtggccagggaatgaactcacggctctggcttaaggggtgtggtgaacgaaggatggggcgtggctgtgtcaccaagggcgtggtcatggagtagaggcccgggctcctgggtgaggccggcaagtttggagcgtggtcagacaataggggcgtggctacggctcgcggagcgcaaccaacgctctagaccagacctgggctcgagaccataactgtttggctttaacagtacgtgggcggccggaatccgggagtccggtgacccgggctgtggtctagcataaaggcggagcccagaagaaggggcggggtatgggagaagcctccccacctgcccccgcaaggcggcatctgctggtcctgctgctgctcctctctaccctggtgatcccctccgctgcagctcctatccatgatgctgacgcccaagagagctccttgggtctcacaggcctccagagcctactccaaggcttcagccgacttttcctgaaaggtaacctgcttcggggcatagacagcttattctctgcccccatggacttccggggcctccctgggaactaccacaaagaggagaaccaggagcaccagctggggaacaacaccctctccagccacctccagatcgacaagatgaccgacaacaagacaggagaggtgctgatctccgagaatgtggtggcatccattcaaccagcggaggggagcttcgagggtgatttgaaggtacccaggatggaggagaaggaggccctggtacccatccagaaggccacggacagcttccacacagaactccatccccgggtggccttctggatcattaagctgccacggcggaggtcccaccaggatgccctggagggcggccactggctcagcgagaagcgacaccgcctgcaggccatccgggatggactccgcaaggggacccacaaggacgtcctagaagaggggaccgagagctcctcccactccaggctgtccccccgaaagacccacttactgtacatcctcaggccctctcggcagctgtaggggtggggaccggggagcacctgcctgtagcccccatcagaccctgccccaagcaccatatggaaataaagttctttcttacatctaa

SEQ ID NO: 126750 - DNA, 524 bp, Homo sapiens
  Payload ID: 4851
  Gene Symbol: DKKL1
  Gene Name: dickkopf-like 1
  ENST ID: ENST00000594268
  CDS Start-End: 134-436
gccgaccatagcagacaaagaccccagccaagcccagtggcgctgcggcgttcaggacccccgtaggccaaaatcccagcccagcccttccccatgtggccagacaaagggacggtggagccgggtacccaggatggaggagaaggaggccctggtacccatccagaaggccacggacagcttccacacagaactccatccccgggtggccttctggatcattaagctgccacggcggaggtcccaccaggatgccctggagggcggccactggctcagcgagaagcgacaccgcctgcaggccatccgggatggactccgcaaggggacccacaaggacgtcctagaagaggggaccgagagctcctcccactccaggctgtccccccgaaagacccacttactgtacatcctcaggccctctcggcagctgtaggggtggggaccggggagcacctgcctgtagcccccatcagaccctgccccaagcaccatatggaaataaagttctttcttacatctaa

SEQ ID NO: 126751 - DNA, 775 bp, Homo sapiens
  Payload ID: 4851
  Gene Symbol: DKKL1
  Gene Name: dickkopf-like 1
  ENST ID: ENST00000596402
  CDS Start-End: 401-775
gaacgaaggatggggcgtggctgtgtcaccaagggcgtggtcatggagtagaggcccgggctcctgggtgaggccggcaagtttggagcgtggtcagacaataggggcgtggctacggctcgcggagcgcaaccaacgctctagaccagacctgggctcgagaccataactgtttggctttaacacctccccacctgcccccgcaaggcggcatctgctggtcctgctgctgctcctctctaccctggtgatcccctccgctgcagctcctatccatgatgctgacgcccaagagagctccttgggtctcacaggcctccagagcctactccaaggcttcagccgacttttcctgaaaggtaacctgcttcggggcatagacagcttattctctgcccccatggacttccggggcctccctgggaactaccacaaagaggagaaccaggagcaccagctggggaacaacaccctctccagccacctccagatcgacaagatgaccgacaacaagacaggagaggtgctgatctccgagaatgtggtggcatccattcaaccagcggaggggagcttcgagggtgatttgaaggtacccaggatggaggagaaggaggccctggtacccatccagaaggccacggacagcttccacacagaactccatccccgggtggccttctggatcattaagctgccacggcggaggtcccaccaggatgccctggagggcggccactggctcagcgagaagcgacaccgcctgcaggccatc

SEQ ID NO: 126752 - DNA, 500 bp, Homo sapiens
  Payload ID: 4851
  Gene Symbol: DKKL1
  Gene Name: dickkopf-like 1
  ENST ID: ENST00000598682
  CDS Start-End: 1-412
cgctgcagctcctatccatgatgctgacgcccaagagagctccttgggtctcacaggcctccagagcctactccaaggcttcagccgacttttcctgaaagtacccaggatggaggagaaggaggccctggtacccatccagaaggccacggacagcttccacacagaactccatccccgggtggccttctggatcattaagctgccacggcggaggtcccaccaggatgccctggagggcggccactggctcagcgagaagcgacaccgcctgcaggccatccgggatggactccgcaaggggacccacaaggacgtcctagaagaggggaccgagagctcctcccactccaggctgtccccccgaaagacccacttactgtacatcctcaggccctctcggcagctgtaggggtggggaccggggagcacctgcctgtagcccccatcagaccctgccccaagcaccatatggaaataaagttctttcttacatctaa

SEQ ID NO: 126753 - DNA, 664 bp, Homo sapiens
  Payload ID: 4851
  Gene Symbol: DKKL1
  Gene Name: dickkopf-like 1
  ENST ID: ENST00000597546
  CDS Start-End: 66-664
ccgggagtccggtgacccgggctgtggtctagcataaaggcggagcccagaagaaggggcggggtatgggagaagcctccccacctgcccccgcaaggcggcatctgctggtcctgctgctgctcctctctaccctggtgatcccctccgctgcagctcctatccatgatgctgacgcccaagagagctccttgggtctcacaggcctccagagcctactccaaggcttcagccgacttttcctgaaaggtaacctgcttcggggcatagacagcttattctctgcccccatggacttccggggcctccctgggaactaccacaaagaggagaaccaggagcaccagctggggaacaacaccctctccagccacctccagatcgacaaggtacccaggatggaggagaaggaggccctggtacccatccagaaggccacggacagcttccacacagaactccatccccgggtggccttctggatcattaagctgccacggcggaggtcccaccaggatgccctggagggcggccactggctcagcgagaagcgacaccgcctgcaggccatccgggatggactccgcaaggggacccacaaggacgtcctagaagaggggaccgagagctcctcccactccaggctgtccccccgaaagaccca

SEQ ID NO: 126754 - DNA, 767 bp, Homo sapiens
  Payload ID: 4851
  Gene Symbol: DKKL1
  Gene Name: dickkopf-like 1
  ENST ID: ENST00000597873
  CDS Start-End: 331-767
gcagattcctcatctacaggcgctagtggactggagacggctggcggctgtcccgggacggggaagagagctttggtgcctgagggaagatggcttagggcccggtcccttaaggcctccccacctgcccccgcaaggcggcatctgctggtcctgctgctgctcctctctaccctggtgatcccctccgctgcagctcctatccatgatgctgacgcccaagagagctccttgggtctcacaggcctccagagcctactccaaggcttcagccgacttttcctgaaaggtaacctgcttcggggcatagacagcttattctctgcccccatggacttccggggcctccctgggaactaccacaaagaggagaaccaggagcaccagctggggaacaacaccctctccagccacctccagatcgacaagatgaccgacaacaagacaggagaggtgctgatctccgagaatgtggtggcatccattcaaccagcggaggggagcttcgagggtgatttgaaggtacccaggatggaggagaaggaggccctggtacccatccagaaggccacggacagcttccacacagaactccatccccgggtggccttctggatcattaagctgccacggcggaggtcccaccaggatgccctggagggcggccactggctcagcgagaagcgacaccgcctgcaggccatccgggatggactccgcaaggggacccacaaggacgtcctagaagaggggaccgagagctcctc

SEQ ID NO: 126755 - DNA, 2880 bp, Homo sapiens
  Payload ID: 4852
  Gene Symbol: DMBX1
  Gene Name: diencephalon/mesencephalon homeobox 1
  Uniprot ID: Q8NFW5
  ENST ID: ENST00000360032
  CDS Start-End: 15-1148
aggcggatgccgccatgcagcactacggggtgaacggctactcactgcacgccatgaactcactcagcgccatgtacaacctgcaccagcaggcagcccagcaggcccagcatgcccccgactaccggccttcagtgcatgcgcttacattggctgagcgcctggctgacatcatcttggaggcccgttatggttcccagcaccgcaaacaacgtcgcagccgcacagcgttcacggctcagcagctcgaggccctggaaaagaccttccagaagactcactacccagatgtggtgatgcgtgagaggctggccatgtgcaccaacctgcctgaggcccgggtgcaggtgtggttcaagaaccgccgggccaagttccggaagaagcagcgtagcctgcagaaggaacagctccagaagcagaaggaggctgagggctcccatggggaaggcaaggccgaggcccccactccagatacccagctggacactgagcagcccccacgtctgcctggcagcgacccccctgctgagcttcacctgagtctgtctgagcagtcagccagtgagtcagcccccgaggatcagccggaccgtgaggaggaccccagggcaggggctgaggaccccaaagctgagaagagccctggggctgacagcaaggggctgggctgcaagaggggcagccccaaggcagattccccaggcagcctgaccatcactcctgtggccccagggggtggcctcctgggcccctcccactcctattcctcgtccccgctgagcctcttccgtctgcaggagcaattccgccagcacatggcggccaccaacaacctggtgcactactcgtccttcgaagtagggggtccggcccctgctgctgcagcggcggctgctgctgtgccctacctgggcgtcaacatggccccgctgggctcactgcactgccagtcctactaccagtccctgtcagcagccgctgctgcccaccagggtgtgtgggggtctcctctgctgcctgcacccccagcaggcctggctcctgcatcagctaccctgaacagtaaaaccacaagcatcgagaacctgcggctccgggccaagcagcacgcggcctccctgggactcgatacgctgcccaactgactgtctggcttccaacccagccaggggtcttaggtgtcccctcctagccctgtggttatccctaggtggctctcgaggagttaactccatgagcccagggatcctagggcctggggtcctgttccctgctccgcttccccataccccagcccgaggtgaagcccacacctacacaccctctgcatggccctgcctggaccccatggaggccgaatagggaggaggtgagaggctggggtgccccaagcttccctcggagaagtgagaggctctccctggctagatcctcatctcaatagcacctcctcccttttctccctatccttctgccccctagtaagtctacgtgtggaatgtgagatataaatataaatatataaagctatattttcaggctcctgcctgccccaggccccctgccccactcccatctcttcttccctgccacccctccctgcagcctccgcggctcactccagccatcccttctgtttctccttctctctccttccttcttcccttgatctccctcttcctgtctctgtcctggtccctgcccccgtctcggcccagcctctgtattctccacccttgatctttctccttgtctctcccgctgcccctggtttcttcctttggtgttggctgtgttggtatcatcagttcttgagctatattttgtttggggttgtggctggttttggttttagtaattttgcgacttcccgttgctctccttctattcccttccttctgccctgcctgcctccctgcacctgcggcctctctaggaagctgttcctttctatgcccaatagaagcaacaaggccctagctggagactctggggatctggagctgcaggcaggaggtggcactggctcccactcccacccctgcccaggctggcatctagaaggcgtcatgaattactttctcttctctcttctcaattttgaggtcctcattcccaagattgaggaggcagtagttaatctgggaaggcagtagaatggccagcattcctgcctgtaagtcttcccaagacagaggcccggtgacacagttcagccaggactgaccacagggctctagagctctctttggtgagacttccctggatggagagcagcagcaggggaagaggtgctctcagagacagcagggctggtgctcttctcccacaagctgagcctccacgttcagcagatactgtccaaggcaggggtacggctgaccaggaatgaaggttgaactctgctcctgagcacggtgcgtgcaaagcatatagcagcacataggctcaggcttctgtaggcttcctgtcccagagccaattatggaagtaagggcttccctccagctagtcactggaatggaaaagtgtgttcctgttcatagccaggaaacccagctcagcaaactccctttcaaagctgtgtgaccggctgggcatggtggctcacacctgtaatcccagcactttgggaggccaaggcaggcaatcacctgaggtcaggagttcaagaccagcctggctaacatgtgaaactaataataatacaaaaattagctgggcgtggtggcacatgcctgtaatcccagctacttgggaggctgagttgggaggattgctgcaatctgggaggtggaagttgcagtgagccgagatcatgccactgcactccagcctgggcgacggagtgagactccatctcaaaaaaaaaaaaaa

SEQ ID NO: 126756 - DNA, 2882 bp, Homo sapiens
  Payload ID: 4852
  Gene Symbol: DMBX1
  Gene Name: diencephalon/mesencephalon homeobox 1
  Uniprot ID: Q8NFW5
  ENST ID: ENST00000371956
  CDS Start-End: 16-1164
taggcggatgccgccatgcagcactacggggtgaacggctactcactgcacgccatgaactcactcagcgccatgtacaacctgcaccagcaggcagcccagcaggcccagcatgcccccgactaccggccttcagtgcatgcgcttacattggctgagcgcctggctggctgtacatttcaagacatcatcttggaggcccgttatggttcccagcaccgcaaacaacgtcgcagccgcacagcgttcacggctcagcagctcgaggccctggaaaagaccttccagaagactcactacccagatgtggtgatgcgtgagaggctggccatgtgcaccaacctgcctgaggcccgggtgcaggtgtggttcaagaaccgccgggccaagttccggaagaagcagcgtagcctgcagaaggaacagctccagaagcagaaggaggctgagggctcccatggggaaggcaaggccgaggcccccactccagatacccagctggacactgagcagcccccacgtctgcctggcagcgacccccctgctgagcttcacctgagtctgtctgagcagtcagccagtgagtcagcccccgaggatcagccggaccgtgaggaggaccccagggcaggggctgaggaccccaaagctgagaagagccctggggctgacagcaaggggctgggctgcaagaggggcagccccaaggcagattccccaggcagcctgaccatcactcctgtggccccagggggtggcctcctgggcccctcccactcctattcctcgtccccgctgagcctcttccgtctgcaggagcaattccgccagcacatggcggccaccaacaacctggtgcactactcgtccttcgaagtagggggtccggcccctgctgctgcagcggcggctgctgctgtgccctacctgggcgtcaacatggccccgctgggctcactgcactgccagtcctactaccagtccctgtcagcagccgctgctgcccaccagggtgtgtgggggtctcctctgctgcctgcacccccagcaggcctggctcctgcatcagctaccctgaacagtaaaaccacaagcatcgagaacctgcggctccgggccaagcagcacgcggcctccctgggactcgatacgctgcccaactgactgtctggcttccaacccagccaggggtcttaggtgtcccctcctagccctgtggttatccctaggtggctctcgaggagttaactccatgagcccagggatcctagggcctggggtcctgttccctgctccgcttccccataccccagcccgaggtgaagcccacacctacacaccctctgcatggccctgcctggaccccatggaggccgaatagggaggaggtgagaggctggggtgccccaagcttccctcggagaagtgagaggctctccctggctagatcctcatctcaatagcacctcctcccttttctccctatccttctgccccctagtaagtctacgtgtggaatgtgagatataaatataaatatataaagctatattttcaggctcctgcctgccccaggccccctgccccactcccatctcttcttccctgccacccctccctgcagcctccgcggctcactccagccatcccttctgtttctccttctctctccttccttcttcccttgatctccctcttcctgtctctgtcctggtccctgcccccgtctcggcccagcctctgtattctccacccttgatctttctccttgtctctcccgctgcccctggtttcttcctttggtgttggctgtgttggtatcatcagttcttgagctatattttgtttggggttgtggctggttttggttttagtaattttgcgacttcccgttgctctccttctattcccttccttctgccctgcctgcctccctgcacctgcggcctctctaggaagctgttcctttctatgcccaatagaagcaacaaggccctagctggagactctggggatctggagctgcaggcaggaggtggcactggctcccactcccacccctgcccaggctggcatctagaaggcgtcatgaattactttctcttctctcttctcaattttgaggtcctcattcccaagattgaggaggcagtagttaatctgggaaggcagtagaatggccagcattcctgcctgtaagtcttcccaagacagaggcccggtgacacagttcagccaggactgaccacagggctctagagctctctttggtgagacttccctggatggagagcagcagcaggggaagaggtgctctcagagacagcagggctggtgctcttctcccacaagctgagcctccacgttcagcagatactgtccaaggcaggggtacggctgaccaggaatgaaggttgaactctgctcctgagcacggtgcgtgcaaagcatatagcagcacataggctcaggcttctgtaggcttcctgtcccagagccaattatggaagtaagggcttccctccagctagtcactggaatggaaaagtgtgttcctgttcatagccaggaaacccagctcagcaaactccctttcaaagctgtgtgaccggctgggcatggtggctcacacctgtaatcccagcactttgggaggccaaggcaggcaatcacctgaggtcaggagttcaagaccagcctggctaacatgtgaaactaataataatacaaaaattagctgggcgtggtggcacatgcctgtaatcccagctacttgggaggctgagttgggaggattgctgcaatctgggaggtggaagttgcagtgagccgagatcatgccactgcactccagcctgggcgacggagtgagactccatctc

SEQ ID NO: 126757 - DNA, 3725 bp, Homo sapiens
  Payload ID: 4853
  Gene Symbol: DEF8
  Gene Name: differentially expressed in FDCP 8 homolog (mouse)
  Uniprot ID: Q6ZN54
  ENST ID: ENST00000268676
  CDS Start-End: 90-1628
atccagcgcagccgggagacagatgcgaggcggcggtcagcaggtgccgaacccacggccaggcttccgtggccagcagccctagaggaatggccatcctgtccctgcgagcccctgggccctggcaggcgatgcaggtatgggcagacaggacgctgttgactccgcacaccggggtgacttctcaggttctcggggtggcagctgcagtgatgacaccgcttcctggtggtcacgccgcgggcaggacgcgggaggccaggtgggatgctatggaatatgatgagaagctggcccgtttccggcaggcccacctcaaccccttcaacaagcagtctgggccgagacagcatgagcagggccctggggaggaggtcccggacgtcactcctgaagaggccctgcctgagctgccccctggggagccggaattccgctgccctgaacgcgtgatggatctcggcctgtctgaggaccacttctcccgccctgtgggtctgttcctggcctctgacgtccagcagctgcggcaggcgatcgaggagtgcaagcaggtgattctggagctgcccgagcagtcggagaagcagaaggatgccgtggtgcgactcatccacctccggctgaagctccaggagctgaaggaccccaatgaggatgagccaaacatccgagtgctccttgagcaccgcttttacaaggagaagagcaagagcgtcaagcagacctgtgacaagtgtaacaccatcatctgggggctcattcagacctggtacacctgcacagggtgttattaccgctgtcacagtaagtgcttgaacctcatctccaagccctgtgtgagctccaaagtcagccaccaagctgaatacgaactgaacatctgccctgagacagggctggacagccaggattaccgctgtgccgagtgccgggcgcccatctctctgcggggtgtgcccagtgaggccaggcagtgcgactacaccggccagtactactgcagccactgccactggaacgacctggctgtgatccctgcacgcgttgtacacaactgggactttgagcctcgaaaggtttctcgctgcagcatgcgctacctggcgctgatggtgtctcggcccgtactcaggctccgggagatcaaccctctgctgttcagctacgtggaggagctggtggagattcgcaagctgcgccaggacatcctgctcatgaagccgtacttcatcacctgcagggaggccatggaggctcgtctgctgctgcagctccaggatcggcagcattttgtggagaacgacgagatgtactctgtccaggacctcctggacgtgcatgccggccgcctgggctgctcgctcaccgagatccacacgctcttcgccaagcacatcaagctggactgcgagcggtgccaggccaagggcttcgtgtgtgagctctgcagagagggcgacgtgctgttcccgttcgacagccacacgtctgtgtgcgccgactgctccgcggtcttccacagggactgctactacgacaactccaccacttgtcccaagtgtgcccggctcagcctgaggaagcagtcgctcttccaggagccaggtcccgatgtggaggcctagcgccgaggaacagtgctgggcaccccgcctggcccgccaggacccaccctgccaacatcaagttgttccttctgctccggagacccctggggtgcggccctggccccctccacccctgctgggccagagcgggtgggcagtgtcaaggcccgctgtctcccaggtgcttgctgggactcggggcggctgcacctggctgtcacctgggtgtgctgctgtgaggggtccttgcgtggcccccatccttcccccaatgcagaactccatgggcagggagctggggggacatctcacctcccccatggcacagagccctccacacccctggaccagggcatccgggccctagaaattccacagctcccgtcctggccaccctggaagctcatcaggccaagacccggacagagcttcagaggagtgttgagtgacacctgaggatgcggctgcacacactcagccaagggccgagtctcacctgcggtggggtgtcggctctgcctgggggctccatccctttcagccactcgtggccttggggatttctggttgtccccagctgggactgttcacagttgtcacctgcagacctgcctctccctggcctgaggttcaaaggcctcatcggatggtcagtacagtggggtcacctgttgtttctatacaacagcagggaaggggccatggagcttttccctgctgggtgctcctgctttggcccagcccacctttcctggtgctccaagctaggaggctgtggccccagcctgaggagggtgtcctggcctccaggtgtgcagcaggggctgtgtgctgggggaggttccagttaggcgatgggatcctgcagtggtctggtggcatttcttggaaccagatttacctgaggagctctgtcctgctccctgtggagggctccagatagctcagaaatgaccagccaatggccttttgtttgggggcctgaggtcaagagagctgagagtattcgctcgactgagcacattcaggaagatcagggcaggcgtgtgggaggtccctcactccacgggacagaggcccctgggcagcagaggaaacctacagctctgggtgaggggacacttggctttggtgtttgcactttacagatcctgcggtccacgaggggcctcaggagaggacgtgtcaggacgtggcttcccagccttctgccttgggcagtgggggtgctcctgtctgtccttttcccccacaccctggactgtgcttggctgttggtgcacatggttggcacacggtgggcagagggcagagaatgccactgcttggttattggtcccctttgaccaggaaacccaagaggagacacctcagtcagcagaaaggccacctggctcactggctcattccaggagtgggagagacggcagggtctcctctttgtcctccggcatcaggaaggggatggtgtccactccccactgtggtggctttaggcaaggttcttattgtctgctctgcctcggtttccccatctggaaaatgggggcaggggtcctgacctacctcaggtggaacggtgagcagggaacatgtcggagtccttcagagaatgtgatgtgaggttggatcaacagtgtgggttcctgtcctgtttccccttcctctttggggctgaggaggaggttaaaggccaaatgctgtttcccaacaccccaaagtctgcacacgtctcatgaatgcatcacatttctgtcatatggatattagccattccgaaatctgtgtaatcaacttcacattattcaagttacaaatcactgtgtccatagaaaaactgtgctggtatttgctggacaaagggttgggccccttttatttttacctgccacccagcatctcccccacctgccccttctgggtgacacagccggtaaacggaatcacgtatggttctttctgtgggtctgtggcacagcaggaagagcccggtgccgccagcaccttgtggaagaccacacatgggtggtcccacagcatgggaccaggctggcctgagggatgcccagttgtaacaatgctgctgtcactgtctcattaaatatacatccttta

SEQ ID NO: 126758 - DNA, 852 bp, Homo sapiens
  Payload ID: 4853
  Gene Symbol: DEF8
  Gene Name: differentially expressed in FDCP 8 homolog (mouse)
  Uniprot ID: Q6ZN54
  ENST ID: ENST00000418391
  CDS Start-End: 128-721
agatgcgaggcggcggtcagcaggtgccgaacccacggccaggcttccgtggccagcagccctagaggaatggccatcctgtccctgcgagcccctgggccctggcaggcgatgcaggtgggatgctatggaatatgatgagaagctggcccgtttccggcaggcccacctcaaccccttcaacaagcagtctgggccgagacagcatgagcagggccctggggaggaggtcccggacgtcactcctgaagaggccctgcctgagctgccccctggggagccggaattccgctgccctgaacgcgtgatggatctcggcctgtctgaggaccacttctcccgccctgtgggtctgttcctggcctctgacgtccagcagctgcggcaggcgatcgaggagtgcaagcaggtgattctggagctgcccgagcagtcggagaagcagaaggatgccgtggtgcgactcatccacctccggctgaagctccaggagctgaaggaccccaatgaggatgagccaaacatccgagtgctccttgagcaccgcttttacaaggagaagagcaagagcgtcaagcagacctgtgacaagtgtaacaccatcatctgggggctcattcagacctggtacacctgcacaggtgggccgagacccagacgaggagtgaggaatgagagagaccaaagttcctgcctccgctgggctcacattcagatgtgagctatccagtgtggtggccactagccaaacatggccagtcaaagttaaattaactaaatatgcatttcctcgttgtactgtctacattggacagggctgttctggatgagaaattaaactagtgaattaca

SEQ ID NO: 126759 - DNA, 651 bp, Homo sapiens
  Payload ID: 4853
  Gene Symbol: DEF8
  Gene Name: differentially expressed in FDCP 8 homolog (mouse)
  ENST ID: ENST00000569061
  CDS Start-End: 249-651
agatgcgaggcggcggtcagcaggtgccgaacccacggccaggcttccgtggccagcagccctagaggaatggccatcctgtccctgcgagcccctgggccctggcaggcgatgcagaaggaggagtgatgttgggatggcctgatttctcctgtgtcctgggtgctccctgggagactggggaggtgctggcatcgggtggccgcctctgactctgtgacccacccacagtcatcaggtgggatgctatggaatatgatgagaagctggcccgtttccggcaggcccacctcaaccccttcaacaagcagtctgggccgagacagcatgagcagggccctggggaggaggtcccggacgtcactcctgaagaggccctgcctgagctgccccctggggagccggaattccgctgccctgaacgcgtgatggatctcggcctgtctgaggaccacttctcccgccctgtgggtctgttcctggcctctgacgtccagcagctgcggcaggcgatcgaggagtgcaagcaggtgattctggagctgcccgagcagtcggagaagcagaaggatgccgtggtgcgactcatccacctccggctgaagctccaggagctgaaggaccccaatgaggatgagccaaacatccgag

SEQ ID NO: 126760 - DNA, 573 bp, Homo sapiens
  Payload ID: 4853
  Gene Symbol: DEF8
  Gene Name: differentially expressed in FDCP 8 homolog (mouse)
  ENST ID: ENST00000562578
  CDS Start-End: 43-573
gtagcggggcggccgggcggatccagcgcagccgggagacagatgcgaggcggcggtcaggcccacctcaaccccttcaacaagcagtctgggccgagacagcatgagcagggccctggggaggaggtcccggacgtcactcctgaagaggccctgcctgagctgccccctggggagccggaattccgctgccctgaacgcgtgatggatctcggcctgtctgaggaccacttctcccgccctgtgggtctgttcctggcctctgacgtccagcagctgcggcaggcgatcgaggagtgcaagcaggtgattctggagctgcccgagcagtcggagaagcagaaggatgccgtggtgcgactcatccacctccggctgaagctccaggagctgaaggaccccaatgaggatgagccaaacatccgagtgctccttgagcaccgcttttacaaggagaagagcaagagcgtcaagcagacctgtgacaagtgtaacaccatcatctgggggctcattcagacctggtacacctgcacagggtgttattaccgctgtcacagtaagtgcttgaac

SEQ ID NO: 126761 - DNA, 279 bp, Homo sapiens
  Payload ID: 4853
  Gene Symbol: DEF8
  Gene Name: differentially expressed in FDCP 8 homolog (mouse)
  ENST ID: ENST00000564836
  CDS Start-End: 82-279
gttggggaaagggggtggtccgtggtgagcctggtacctggggactcatcctggccctgcctggccctcaggtgggatgctatggaatatgatgagaagctggcccgtttccggcaggcccacctcaaccccttcaacaagcagtctgggccgagacagcatgagcagggccctggggaggaggtcccggacgtcactcctgaagaggccctgcctgagctgccccctggggagccggaattccgctgccctgaacgcgtgatggatctcggcctgtct

SEQ ID NO: 126762 - DNA, 612 bp, Homo sapiens
  Payload ID: 4853
  Gene Symbol: DEF8
  Gene Name: differentially expressed in FDCP 8 homolog (mouse)
  ENST ID: ENST00000561784
  CDS Start-End: 168-491
gtagcggggcggccgggcggatccagcgcagccgggagacagatgcgaggcggcggtcagcaggtgccgaacccacggccaggcttccgtggccagcagccctagaggaatggccatcctgtccctgcgagcccctgggccctggcaggcgatgcaggtgggatgctatggaatatgatgagaagctggcccgtttccggcaggcccacctcaaccccttcaacaagcagtctgggccgagacagcatgagcagggccctggggaggaggtcccggacgtcactcctgaagaggccctgcctgagctgccccctggggagccggaattccgctgccctgaacgcgtgatggatctcggcctgtctgaggaccacttctcccgccctgtggatgggcctttgactgcccccgcccccaacctgggcagggtctgttcctggcctctgacgtccagcagctgcggcaggcgatcgaggagtgcaagcaggtgattctggagctgcccgagcagtcggagaagcagaaggatgccgtggtgcgactcatccacctccggctgaagctccaggagctgaaggaccccaatgaggatgagccaaacatccgagtgct

SEQ ID NO: 126763 - DNA, 549 bp, Homo sapiens
  Payload ID: 4853
  Gene Symbol: DEF8
  Gene Name: differentially expressed in FDCP 8 homolog (mouse)
  ENST ID: ENST00000566820
  CDS Start-End: 168-549
gtagcggggcggccgggcggatccagcgcagccgggagacagatgcgaggcggcggtcagcaggtgccgaacccacggccaggcttccgtggccagcagccctagaggaatggccatcctgtccctgcgagcccctgggccctggcaggcgatgcaggtgggatgctatggaatatgatgagaagctggcccgtttccggcaggcccacctcaaccccttcaacaagcagtctgggccgagacagcatgagcagggccctggggaggaggtcccggacgtcactcctgaagaggccctgcctgagctgccccctggggagccggaattccgctgccctgaacgcgtgatggatctcggcctgtctgaggaccacttctcccgccctgtgcagctgcggcaggcgatcgaggagtgcaagcaggtgattctggagctgcccgagcagtcggagaagcagaaggatgccgtggtgcgactcatccacctccggctgaagctccaggagctgaaggaccccaatgaggatgagccaaacatccgagtgctcc

SEQ ID NO: 126764 - DNA, 468 bp, Homo sapiens
  Payload ID: 4853
  Gene Symbol: DEF8
  Gene Name: differentially expressed in FDCP 8 homolog (mouse)
  ENST ID: ENST00000562986
  CDS Start-End: 93-468
agcgcagccgggagacagatgcgaggcggcggtcagaggccctgcctgagctgccccctggggagccggaattccgctgccctgaacgcgtgatggatctcggcctgtctgaggaccacttctcccgccctgtgggtctgttcctggcctctgacgtccagcagctgcggcaggcgatcgaggagtgcaagcaggtgattctggagctgcccgagcagtcggagaagcagaaggatgccgtggtgcgactcatccacctccggctgaagctccaggagctgaaggaccccaatgaggatgagccaaacatccgagtgctccttgagcaccgcttttacaaggagaagagcaagagcgtcaagcagacctgtgacaagtgtaacaccatcatctgggggctcattcagacctggtacacctgcacagggtgttattaccgctgtcacagtaagtgcttgaacctcatct

SEQ ID NO: 126765 - DNA, 1554 bp, Homo sapiens
  Payload ID: 4853
  Gene Symbol: DEF8
  Gene Name: differentially expressed in FDCP 8 homolog (mouse)
  Uniprot ID: Q6ZN54
  ENST ID: ENST00000567874
  CDS Start-End: 174-1349
agatgcgaggcggcggtcagcaggtgccgaacccacggccaggcttccgtggccagcagccctagaggaatggccatcctgtccctgcgagcccctgggccctggcaggcgatgcagaggccctgcctgagctgccccctggggagccggaattccgctgccctgaacgcgtgatggatctcggcctgtctgaggaccacttctcccgccctgtgggtctgttcctggcctctgacgtccagcagctgcggcaggcgatcgaggagtgcaagcaggtgattctggagctgcccgagcagtcggagaagcagaaggatgccgtggtgcgactcatccacctccggctgaagctccaggagctgaaggaccccaatgaggatgagccaaacatccgagtgctccttgagcaccgcttttacaaggagaagagcaagagcgtcaagcagacctgtgacaagtgtaacaccatcatctgggggctcattcagacctggtacacctgcacagggtgttattaccgctgtcacagtaagtgcttgaacctcatctccaagccctgtgtgagctccaaagtcagccaccaagctgaatacgaactgaacatctgccctgagacagggctggacagccaggattaccgctgtgccgagtgccgggcgcccatctctctgcggggtgtgcccagtgaggccaggcagtgcgactacaccggccagtactactgcagccactgccactggaacgacctggctgtgatccctgcacgcgttgtacacaactgggactttgagcctcgaaaggtttctcgctgcagcatgcgctacctggcgctgatggtgtctcggcccgtactcaggctccgggagatcaaccctctgctgttcagctacgtggaggagctggtggagattcgcaagctgcgccaggacatcctgctcatgaagccgtacttcatcacctgcagggaggccatggaggctcgtctgctgctgcagctccaggatcggcagcattttgtggagaacgacgagatgtactctgtccaggacctcctggacgtgcatgccggccgcctgggctgctcgctcaccgagatccacacgctcttcgccaagcacatcaagctggactgcgagcggtgccaggccaagggcttcgtgtgtgagctctgcagagagggcgacgtgctgttcccgttcgacagccacacgtctgtgtgcgccgactgctccgcggtcttccacagggactgctactacgacaactccaccacttgtcccaagtgtgcccggctcagcctgaggaagcagtcgctcttccaggagccaggtcccgatgtggaggcctagcgccgaggaacagtgctgggcaccccgcctggcccgccaggacccaccctgccaacatcaagttgttccttctgctccggagacccctggggtgcggccctggccccctccacccctgctgggccagagcgggtgggcagtgtcaaggcccgctgtctcccaggtgcttgctgggactcggggcggctgcacctggctgtcacct

SEQ ID NO: 126766 - DNA, 572 bp, Homo sapiens
  Payload ID: 4853
  Gene Symbol: DEF8
  Gene Name: differentially expressed in FDCP 8 homolog (mouse)
  ENST ID: ENST00000567884
  CDS Start-End: 253-572
agatgcgaggcggcggtcagcaggtgccgaacccacggccaggcttccgtggccagcagccctagaggaatggccatcctgtccctgcgagcccctgggccctggcaggcgatgcaggaagaaggaggagtgatgttgggatggcctgatttctcctgtgtcctgggtgctccctgggagactggggaggtgctggcatcgggtggccgcctctgactctgtgacccacccacagtcatcaggtgggatgctatggaatatgatgagaagctggcccgtttccggcaggcccacctcaaccccttcaacaagcagtctgggccgagacagcatgagcagggccctggggaggaggtcccggacgtcactcctgaagaggccctgcctgagctgccccctggggagccggaattccgctgccctgaacgcgtgatggatctcggcctgtctgaggaccacttctcccgccctgtgggtctgttcctggcctctgacgtccagcagctgcggcaggcgatcgaggagtgcaagcaggtgattctggagctgcccgagcagtcggagaagcagaa

SEQ ID NO: 126767 - DNA, 1852 bp, Homo sapiens
  Payload ID: 4853
  Gene Symbol: DEF8
  Gene Name: differentially expressed in FDCP 8 homolog (mouse)
  Uniprot ID: Q6ZN54
  ENST ID: ENST00000569453
  CDS Start-End: 394-1749
agacagatgcgaggcggcggtcagcaggtgccgaacccacggccaggcttccgtggccagcagccctagaggaatggccatcctgtccctgcgagcccctgggccctggcaggcgatgcagcccggaggagagctggtagcctagagtacagctgctgggcagaacggaggtgtccctgccagcgtgccttccttgacgctcctctggccatgttttaaacaccaggaggtttccagcggcttccccaggcgtagctcctgcacctttttcctgggctggtcaccatatgtgatgacagtgccagtctgttctgagcagctctgggctcctggcttcactgacatcataaacaagtccttagcccttccatccaccccagaaagtgggatgctatggaatatgatgagaagctggcccgtttccggcaggcccacctcaaccccttcaacaagcagtctgggccgagacagcatgagcagggccctggggaggaggtcccggacgtcactcctgaagaggccctgcctgagctgccccctggggagccggaattccgctgccctgaacgcgtgatggatctcggcctgtctgaggaccacttctcccgccctgtgggtctgttcctggcctctgacgtccagcagctgcggcaggcgatcgaggagtgcaagcaggtgattctggagctgcccgagcagtcggagaagcagaaggatgccgtggtgcgactcatccacctccggctgaagctccaggagctgaaggaccccaatgaggatgagccaaacatccgagtgctccttgagcaccgcttttacaaggagaagagcaagagcgtcaagcagacctgtgacaagtgtaacaccatcatctgggggctcattcagacctggtacacctgcacagggtgttattaccgctgtcacagtaagtgcttgaacctcatctccaagccctgtgtgagctccaaagtcagccaccaagctgaatacgaactgaacatctgccctgagacagggctggacagccaggattaccgctgtgccgagtgccgggcgcccatctctctgcggggtgtgcccagtgaggccaggcagtgcgactacaccggccagtactactgcagccactgccactggaacgacctggctgtgatccctgcacgcgttgtacacaactgggactttgagcctcgaaaggtttctcgctgcagcatgcgctacctggcgctgatggtgtctcggcccgtactcaggctccgggagatcaaccctctgctgttcagctacgtggaggagctggtggagattcgcaagctgcgccaggacatcctgctcatgaagccgtacttcatcacctgcagggaggccatggaggctcgtctgctgctgcagctccaggatcggcagcattttgtggagaacgacgagatgtactctgtccaggacctcctggacgtgcatgccggccgcctgggctgctcgctcaccgagatccacacgctcttcgccaagcacatcaagctggactgcgagcggtgccaggccaagggcttcgtgtgtgagctctgcagagagggcgacgtgctgttcccgttcgacagccacacgtctgtgtgcgccgactgctccgcggtcttccacagggactgctactacgacaactccaccacttgtcccaagtgtgcccggctcagcctgaggaagcagtcgctcttccaggagccaggtcccgatgtggaggcctagcgccgaggaacagtgctgggcaccccgcctggcccgccaggacccaccctgccaacatcaagttgttccttctgctccggagacccctggggtgcggccctgg

SEQ ID NO: 126768 - DNA, 558 bp, Homo sapiens
  Payload ID: 4853
  Gene Symbol: DEF8
  Gene Name: differentially expressed in FDCP 8 homolog (mouse)
  ENST ID: ENST00000561959
  CDS Start-End: 31-558
agatgcgaggcggcggtcaggtgggatgctatggaatatgatgagaagctggcccgtttccggcaggcccacctcaaccccttcaacaagcagtctgggccgagacagcatgagcagggccctggggaggaggtcccggacgtcactcctgaagaggccctgcctgagctgccccctggggagccggaattccgctgccctgaacgcgtgatggatctcggcctgtctgaggaccacttctcccgccctgtgggtctgttcctggcctctgacgtccagcagctgcggcaggcgatcgaggagtgcaagcaggtgattctggagctgcccgagcagtcggagaagcagaaggatgccgtggtgcgactcatccacctccggctgaagctccaggagctgaagcggtgccaggccaagggcttcgtgtgtgagctctgcagagagggcgacgtgctgttcccgttcgacagccacacgtctgtgtgcgccgactgctccgcggtcttccacagggactgctactacgacaactccaccacttgtcccaagtgtgcccgg

SEQ ID NO: 126769 - DNA, 3549 bp, Homo sapiens
  Payload ID: 4853
  Gene Symbol: DEF8
  Gene Name: differentially expressed in FDCP 8 homolog (mouse)
  Uniprot ID: Q6ZN54
  ENST ID: ENST00000570182
  CDS Start-End: 128-1453
agatgcgaggcggcggtcagcaggtgccgaacccacggccaggcttccgtggccagcagccctagaggaatggccatcctgtccctgcgagcccctgggccctggcaggcgatgcaggtgggatgctatggaatatgatgagaagctggcccgtttccggcaggcccacctcaaccccttcaacaagcagtctgggccgagacagcatgagcagggccctggggaggaggtcccggacgtcactcctgaagaggccctgcctgagctgccccctggggagccggaattccgctgccctgaacgcgtgatggatctcggcctgtctgaggaccacttctcccgccctgtgctgcggcaggcgatcgaggagtgcaagcaggtgattctggagctgcccgagcagtcggagaagcagaaggatgccgtggtgcgactcatccacctccggctgaagctccaggagctgaaggaccccaatgaggatgagccaaacatccgagtgctccttgagcaccgcttttacaaggagaagagcaagagcgtcaagcagacctgtgacaagtgtaacaccatcatctgggggctcattcagacctggtacacctgcacagggtgttattaccgctgtcacagtaagtgcttgaacctcatctccaagccctgtgtgagctccaaagtcagccaccaagctgaatacgaactgaacatctgccctgagacagggctggacagccaggattaccgctgtgccgagtgccgggcgcccatctctctgcggggtgtgcccagtgaggccaggcagtgcgactacaccggccagtactactgcagccactgccactggaacgacctggctgtgatccctgcacgcgttgtacacaactgggactttgagcctcgaaaggtttctcgctgcagcatgcgctacctggcgctgatggtgtctcggcccgtactcaggctccgggagatcaaccctctgctgttcagctacgtggaggagctggtggagattcgcaagctgcgccaggacatcctgctcatgaagccgtacttcatcacctgcagggaggccatggaggctcgtctgctgctgcagctccaggatcggcagcattttgtggagaacgacgagatgtactctgtccaggacctcctggacgtgcatgccggccgcctgggctgctcgctcaccgagatccacacgctcttcgccaagcacatcaagctggactgcgagcggtgccaggccaagggcttcgtgtgtgagctctgcagagagggcgacgtgctgttcccgttcgacagccacacgtctgtgtgcgccgactgctccgcggtcttccacagggactgctactacgacaactccaccacttgtcccaagtgtgcccggctcagcctgaggaagcagtcgctcttccaggagccaggtcccgatgtggaggcctagcgccgaggaacagtgctgggcaccccgcctggcccgccaggacccaccctgccaacatcaagttgttccttctgctccggagacccctggggtgcggccctggccccctccacccctgctgggccagagcgggtgggcagtgtcaaggcccgctgtctcccaggtgcttgctgggactcggggcggctgcacctggctgtcacctgggtgtgctgctgtgaggggtccttgcgtggcccccatccttcccccaatgcagaactccatgggcagggagctggggggacatctcacctcccccatggcacagagccctccacacccctggaccagggcatccgggccctagaaattccacagctcccgtcctggccaccctggaagctcatcaggccaagacccggacagagcttcagaggagtgttgagtgacacctgaggatgcggctgcacacactcagccaagggccgagtctcacctgcggtggggtgtcggctctgcctgggggctccatccctttcagccactcgtggccttggggatttctggttgtccccagctgggactgttcacagttgtcacctgcagacctgcctctccctggcctgaggttcaaaggcctcatcggatggtcagtacagtggggtcacctgttgtttctatacaacagcagggaaggggccatggagcttttccctgctgggtgctcctgctttggcccagcccacctttcctggtgctccaagctaggaggctgtggccccagcctgaggagggtgtcctggcctccaggtgtgcagcaggggctgtgtgctgggggaggttccagttaggcgatgggatcctgcagtggtctggtggcatttcttggaaccagatttacctgaggagctctgtcctgctccctgtggagggctccagatagctcagaaatgaccagccaatggccttttgtttgggggcctgaggtcaagagagctgagagtattcgctcgactgagcacattcaggaagatcagggcaggcgtgtgggaggtccctcactccacgggacagaggcccctgggcagcagaggaaacctacagctctgggtgaggggacacttggctttggtgtttgcactttacagatcctgcggtccacgaggggcctcaggagaggacgtgtcaggacgtggcttcccagccttctgccttgggcagtgggggtgctcctgtctgtccttttcccccacaccctggactgtgcttggctgttggtgcacatggttggcacacggtgggcagagggcagagaatgccactgcttggttattggtcccctttgaccaggaaacccaagaggagacacctcagtcagcagaaaggccacctggctcactggctcattccaggagtgggagagacggcagggtctcctctttgtcctccggcatcaggaaggggatggtgtccactccccactgtggtggctttaggcaaggttcttattgtctgctctgcctcggtttccccatctggaaaatgggggcaggggtcctgacctacctcaggtggaacggtgagcagggaacatgtcggagtccttcagagaatgtgatgtgaggttggatcaacagtgtgggttcctgtcctgtttccccttcctctttggggctgaggaggaggttaaaggccaaatgctgtttcccaacaccccaaagtctgcacacgtctcatgaatgcatcacatttctgtcatatggatattagccattccgaaatctgtgtaatcaacttcacattattcaagttacaaatcactgtgtccatagaaaaactgtgctggtatttgctggacaaagggttgggccccttttatttttacctgccacccagcatctcccccacctgccccttctgggtgacacagccggtaaacggaatcacgtatggttctttctgtgggtctgtggcacagcaggaagagcccggtgccgccagcaccttgtggaagaccacacatgggtggtcccacagcatgggaccaggctggcctgagggatgcccagttgtaacaatgctgctgtcactgtctcattaaatatacatccttt

SEQ ID NO: 126770 - DNA, 516 bp, Homo sapiens
  Payload ID: 4853
  Gene Symbol: DEF8
  Gene Name: differentially expressed in FDCP 8 homolog (mouse)
  ENST ID: ENST00000566079
  CDS Start-End: 107-516
gtagcggggcggccgggcggatccagcgcagccgggagacagatgcgaggcggcggtcaggtgccgaacccacggccaggcttccgtggccagcagccctagaggaatggccatcctgtccctgcgagcccctgggccctggcaggcgatgcaggcccacctcaaccccttcaacaagcagtctgggccgagacagcatgagcagggccctggggaggaggtcccggacgtcactcctgaagaggccctgcctgagctgccccctggggagccggaattccgctgccctgaacgcgtgatggatctcggcctgtctgaggaccacttctcccgccctgtgggtctgttcctggcctctgacgtccagcagctgcggcaggcgatcgaggagtgcaagcaggtgattctggagctgcccgagcagtcggagaagcagaaggatgccgtggtgcgactcatccacctccggctgaagctccaggagctgaaggaccccaatgaggatgagccaaacat

SEQ ID NO: 126771 - DNA, 578 bp, Homo sapiens
  Payload ID: 4853
  Gene Symbol: DEF8
  Gene Name: differentially expressed in FDCP 8 homolog (mouse)
  ENST ID: ENST00000567999
  CDS Start-End: 129-578
gcgtgccatgaacctccgcgccggaggcggcagcagcgagcgcggggctggatccagcgtagcggggcggccgggcggatccagcgcagccgggagacagatgcgaggcggcggtcaggtgggatgctatggaatatgatgagaagctggcccgtttccggcaggcccacctcaaccccttcaacaagcagtctgggccgagacagcatgagcagggccctggggaggaggtcccggacgtcactcctgaagaggccctgcctgagctgccccctggggagccggaattccgctgccctgaacgcgtgatggatctcggcctgtctgaggaccacttctcccgccctgtgggtctgttcctggcctctgacgtccagcagctgcggcaggcgatcgaggagtgcaagcaggtgattctggagctgcccgagcagtcggagaagcagaaggatgccgtggtgcgactcatccacctccggctgaagctccaggagctgaaggaccccaatgaggatgagccaaacatccgagtgctccttgagcaccgcttttacaaggagaagagcaagagcgtcaag

SEQ ID NO: 126772 - DNA, 580 bp, Homo sapiens
  Payload ID: 4853
  Gene Symbol: DEF8
  Gene Name: differentially expressed in FDCP 8 homolog (mouse)
  ENST ID: ENST00000561741
  CDS Start-End: 23-580
atccagcgcagccgggagacagatgcgaggcggcggtcaggttctcggggtggcagctgcagtgatgacaccgcttcctggtggtcacgccgcgggcaggacgcgggaggccaggtgggatgctatggaatatgatgagaagctggcccgtttccggcaggcccacctcaaccccttcaacaagcagtctgggccgagacagcatgagcagggccctggggaggaggtcccggacgtcactcctgaagaggccctgcctgagctgccccctggggagccggaattccgctgccctgaacgcgtgatggatctcggcctgtctgaggaccacttctcccgccctgtgggtctgttcctggcctctgacgtccagcagctgcggcaggcgatcgaggagtgcaagcaggtgattctggagctgcccgagcagtcggagaagcagaaggatgccgtggtgcgactcatccacctccggctgaagctccaggagctgaaggaccccaatgaggatgagccaaacatccgagtgctccttgagcaccgcttttacaaggagaagagcaagagcgtcaagcagacc

SEQ ID NO: 126773 - DNA, 1767 bp, Homo sapiens
  Payload ID: 4853
  Gene Symbol: DEF8
  Gene Name: differentially expressed in FDCP 8 homolog (mouse)
  Uniprot ID: Q6ZN54
  ENST ID: ENST00000563795
  CDS Start-End: 120-1424
ggcggcggtcagcaggtgccgaacccacggccaggcttccgtggccagcagccctagaggaatggccatcctgtccctgcgagcccctgggccctggcaggcgatgcaggtgggatgctatggaatatgatgagaagctggcccgtttccggcaggcccacctcaaccccttcaacaagcagtctgggccgagacagcatgagcagggccctggggaggaggtcccggacgtcactcctgaagaggccctgcctgagctgccccctggggagccggaattccgctgccctgaacgcgtgatggatctcggcctgtctgaggaccacttctcccgccctgtgggtctgttcctggcctctgacgtccagcagctgcggcaggcgatcgaggagtgcaagcaggtgattctggagctgcccgagcagtcggagaagcagaaggatgccgtggtgcgactcatccacctccggctgaagctccaggagctgaaggaccccaatgaggatgagccaaacatccgagtgctccttgagcaccgcttttacaaggagaagagcaagagcgtcaagcagacctgtgacaagtgtaacaccatcatctgggggctcattcagacctggtacacctgcacagggtgttattaccgctgtcacagtaagtgcttgaacctcatctccaagccctgtgtgagctccaaagtcagccaccaagctgaatacgaactgaacatctgccctgagacagggctggacagccaggattaccgctgtgccgagtgccgggcgcccatctctctgcggggtgtgcccagtgaggccaggcagtgcgactacaccggccagtactactgcagccactgccactggaacgacctggctgtgatccctgcacgcgttgtacacaactgggactttgagcctcgaaaggtttctcgctgcagcatgcgctacctggcgctgatggtgtctcggcccgtactcaggctccgggagatcaaccctctgctgttcagctacgtggaggagctggtggagattcgcaagctgcgccaggacatcctgctcatgaagccgtacttcatcacctgcagggaggccatggaggctcgtctgctgctgcaggacctcctggacgtgcatgccggccgcctgggctgctcgctcaccgagatccacacgctcttcgccaagcacatcaagctggactgcgagcggtgccaggccaagggcttcgtgtgtgagctctgcagagagggcgacgtgctgttcccgttcgacagccacacgtctgtgtgcgccgactgctccgcggtcttccacagggactgctactacgacaactccaccacttgtcccaagtgtgcccggctcagcctgaggaagcagtcgctcttccaggagccaggtcccgatgtggaggcctagcgccgaggaacagtgctgggcaccccgcctggcccgccaggacccaccctgccaacatcaagttgttccttctgctccggagacccctggggtgcggccctggccccctccacccctgctgggccagagcgggtgggcagtgtcaaggcccgctgtctcccaggtgcttgctgggactcggggcggctgcacctggctgtcacctgggtgtgctgctgtgaggggtccttgcgtggcccccatccttcccccaatgcagaactccatgggcagggagctggggggacatctcacctcccccatggcacagagccctccacacccctggaccagggcatccggg

SEQ ID NO: 126774 - DNA, 4450 bp, Homo sapiens
  Payload ID: 4853
  Gene Symbol: DEF8
  Gene Name: differentially expressed in FDCP 8 homolog (mouse)
  Uniprot ID: Q6ZN54
  ENST ID: ENST00000563594
  CDS Start-End: 998-2353
agctgaatcttccacgcgagaagcctaagagtagggatacgggggcggggagcagcaggcctgctctgtgtgtaaacaacgggaaagcaggaataacgccagggcccgcggacaccagctgcctccgaagtcccgctgcccggcgcctgcatggagcagcctcctgagcgcagtgtggcgcgtcctcctgtgtaaagagggtagagccgcgccgggtccctccctctgcagccgtgaagcccccgcggggccctgcaggtggctggcggcacctgcacacggtggttctctgttcctttttcctcctcaaccactgaggttaaaaaaagtgttaaaagccaccctttttgtttttttgagacggagtctcgctctgtcgcccaggctggagtgcagtggtgcgatctcggctcactccgagctccgcctcccgggttcacgccgttctcccgcctcagcctcccgcgtagctgggactacaggcgcccgccaccgcgcccggctaatttttcgtatttttagtggagacggggtttcaccgtgttagccaggatggtctcgatctcctgacctcgcgatccgcccgcctcggcctcccgaagcgctgggatgacaggcgtgagccgccgcgcccgcccattttttttaaacgtgttggggtttgggtttcagccacaggccttctgcgatgagaggaaacccaggacgcgcagccccaggtcaggcccgcggaacagccgggcggactccggggctcgcagactcgcgacccgcgtgccatgaacctccgcgccggaggcggcagcagcgagcgcggggctggatccagcgtagcggggcggccgggcggatccagcgcagccgggagacagatgcgaggcggcggtcagcaggtgccgaacccacggccaggcttccgtggccagcagccctagaggaatggccatcctgtccctgcgagcccctgggccctggcaggcgatgcaggtgggatgctatggaatatgatgagaagctggcccgtttccggcaggcccacctcaaccccttcaacaagcagtctgggccgagacagcatgagcagggccctggggaggaggtcccggacgtcactcctgaagaggccctgcctgagctgccccctggggagccggaattccgctgccctgaacgcgtgatggatctcggcctgtctgaggaccacttctcccgccctgtgggtctgttcctggcctctgacgtccagcagctgcggcaggcgatcgaggagtgcaagcaggtgattctggagctgcccgagcagtcggagaagcagaaggatgccgtggtgcgactcatccacctccggctgaagctccaggagctgaaggaccccaatgaggatgagccaaacatccgagtgctccttgagcaccgcttttacaaggagaagagcaagagcgtcaagcagacctgtgacaagtgtaacaccatcatctgggggctcattcagacctggtacacctgcacagggtgttattaccgctgtcacagtaagtgcttgaacctcatctccaagccctgtgtgagctccaaagtcagccaccaagctgaatacgaactgaacatctgccctgagacagggctggacagccaggattaccgctgtgccgagtgccgggcgcccatctctctgcggggtgtgcccagtgaggccaggcagtgcgactacaccggccagtactactgcagccactgccactggaacgacctggctgtgatccctgcacgcgttgtacacaactgggactttgagcctcgaaaggtttctcgctgcagcatgcgctacctggcgctgatggtgtctcggcccgtactcaggctccgggagatcaaccctctgctgttcagctacgtggaggagctggtggagattcgcaagctgcgccaggacatcctgctcatgaagccgtacttcatcacctgcagggaggccatggaggctcgtctgctgctgcagctccaggatcggcagcattttgtggagaacgacgagatgtactctgtccaggacctcctggacgtgcatgccggccgcctgggctgctcgctcaccgagatccacacgctcttcgccaagcacatcaagctggactgcgagcggtgccaggccaagggcttcgtgtgtgagctctgcagagagggcgacgtgctgttcccgttcgacagccacacgtctgtgtgcgccgactgctccgcggtcttccacagggactgctactacgacaactccaccacttgtcccaagtgtgcccggctcagcctgaggaagcagtcgctcttccaggagccaggtcccgatgtggaggcctagcgccgaggaacagtgctgggcaccccgcctggcccgccaggacccaccctgccaacatcaagttgttccttctgctccggagacccctggggtgcggccctggccccctccacccctgctgggccagagcgggtgggcagtgtcaaggcccgctgtctcccaggtgcttgctgggactcggggcggctgcacctggctgtcacctgggtgtgctgctgtgaggggtccttgcgtggcccccatccttcccccaatgcagaactccatgggcagggagctggggggacatctcacctcccccatggcacagagccctccacacccctggaccagggcatccgggccctagaaattccacagctcccgtcctggccaccctggaagctcatcaggccaagacccggacagagcttcagaggagtgttgagtgacacctgaggatgcggctgcacacactcagccaagggccgagtctcacctgcggtggggtgtcggctctgcctgggggctccatccctttcagccactcgtggccttggggatttctggttgtccccagctgggactgttcacagttgtcacctgcagacctgcctctccctggcctgaggttcaaaggcctcatcggatggtcagtacagtggggtcacctgttgtttctatacaacagcagggaaggggccatggagcttttccctgctgggtgctcctgctttggcccagcccacctttcctggtgctccaagctaggaggctgtggccccagcctgaggagggtgtcctggcctccaggtgtgcagcaggggctgtgtgctgggggaggttccagttaggcgatgggatcctgcagtggtctggtggcatttcttggaaccagatttacctgaggagctctgtcctgctccctgtggagggctccagatagctcagaaatgaccagccaatggccttttgtttgggggcctgaggtcaagagagctgagagtattcgctcgactgagcacattcaggaagatcagggcaggcgtgtgggaggtccctcactccacgggacagaggcccctgggcagcagaggaaacctacagctctgggtgaggggacacttggctttggtgtttgcactttacagatcctgcggtccacgaggggcctcaggagaggacgtgtcaggacgtggcttcccagccttctgccttgggcagtgggggtgctcctgtctgtccttttcccccacaccctggactgtgcttggctgttggtgcacatggttggcacacggtgggcagagggcagagaatgccactgcttggttattggtcccctttgaccaggaaacccaagaggagacacctcagtcagcagaaaggccacctggctcactggctcattccaggagtgggagagacggcagggtctcctctttgtcctccggcatcaggaaggggatggtgtccactccccactgtggtggctttaggcaaggttcttattgtctgctctgcctcggtttccccatctggaaaatgggggcaggggtcctgacctacctcaggtggaacggtgagcagggaacatgtcggagtccttcagagaatgtgatgtgaggttggatcaacagtgtgggttcctgtcctgtttccccttcctctttggggctgaggaggaggttaaaggccaaatgctgtttcccaacaccccaaagtctgcacacgtctcatgaatgcatcacatttctgtcatatggatattagccattccgaaatctgtgtaatcaacttcacattattcaagttacaaatcactgtgtccatagaaaaactgtgctggtatttgctggacaaagggttgggccccttttatttttacctgccacccagcatctcccccacctgccccttctgggtgacacagccggtaaacggaatcacgtatggttctttctgtgggtctgtggcacagcaggaagagcccggtgccgccagcaccttgtggaagaccacacatgggtggtcccacagcatgggaccaggctggcctgagggatgcccagttgtaacaatgctgctgtcactgtctcattaaatatacatccttta

SEQ ID NO: 126775 - DNA, 816 bp, Homo sapiens
  Payload ID: 4853
  Gene Symbol: DEF8
  Gene Name: differentially expressed in FDCP 8 homolog (mouse)
  Uniprot ID: Q6ZN54
  ENST ID: ENST00000610455
  CDS Start-End: 95-688
agcgagcgcggggctggatccagcgtagcggggcggccgggcggatccagcgcagccgggagacagatgcgaggcggcggtcaggtgggatgctatggaatatgatgagaagctggcccgtttccggcaggcccacctcaaccccttcaacaagcagtctgggccgagacagcatgagcagggccctggggaggaggtcccggacgtcactcctgaagaggccctgcctgagctgccccctggggagccggaattccgctgccctgaacgcgtgatggatctcggcctgtctgaggaccacttctcccgccctgtgggtctgttcctggcctctgacgtccagcagctgcggcaggcgatcgaggagtgcaagcaggtgattctggagctgcccgagcagtcggagaagcagaaggatgccgtggtgcgactcatccacctccggctgaagctccaggagctgaaggaccccaatgaggatgagccaaacatccgagtgctccttgagcaccgcttttacaaggagaagagcaagagcgtcaagcagacctgtgacaagtgtaacaccatcatctgggggctcattcagacctggtacacctgcacaggtgggccgagacccagacgaggagtgaggaatgagagagaccaaagttcctgcctccgctgggctcacattcagatgtgagctatccagtgtggtggccactagccaaacatggccagtcaaagttaaattaactaaatatgcatttcctcgttgtactgtctacattggacagggctgttctggatgagaaattaaactagtgaatt

SEQ ID NO: 126776 - DNA, 3883 bp, Homo sapiens
  Payload ID: 4853
  Gene Symbol: DEF8
  Gene Name: differentially expressed in FDCP 8 homolog (mouse)
  Uniprot ID: Q6ZN54
  ENST ID: ENST00000617948
  CDS Start-End: 432-1787
agcgagcgcggggctggatccagcgtagcggggcggccgggcggatccagcgcagccgggagacagatgcgaggcggcggtcagcaggtgccgaacccacggccaggcttccgtggccagcagccctagaggaatggccatcctgtccctgcgagcccctgggccctggcaggcgatgcagcccggaggagagctggtagcctagagtacagctgctgggcagaacggaggtgtccctgccagcgtgccttccttgacgctcctctggccatgttttaaacaccaggaggtttccagcggcttccccaggcgtagctcctgcacctttttcctgggctggtcaccatatgtgatgacagtgccagtctgttctgagcagctctgggctcctggcttcactgacatcataaacaagtccttagtgggatgctatggaatatgatgagaagctggcccgtttccggcaggcccacctcaaccccttcaacaagcagtctgggccgagacagcatgagcagggccctggggaggaggtcccggacgtcactcctgaagaggccctgcctgagctgccccctggggagccggaattccgctgccctgaacgcgtgatggatctcggcctgtctgaggaccacttctcccgccctgtgggtctgttcctggcctctgacgtccagcagctgcggcaggcgatcgaggagtgcaagcaggtgattctggagctgcccgagcagtcggagaagcagaaggatgccgtggtgcgactcatccacctccggctgaagctccaggagctgaaggaccccaatgaggatgagccaaacatccgagtgctccttgagcaccgcttttacaaggagaagagcaagagcgtcaagcagacctgtgacaagtgtaacaccatcatctgggggctcattcagacctggtacacctgcacagggtgttattaccgctgtcacagtaagtgcttgaacctcatctccaagccctgtgtgagctccaaagtcagccaccaagctgaatacgaactgaacatctgccctgagacagggctggacagccaggattaccgctgtgccgagtgccgggcgcccatctctctgcggggtgtgcccagtgaggccaggcagtgcgactacaccggccagtactactgcagccactgccactggaacgacctggctgtgatccctgcacgcgttgtacacaactgggactttgagcctcgaaaggtttctcgctgcagcatgcgctacctggcgctgatggtgtctcggcccgtactcaggctccgggagatcaaccctctgctgttcagctacgtggaggagctggtggagattcgcaagctgcgccaggacatcctgctcatgaagccgtacttcatcacctgcagggaggccatggaggctcgtctgctgctgcagctccaggatcggcagcattttgtggagaacgacgagatgtactctgtccaggacctcctggacgtgcatgccggccgcctgggctgctcgctcaccgagatccacacgctcttcgccaagcacatcaagctggactgcgagcggtgccaggccaagggcttcgtgtgtgagctctgcagagagggcgacgtgctgttcccgttcgacagccacacgtctgtgtgcgccgactgctccgcggtcttccacagggactgctactacgacaactccaccacttgtcccaagtgtgcccggctcagcctgaggaagcagtcgctcttccaggagccaggtcccgatgtggaggcctagcgccgaggaacagtgctgggcaccccgcctggcccgccaggacccaccctgccaacatcaagttgttccttctgctccggagacccctggggtgcggccctggccccctccacccctgctgggccagagcgggtgggcagtgtcaaggcccgctgtctcccaggtgcttgctgggactcggggcggctgcacctggctgtcacctgggtgtgctgctgtgaggggtccttgcgtggcccccatccttcccccaatgcagaactccatgggcagggagctggggggacatctcacctcccccatggcacagagccctccacacccctggaccagggcatccgggccctagaaattccacagctcccgtcctggccaccctggaagctcatcaggccaagacccggacagagcttcagaggagtgttgagtgacacctgaggatgcggctgcacacactcagccaagggccgagtctcacctgcggtggggtgtcggctctgcctgggggctccatccctttcagccactcgtggccttggggatttctggttgtccccagctgggactgttcacagttgtcacctgcagacctgcctctccctggcctgaggttcaaaggcctcatcggatggtcagtacagtggggtcacctgttgtttctatacaacagcagggaaggggccatggagcttttccctgctgggtgctcctgctttggcccagcccacctttcctggtgctccaagctaggaggctgtggccccagcctgaggagggtgtcctggcctccaggtgtgcagcaggggctgtgtgctgggggaggttccagttaggcgatgggatcctgcagtggtctggtggcatttcttggaaccagatttacctgaggagctctgtcctgctccctgtggagggctccagatagctcagaaatgaccagccaatggccttttgtttgggggcctgaggtcaagagagctgagagtattcgctcgactgagcacattcaggaagatcagggcaggcgtgtgggaggtccctcactccacgggacagaggcccctgggcagcagaggaaacctacagctctgggtgaggggacacttggctttggtgtttgcactttacagatcctgcggtccacgaggggcctcaggagaggacgtgtcaggacgtggcttcccagccttctgccttgggcagtgggggtgctcctgtctgtccttttcccccacaccctggactgtgcttggctgttggtgcacatggttggcacacggtgggcagagggcagagaatgccactgcttggttattggtcccctttgaccaggaaacccaagaggagacacctcagtcagcagaaaggccacctggctcactggctcattccaggagtgggagagacggcagggtctcctctttgtcctccggcatcaggaaggggatggtgtccactccccactgtggtggctttaggcaaggttcttattgtctgctctgcctcggtttccccatctggaaaatgggggcaggggtcctgacctacctcaggtggaacggtgagcagggaacatgtcggagtccttcagagaatgtgatgtgaggttggatcaacagtgtgggttcctgtcctgtttccccttcctctttggggctgaggaggaggttaaaggccaaatgctgtttcccaacaccccaaagtctgcacacgtctcatgaatgcatcacatttctgtcatatggatattagccattccgaaatctgtgtaatcaacttcacattattcaagttacaaatcactgtgtccatagaaaaactgtgctggtatttgctggacaaagggttgggccccttttatttttacctgccacccagcatctcccccacctgccccttctgggtgacacagccggtaaacggaatcacgtatggttctttctgtgggtctgtggcacagcaggaagagcccggtgccgccagcaccttgtggaagaccacacatgggtggtcccacagcatgggaccaggctggcctgagggatgcccagttgtaacaatgctgctgtcactgtctcattaaatatacatccttt

SEQ ID NO: 126777 - DNA, 2658 bp, Homo sapiens
  Payload ID: 4854
  Gene Symbol: DPCR1
  Gene Name: diffuse panbronchiolitis critical region 1
  Uniprot ID: Q3MIW9
  ENST ID: ENST00000304311
  CDS Start-End: 1-1554
atggcccagccggtccacagcctctgctccgcctttggcctccagtgctgcctcctcttccttctagcttcttggggggcaggtgctactacattccaagaatatcagaaaactggggaactctcaacatccgatcacatatttcccctcactccaggccttgtttatagtatcccttttgatcacattgttctgcattcaggacaaagacctccagagctccctaaatctacagaaatccatgagcaaaaacgccactgcaacaccacacgccattctaagccaactgacaagcctacaggcaactccaaaactatagaccacaaaagctctacagataatcatgaggctcctcccacttctgaagaaaactccagcaaccaagggaaagacccaatgatccggaaccagcgctctgttgatcctgctgactccactaccacacataaagaatccgctggaaaaaaacatataacgccagcacccaagagcaaaataaactgtcgtaagtccacaacaggcaaatcaacggtaacaagaaaatcagataaaactggaagacctttggaaaagtccatgagtactttggataagacaagtaccagctcacataagactacaacttccttccacaactcaggcaattcacagaccaagcaaaaaagcacatcttttccagaaaaaatcacagcagcctcaaaaacaacatacaagaccacaggaaccccagaagagtcagaaaaaactgaagattccagaacaacagttgcctcagacaagctcctgacaaaaactacaaaaaacatacaagagaccatatcagccaatgagctcacacaatctctagcagagcctacagaacatggaggaaggacagccaatgagaacaacacaccatccccagcagagcctacagaaaatagagaaaggacagccaatgagaacaagaagaccatatgcaccaaagggaaaaacacaccagtcccagaaaagcctacagaaaacctggggaacaccacactgaccactgagaccataaaagccccagtaaagtccacagaaaacccagaaaaaacagcagcagtcacaaagactataaaaccttcagtcaaggtcacaggagacaaatctctcactactacctcttctcatctaaataaaactgaagttactcatcaggtgcccactggttctttcaccctcattacatctagaacgaagctgagttctatcacatcagaagccacaggaaacgagagccatccatacctcaataaagatggctcacagaaaggtatccacgctggacagatgggagagaatgattcattccctgcatgggccatagttattgtggtcctggtggctgtgattctcctcctggtgttccttggcctgatcttcttggtctcctatatgatgcggacacgccgcacactaacccagaacacccagtacaatgatgcagaggatgagggtggccccaattcctacccggtctacctgatggagcagcagaatcttggcatgggccagatcccttccccacggtgatcttggagtaggcgcccagccctggctcttccatgctctgcccctttcctggatgaggaaccggactcacaatttctatttccgggactacaggaagggcagagaatactgacggttaccagtattaacccttcatctgttcttgaaactggttggggaatgaggtgataagcaaggagggtgtaagtttaggggacaaagaagaaagaatgaataatacgagcagacattctctgtagaaggtaatggtctgagaatgaaaaggtgtttgatggacatgttgtgggggcaccaatgcagaacactgcactgagtcctaaaggaaggacaggagccttataggcaatgccccagactgacttgtgagtggggtttatggggaaagggagggactgagggcagagtctctgggtttcaggacagcattatgttatttccattcactattacttaagagtttgtgtgtaaacaggctcatctctgagttctcaggacccttgcccccacccccatttttttaatgaaaaaaaaaaacaaaaaaaacggatccaagaagaaaagagaatttatttccttctccactctctccatgccctggagaaaaaaaagtccagaagaaatcataaatatctctcatctacatggttgcttcctcttcctcccaaatcccttagttttcctaaatgtctacagtggacgccctgttggtttggcttgctgggttgtgggtggacacgcaaggaggggatttttatttggccagcagtctcacccactgatctccaccccagaccttccctgattggtgtctcagcatttattttcctgtctcttccaccaaaagccagctgtagctttatctcgtaaaagttacccatcttctctactgtccccattctctctcctcccaccttcaccccagattcaagttttcctccttgtaggcatttcatctgtgtgtgttttctggattttctctctctcttcttatggccatttcaccttattactgattgggtagagggggaaaaggagaatgatgatgatagtttccttctgtctattgaccttttttataataaagtataacatgtttataaaggg

SEQ ID NO: 126778 - DNA, 2627 bp, Homo sapiens
  Payload ID: 4854
  Gene Symbol: DPCR1
  Gene Name: diffuse panbronchiolitis critical region 1
  ENST ID: ENST00000416153
  CDS Start-End: 1-1524
ccattggccaatgagaagaccacactatccccagcagagcctacagaaaatggagaaaggaccccatttaccaatgagaagaccacaccatcctcagcagagcctacagaacatggagaaaggaccccactggccaatgagatcaccacaccatcccgagcagagcctacagaacatggagaaaggatagccaatgagaaggccacaccatccccagcaaagcctacagaacatggagaaacgacagtcaatgaggacaccacaccatcctcagcagagcctacagaaaatggagaaaggaccccactggccaatgagaacaccacaacatccccaacagagtctacagaacatggagaaaggacagccaatgagaagaccacaccatccccagcagagcctacagaacatggagaaaggacaccatcagccaatgagaagaccataccatctccagcaaagcctacagaacacgaagaaatgaccccatcagccaatgagaacaccacaccatccccagtaaagcctacagaacatggagaaaagactacattggccaatgagaagatcacactatccccagaagggcctacagaacatggagcaaaaactacgtcggccaatgagaagatcacaccatccctagcaaagcctacagaacatggagaaaggaccacatcacccaatgacaagatcacctcatctgcagcagagtctacagaacatagagatagggctacatcagccaatgtgatcacaccagccccagcagagcctataaaacatgcaaaaaggaccacattggcccatgagaagatgacacaagtcacagaaaagtccacagaacacccagaaaagaccacgtcaaccacagagaaaaccacaagaaccccagaaaagcctacgctatactcagagaagaccatatgcaccaaagggaaaaacacaccagtcccagaaaagcctacagaaaacctggggaacaccacactgaccactgagaccataaaagccccagtaaagtccacagaaaacccagaaaaaacagcagcagtcacaaagactataaaaccttcagtcaaggtcacaggagacaaatctctcactactacctcttctcatctaaataaaactgaagttactcatcaggtgcccactggttctttcaccctcattacatctagaacgaagctgagttctatcacatcagaagccacaggaaacaagagccatccatacctcaataaagatggctcacagaaaggtatccacgctggacagatgggagagaatgattcattccctgcatgggccatagttattgtggtcctggtggctgtgattctcctcctggtgttccttggcctgatcttcttggtctcctatatgatgcggacacgccgcacactaacccagaacacccagtacaatgatgcagaggatgagggtggccccaattcctacccggtctacctgatggagcagcagaatcttggcatgggccagatcccttccccacggtgatcttggagtaggcgcccagccctggctcttccatgctctgcccctttcctggatgaggaaccggactcacaatttctatttccgggactacaggaagggcagagaatactgacggttaccagtattaacccttcatctgttcttgaaactggttggggaatgaggtgataagcaaggagggtgtaagtttaggggacaaagaagaaagaatgaataatacgagcagacattctctgtagaaggtaatggtctgagaatgaaaaggtgtttgatggacatgttgtgggggcaccaatgcagaacactgcactgagtcctaaaggaaggacaggagccttataggcaatgccccagactgacttgtgagtggggtttatggggaaagggagggactgagggcagagtctctgggtttcaggacagcattatgttatttccattcactattacttaagagtttgtgtgtaaacaggctcatctctgagttctcaggacccttgcccccacccccatttttttaatgaaaaaaaaaacaaaaaaaacggatccaagaagaaaagagaatttatttccttctccactctctccatgccctggagaaaaaaaagtccagaagaaatcataaatatctctcatctacatggttgcttcctcttcctcccaaatcccttagttttcctaaatgtctacagtggacgccctgttggtttggcttgctgggttgtgggtggacacgcaaggaggggatttttatttggccagcagtctcacccactgatctccaccccagaccttccctgattggtgtctcagcatttattttcctgtctcttccaccaaaagccagctgtagctttatctcgtaaaagttacccatcttctctactgtccccattctctctcctcccaccttcaccccagattcaagttttcctccttgtaggcatttcatctgtgtgtgttttctggattttctctctctcttcttatggccatttcaccttattactgattgggtagagggggaaaaggagaatgatgatgatagtttccttctgtctattgaccttttttataataaagtataacatgtttataaaggg

SEQ ID NO: 126779 - DNA, 2627 bp, Homo sapiens
  Payload ID: 4854
  Gene Symbol: DPCR1
  Gene Name: diffuse panbronchiolitis critical region 1
  ENST ID: ENST00000448092
  CDS Start-End: 1-1524
ccattggccaatgagaagaccacactatccccagcagagcctacagaaaatggagaaaggaccccatttaccaatgagaagaccacaccatcctcagcagagcctacagaacatggagaaaggaccccactggccaatgagatcaccacaccatcccgagcagagcctacagaacatggagaaaggatagccaatgagaaggccacaccatccccagcaaagcctacagaacatggagaaacgacagtcaatgaggacaccacaccatcctcagcagagcctacagaaaatggagaaaggaccccactggccaatgagaacaccacaacatccccaacagagtctacagaacatggagaaaggacagccaatgagaagaccacaccatccccagcagagcctacagaacatggagaaaggacaccatcagccaatgagaagaccataccatctccagcaaagcctacagaacacgaagaaatgaccccatcggccaatgagaacaccacaccatccccagtaaagcctacagaacatggagaaaagactacattggccaatgagaagatcacactatccccagaagggcctacagaacatggagcaaaaactacgtcggccaatgagaagatcacaccatccctagcaaagcctacagaacatggagaaaggaccacatcacccaatgacaagatcacctcatctgcagcagagtctacagaacatagagatagggctacatcagccaatgtgatcacaccagccccagcagagcctataaaacatgcaaaaaggaccacattggcccatgagaagatgacacaagtcacagaaaagtccacagaacacccagaaaagaccacgtcaaccacagagaaaaccacaagaaccccagaaaagcctacgctatactcagagaagaccatatgcaccaaagggaaaaacacaccagtcccagaaaagcctacagaaaacctggggaacaccacactgaccactgagaccataaaagccccagtaaagtccacagaaaacccagaaaaaacagcagcagtcacaaagactataaaaccttcagtcaaggtcacaggagacaaatctctcactactacctcttctcatctaaataaaactgaagttactcatcaggtgcccactggttctttcaccctcattacatctagaacgaagctgagttctatcacatcagaagccacaggaaacgagagccatccatacctcaataaagatggctcacagaaaggtatccacgctggacagatgggagagaatgattcattccctgcatgggccatagttattgtggtcctggtggctgtgattctcctcctggtgttccttggcctgatcttcttggtctcctatatgatgcggacacgccgcacactaacccagaacacccagtacaatgatgcagaggatgagggtggccccaattcctacccggtctacctgatggagcagcagaatcttggcatgggccagatcccttccccacggtgatcttggagtaggcgcccagccctggctcttccatgctctgcccctttcctggatgaggaaccagactcacaatttctatttccgggactacaggaagggcagagaatactgacggttaccagtattaacccttcatctgttcttgaaactggttggggaatgaggtgataagcaaggagggtgtaagtttaggggacaaagaagaaagaatgaataatacgagcagacattctctgtagaaggtaatggtctgagaatgaaaaggtgtttgatggacatgttgtgggggcaccaatgcagaacactgcactgagtcctaaaggaaggacaggagccttataggcaatgccccagactgacttgtgagtggggtttatggggaaagggagggactgagggcagagtctctgggtttcaggacagcattatgttatttccattcactattacttaagagtttgtgtgtaaataggctcatctctgagttctcaggacccttgcccccacccccatttttttaatgaaaaaaaaaacaaaaaaaacggatccaagaagaaaagagaatttatttccttctccactctctccatgccctggagaaaaaaaagtccagaagaaatcataaatatctctcatctacatggttgcttcctcttcctcccaaatcccttagttttcctaaatgtctacagtggacgccctgttggtttggcttgctgggttgtgggtggacacgcaaggaggggatttttatttggccagcagtctcacccactgatctccaccccagaccttccctgattggtgtctcagcatttattttcctgtctcttccaccaaaagccagctgtagctttatctcgtaaaagttacccatcttctctactgtccccattctctctcctcccaccttcaccccagattcaagttttcctccttgtaggcatttcatctgtgtgtgttttctggattttctctctctcttcctatggccatttcaccttattactgattgggtagagggggaaaaggagaatgatgatgatagtttccttctgtctattgaccttttttataataaagtataacatgtttataaaggg

SEQ ID NO: 126780 - DNA, 2627 bp, Homo sapiens
  Payload ID: 4854
  Gene Symbol: DPCR1
  Gene Name: diffuse panbronchiolitis critical region 1
  ENST ID: ENST00000414703
  CDS Start-End: 1-1524
ccattggccaatgagaagaccacactatccccagcagagcctacagaaaatggagaaaggaccccatttaccaatgagaagaccacaccatcctcagcagagcctacagaacatggagaaaggaccccactggccaatgagatcaccacaccatcccgagcagagcctacagaacatggagaaaggatagccaatgagaaggccacaccatccccagcaaagcctacagaacatggagaaacgacagtcaatgaggacaccacaccatcctcagcagagcctacagaaaatggagaaaggaccccactggccaatgagaacaccacaacatccccaacagagtctacagaacatggagaaaggacagccaatgagaagaccacaccatccccagcagagcctacagaacatggagaaaggacaccatcagccaatgagaagaccataccatctccagcaaagcctacagaacacgaagaaatgaccccatcggccaatgagaacaccacaccatccccagtaaagcctacagaacatggagaaaagactacattggccaatgagaagatcacactatccccagaagggcctacagaacatggagcaaaaactacgtcggccaatgagaagatcacaccatccctagcaaagcctacagaacatggagaaaggaccacatcacccaatgacaagatcacctcatctgcagcagagtctacagaacatagagatagggctacatcagccaatgtgatcacaccagccccagcagagcctataaaacatgcaaaaaggaccacactggcccatgagaagatgacacaagtcacagaaaagtccacagaacacccagaaaagaccacgtcaaccacagagaaaaccacaagaaccccagaaaagcctacgctatactcagagaagaccatatgcaccaaagggaaaaacacaccagtcccagaaaagcctacagaaaacctggggaacaccacactgaccactgagaccataaaagccccagtaaagtccacagaaaacccagaaaaaacagcagcagtcacaaagactataaaaccttcagtcaaggtcacaggagacaaatctctcactactacctcttctcatctaaataaaactgaagttactcatcaggtgcccactggttctttcaccctcattacatctagaacgaagctgagttctatcacatcagaagccacaggaaacgagagccatccatacctcaataaagatggctcacagaaaggtatccacgctggacagatgggagagaatgattcattccctgcatgggccatagttattgtggtcctggtggctgtgattctcctcctggtgttccttggcctgatcttcttggtctcctatatgatgcggacacgccgcacactaacccagaacacccagtacaatgatgcagaggatgagggtggccccaattcctacccggtctacctgatggagcagcagaatcttggcatgggccagatcccttccccacggtgatcttggagtaggcgcccagccctggctcttccatgctctgcccctttcctggatgaggaaccggactcacaatttctatttccgggactacaggaagggcagagaatactgacggttaccagtattaacccttcatctgttcttgaaactggttggggaatgaggtgataagcaaggagggtgtaagtttaggggacaaagaagaaagaatgaataatacgagcagacattctctgtagaaggtaatggtctgagaatgaaaaggtgtttgatggacatgttgtgggggcaccaatgcagaacactgcactgagtcctaaaggaaggacaggagccttataggcaatgccccagactgacttgtgagtggggtttatggggaaagggagggactgagggcagagtctctgggtttcaggacagcattatgttatttccattcactattacttaagagtttgtgtgtaaacaggctcatctctgagttctcaggacccttgcccccacccccatttttttaatgaaaaaaaaaacaaaaaaaacggatccaagaagaaaagagaatttatttccttctccactctctccatgccctggagaaaaaaaagtccagaagaaatcataaatatctctcatctacatggttgcttcctcttcctcccaaatcccttagttttcctaaatgtctacagtggacgccctgttggtttggcttgctgggttgtgggtggacacgcaaggaggggatttttatttggccagcagtctcacccactgatctccaccccagaccttccctgattggtgtctcagcatttattttcctgtctcttccaccaaaagccagctgtagctttatctcgtaaaagttacccatcttctctactgtccccattctctctcctcccaccttcaccccagattcaagttttcctccttgtaggcatttcatctgtgtgtgttttctggattttctctctctcttcttatggccatttcaccttattactgattgggtagagggggaaaaggagaatgatgatgatagtttccttctgtctattgaccttttttataataaagtataacatgtttataaaggg

SEQ ID NO: 126781 - DNA, 5314 bp, Homo sapiens
  Payload ID: 4854
  Gene Symbol: DPCR1
  Gene Name: diffuse panbronchiolitis critical region 1
  ENST ID: ENST00000462446
  CDS Start-End: 29-4210
ggtccccaagcagccacccagctccgacatggcccagccggtccacagcctctgctccgcctttggcctccagtgctgcctcctcttccttctagcttcttggggggcaggtgctactacattccaagaatatcagaaaactggggaactctcaacatccgatcacatatttcccctcactccaggccttgtttatagtatcccttttgatcacattgttctgcattcaggacaaagacctccagagctccctaaatctacagaaatccatgagcaaaaacgccactgcaacaccacacgccattctaagccaactgacaagcctacaggcaactccaaaactatagaccacaaaagctctacagataatcatgaggctcctcccacttctgaagaaaactccagcaaccaagggaaagacccaatgatccggaaccagcgctctgttgatcctgctgactccactaccacacataaagaatccgctggaaaaaaacatataacgccagcacccaagagcaaaataaactgtcgtaagtccacaacaggcaaatcaacggtaacaagaaaatcagataaaactggaagacctttggaaaagtccatgagtactttggataagacaagtaccagctcacataagactacaacttccttccacaactcaggcaattcacagaccaagcaaaaaagcacatcttttccagaaaaaatcacagcagcctcaaaaacaacatacaagaccacaggaaccccagaagagtcagaaaaaactgaagattccagaacaacagttgcctcagacaagctcctgacaaaaactacaaaaaacatacaagagaccatatcagccaatgagctcacacaatctctagcagagcctacagaacatggaggaaggacagccaatgagaacaacacaccatccccagcagagcctacagaaaatagagaaaggacagccaatgagaacaccacactatccccagcagagcctatagaaaatagagaaaggacagccaatgagaacaccgcaccattcccagcagggcctacagaaaatagagaaatgacagccaatgagaataccacactattcccagcagagcctacagaacatggagaaaggacagccaatgagaacaccacaccatccccagcagagcctacagaacatggagaaaggacagccaatgagaacactacaccatccccagcagagcctacagaacatggagaaaggaccccatttgccaatgacaaaaccacatcatcctcagcagagtctacagaacatggagaaaggaccccactggccaacgagaacaccacaccatccccagcagagcctacagaaaatagagaaaggacagccaatgagaacaccacaccatccccagcagggcctacagaaaacagagaaacgacagccaacgagaagaccacactatccccagtagagcctacagaaaatagagaaacaacagccaatgagaagaccacaccatccccagcagagcctacagaaaatggacaaaggaccccatttgccaatgagaaaaccacatcatcctcagcagagcctacagaacacggagaaaggaccccactggccaatgagaacaccacaccatccccagcagagcctacagaaaatagagaaaggacagccaatgagaagaccacaccatccccagcagagcctacagaaaatggagacaggactcctttggccaatgagaagaccacgccatctctagcagagcctacagaaaatggacaaaggaccccatttgccaatgagaagaccacatcatcctcagcagagcctacagaacacgaagaaaggactccactggccaatgagaacaccacaccatccccggcagagcctacagaaaatagagaaaggacagccaatgagaacaccacaccatccccagcagggcctacagaaaatagagaaatgacagccaacgagaagaccacactattcccagcagagcctacagaaaatagagaaaggacagccaatgagaagaccacatcatccccagcagagcctacagaaaatggacaaaggaccccatttgccaatgagaaaaccacatcatcctcagcagagcctacagaacacggagaaaggaccccactggccaatgagaacaccacactatccccagcagagcctacagaaaatagagaaaggacagccaatgagaagaccacaccattcccagcagagcctacagaaaatagagaaaggacagccaatgagaacaccacaccatccccagcacagcctacagaaaatggagacaggactccattggccaatgagaagaccacaccatctctagcagagcctacagaaaatggaaaaaggaccccatttgccaatgagaagaccacatcatcctcagcagagcctacagaacacgcagaaaggactccactggccaatgagaacaccacatcatccccagcagagcctacagaaaatagagaaaggacagccaatgagaagaccacacaattcccagcagagcctacagaaaatagagaaagcacagccaatgagaagaccacaccattcccagcagagcctacagaaaatagagaatggacagccaatgagaacaccacactatccccagcagagcctacagaacatgaagaaatgaccccattggccaatgagaagaccacactatccccagcagagcctacagaaaatggagaaaggaccccatttaccaatgagaagaccacaccatcctcagcagagcctacagaacatggagaaaggaccccactggccaatgagatcaccacaccatcccgagcagagcctacagaacatggagaaaggatagccaatgagaaggccacaccatccccagcaaagcctacagaacatggagaaacgacagtcaatgaggacaccacaccatcctcagcagagcctacagaaaatggagaaaggaccccactggccaatgagaacaccacaacatccccaacagagtctacagaacatggagaaaggacagccaatgagaagaccacaccatccccagcagagcctacagaacatggagaaaggacaccatcagccaatgagaagaccataccatctccagcaaagcctacagaacacgaagaaatgaccccatcggccaatgagaacaccacaccatccccagtaaagcctacagaacatggagaaaagactacattggccaatgagaagatcacactatccccagaagggcctacagaacatggagcaaaaactacgtcggccaatgagaagatcacaccatccctagcaaagcctacagaacatggagaaaggaccacatcacccaatgacaagatcacctcatctgcagcagagtctacagaacatagagatagggctacatcagccaatgtgatcacaccagccccagcagagcctataaaacatgcaaaaaggaccacattggcccatgagaagatgacacaagtcacagaaaagtccacagaacacccagaaaagaccacgtcaaccacagagaaaaccacaagaaccccagaaaagcctacgctatactcagagaagaccatatgcaccaaagggaaaaacacaccagtcccagaaaagcctacagaaaacctggggaacaccacactgaccactgagaccataaaagccccagtaaagtccacagaaaacccagaaaaaacagcagcagtcacaaagactataaaaccttcagtcaaggtcacaggagacaaatctctcactactacctcttctcatctaaataaaactgaagttactcatcaggtgcccactggttctttcaccctcattacatctagaacgaagctgagttctatcacatcagaagccacaggaaacgagagccatccatacctcaataaagatggctcacagaaaggtatccacgctggacagatgggagagaatgattcattccctgcatgggccatagttattgtggtcctggtggctgtgattctcctcctggtgttccttggcctgatcttcttggtctcctatatgatgcggacacgccgcacactaacccagaacacccagtacaatgatgcagaggatgagggtggccccaattcctacccggtctacctgatggagcagcagaatcttggcatgggccagatcccttccccacggtgatcttggagtaggcgcccagccctggctcttccatgctctgcccctttcctggatgaggaaccggactcacaatttctatttccgggactacaggaagggcagagaatactgacggttaccagtattaacccttcatctgttcttgaaactggttggggaatgaggtgataagcaaggagggtgtaagtttaggggacaaagaagaaagaatgaataatacgagcagacattctctgtagaaggtaatggtctgagaatgaaaaggtgtttgatggacatgttgtgggggcaccaatgcagaacactgcactgagtcctaaaggaaggacaggagccttataggcaatgccccagactgacttgtgagtggggtttatggggaaagggagggactgagggcagagtctctgggtttcaggacagcattatgttatttccattcactattacttaagagtttgtgtgtaaacaggctcatctctgagttctcaggacccttgcccccacccccatttttttaatgaaaaaaaaaaacaaaaaaaacggatccaagaagaaaagagaatttatttccttctccactctctccatgccctggagaaaaaaaagtccagaagaaatcataaatatctctcatctacatggttgcttcctcttcctcccaaatcccttagttttcctaaatgtctacagtggacgccctgttggtttggcttgctgggttgtgggtggacacgcaaggaggggatttttatttggccagcagtctcacccactgatctccaccccagaccttccctgattggtgtctcagcatttattttcctgtctcttccaccaaaagccagctgtagctttatctcgtaaaagttacccatcttctctactgtccccattctctctcctcccaccttcaccccagattcaagttttcctccttgtaggcatttcatctgtgtgtgttttctggattttctctctctcttcttatggccatttcaccttattactgattgggtagagggggaaaaggagaatgatgatgatagtttccttctgtctattgaccttttttataataaagtataacatgtttataaaggg

SEQ ID NO: 126782 - DNA, 1689 bp, Homo sapiens
  Payload ID: 4854
  Gene Symbol: DPCR1
  Gene Name: diffuse panbronchiolitis critical region 1
  Uniprot ID: Q3MIW9
  ENST ID: ENST00000547331
  CDS Start-End: 1-1554
atggcccagccggtccacagcctctgctccgcctttggcctccagtgctgcctcctcttccttctagcttcttggggggcaggtgctactacattccaagaatatcagaaaactggggaactctcaacatccgatcacatatttcccctcactccaggccttgtttatagtatcccttttgatcacattgttctgcattcaggacaaagacctccagagctccctaaatctacagaaatccatgagcaaaaacgccactgcaacaccacacgccattctaagccaactgacaagcctacaggcaactccaaaactatagaccacaaaagctctacagataatcatgaggctcctcccacttctgaagaaaactccagcaaccaagggaaagacccaatgatccggaaccagcgctctgttgatcctgctgactccactaccacacataaagaatccgctggaaaaaaacatataacaccagcacccaagagcaaaataaactgtcgtaagtccacaacaggcaaatcaacggtaacaagaaaatcagataaaactggaagacctttggaaaagtccatgagtactttggataagacaagtaccagctcacataagactacaacttccttccacaactcaggcaattcacagaccaagcaaaaaagcacatcttttccagaaaaaatcacagcagcctcaaaaacaacatacaagaccacaggaaccccagaagagtcagaaaaaactgaagattccagaacaacagttgcctcagacaagctcctgacaaaaactacaaaaaacatacaagagaccatatcagccaatgagctcacacaatctctagcagagcctacagaacatggaggaaggacagccaatgagaacaacacaccatccccagcagagcctacagaaaatagagaaaggacagccaatgagaacaagaagaccatatgcaccaaagggaaaaacacaccagtcccagaaaagcctacagaaaacctggggaacaccacactgaccactgagaccataaaagccccagtaaagtccacagaaaacccagaaaaaacagcagcagtcacaaagactataaaaccttcagtcaaggtcacaggagacaaatctctcactactacctcttctcatctaaataaaactgaagttactcatcaggtgcccactggttctttcaccctcattacatctagaacgaagctgagttctatcacatcagaagccacaggaaacgagagccatccatacctcaataaagatggctcacagaaaggtatccacgctggacagatgggagagaatgattcattccctgcatgggccatagttattgtggtcctggtggctgtgattctcctcctggtgttccttggcctgatcttcttggtctcctatatgatgcggacacgccgcacactaacccagaacacccagtacaatgatgcagaggatgagggtggccccaattcctacccggtctacctgatggagcagcagaatcttggcatgggccagatcccttccccacggtgatcttggagtaggcgcccagccctggctcttccatgctctgcccctttcctggatgaggaaccggactcacaatttctatttccgggactacaggaagggcagagaatactgacggttaccagtattaacccttca

SEQ ID NO: 126783 - DNA, 2695 bp, Homo sapiens
  Payload ID: 4854
  Gene Symbol: DPCR1
  Gene Name: diffuse panbronchiolitis critical region 1
  ENST ID: ENST00000548730
  CDS Start-End: 29-2695
ggtccccaagcagccacccagctccgacatggcccagccggtccacagcctctgctccgcctttggcctccagtgctgcctcctcttccttctagcttcttggggggcaggtgctactacattccaagaatatcagaaaactggggaactctcaacatccgatcacatatttcccctcactccaggccttgtttatagtatcccttttgatcacattgttctgcattcaggacaaagacctccagagctccctaaatctacagaaatccatgagcaaaaacgccactgcaacaccacacgccattctaagccaactgacaagcctacaggcaactccaaaactatagaccacaaaagctctacagataatcatgaggctcctcccacttctgaagaaaactccagcaaccaagggaaagacccaatgatccggaaccagcgctctgttgatcctgctgactccactaccacacataaagaatccgctggaaaaaaacatataacgccagcacccaagagcaaaataaactgtcgtaagtccacaacaggcaaatcaacggtaacaagaaaatcagataaaactggaagacctttggaaaagtccatgagtactttggataagacaagtaccagctcacataagactacaacttccttccacaactcaggcaattcacagaccaagcaaaaaagcacatcttttccagaaaaaatcacagcagcctcaaaaacaacatacaagaccacaggaaccccagaagagtcagaaaaaactgaagattccagaacaacagttgcctcagacaagctcctgacaaaaactacaaaaaacatacaagagaccatatcagccaatgagctcacacaatctctagcagagcctacagaacatggaggaaggacagccaatgagaacaacacaccatccccagcagagcctacagaaaatagagaaaggacagccaatgagaacaccacactatccccagcagagcctacagaaaatagagaaaggacagccaatgagaacaccgcaccattcccagcagggcctacagaaaatagagaaatgacagccaatgagaataccacactattcccagcagagcctacagaacatggagaaaggacagccaatgagaacaccacaccatccccagcagagcctacagaacatggagaaaggacagccaatgagaacactacaccatccccagcagagcctacagaacatggagaaaggaccccatttgccaatgacaaaaccacatcatcctcagcagagtctacagaacatggagaaaggaccccactggccaacgagaacaccacaccatccccagcagagcctacagaaaatagagaaaggacagccaatgagaacaccacaccatccccagcagggcctacagaaaacagagaaacgacagccaacgagaagaccacactatccccagtagagcctacagaaaatagagaaacaacagccaatgagaagaccacaccatccccagcagagcctacagaaaatggacaaaggaccccatttgccaatgagaaaaccacatcatcctcagcagagcctacagaacacggagaaaggaccccactggccaatgagaacaccacaccatccccagcagagcctacagaaaatagagaaaggacagccaatgagaagaccacaccatccccagcagagcctacagaaaatggagacaggactcctttggccaatgagaagaccacgccatctctagcagagcctacagaaaatggacaaaggaccccatttgccaatgagaagaccacatcatcctcagcagagcctacagaacacgaagaaaggactccactggccaatgagaacaccacaccatccccggcagagcctacagaaaatagagaaaggacagccaatgagaacaccacaccatccccagcagggcctacagaaaatagagaaatgacagccaacgagaagaccacactattcccagcagagcctacagaaaatagagaaaggacagccaatgagaagaccacatcatccccagcagagcctacagaaaatggacaaaggaccccatttgccaatgagaaaaccacatcatcctcagcagagcctacagaacacggagaaaggaccccactggccaatgagaacaccacactatccccagcagggcctacagaaaatagagaaaggacagccaatgagaagaccacaccattcccagcagagcctacagaaaatagagaaaggacagccaatgagaacaccacaccatccccagcacagcctacagaaaatggagacaggactccattggccaatgagaagaccacaccatctctagcagagcctacagaaaatggaaaaaggaccccatttgccaatgagaagaccacatcatcctcagcagagcctacagaacacgcagaaaggactccactggccaatgagaacaccacatcatccccagcagagcctacagaaaatagagaaaggacagccaatgagaagaccacacaattcccagcagagcctacagaaaatagagaaagcacagccaatgagaagaccacaccattcccagcagagcctacagaaaatagagaatggacagccaatgagaacaccacactatccccagcagagcctacagaacatgaagaaatgaccccattggcc

SEQ ID NO: 126784 - DNA, 1689 bp, Homo sapiens
  Payload ID: 4854
  Gene Symbol: DPCR1
  Gene Name: diffuse panbronchiolitis critical region 1
  Uniprot ID: Q3MIW9
  ENST ID: ENST00000546848
  CDS Start-End: 1-1554
atggcccagccggtccacagcctctgctccgcctttggcctccagtgctgcctcctcttccttctagcttcttggggggcaggtgctactacattccaagaatatcagaaaactggggaactctcaacatccgatcacatatttcccctcactccaggccttgtttatagtatcccttttgatcacattgttctgcattcaggacaaagacctccagagctccctaaatctacagaaatccatgagcaaaaacgccactgcaacaccacacgccattctaagccaactgacaagcctacaggcaactccaaaactatagaccacaaaagctctacagataatcatgaggctcctcccacttctgaagaaaactccagcaaccaagggaaagacccaatgatccggaaccagcgctctgttgatcctgctgactccactaccacacataaagaatccgctggaaaaaaacatataacgccagcacccaagagcaaaataaactgtcgtaagtccacaacaggcaaatcaacggtaacaagaaaatcagataaaactggaagacctttggaaaagtccatgagtactttggataagacaagtaccagctcacataagactacaacttccttccacaactcaggcaattcacagaccaagcaaaaaagcacatcttttccagaaaaaatcacagcagcctcaaaaacaacatacaagaccacaggaaccccagaagagtcagaaaaaactgaagattccagaacaacagttgcctcagacaagctcctgacaaaaactacaaaaaacatacaagagaccatatcagccaatgagctcacacaatctctagcagagcctacagaacatggaggaaggacagccaatgagaacaacacaccatccccagcagagcctacagaaaatagagaaaggacagccaatgagaacaagaagaccatatgcaccaaagggaaaaacacaccagtcccagaaaagcctacagaaaacctggggaacaccacactgaccactgagaccataaaagccccagtaaagtccacagaaaacccagaaaaaacagcagcagtcacaaagactataaaaccttcagtcaaggtcacaggagacaaatctctcactactacctcttctcatctaaataaaactgaagttactcatcaggtgcccactggttctttcaccctcattacatctagaacgaagctgagttctatcacatcagaagccacaggaaacgagagccatccatacctcaataaagatggctcacagaaaggtatccacgctggacagatgggagagaatgattcattccctgcatgggccatagttattgtggtcctggtggctgtgattctcctcctggtgttccttggcctgatcttcttggtctcctatatgatgcggacacgccgcacactaacccagaacacccagtacaatgatgcagaggatgagggtggccccaattcctacccggtctacctgatggagcagcagaatcttggcatgggccagatcccttccccacggtgatcttggagtaggcgcccagccctggctcttccatgctctgcccctttcctggatgaggaaccagactcacaatttctatttccgggactacaggaagggcagagaatactgacggttaccagtattaacccttca

SEQ ID NO: 126785 - DNA, 1689 bp, Homo sapiens
  Payload ID: 4854
  Gene Symbol: DPCR1
  Gene Name: diffuse panbronchiolitis critical region 1
  ENST ID: ENST00000614587
  CDS Start-End: 1-1554
atggcccagccggtccacagcctctgctccgcctttggcctccagtgctgcctcctcttccttctagcttcttggggggcaggtgctactacattccaagaatatcagaaaactggggaactctcaacatccgatcacatatttcccctcactccaggccttgtttatagtatcccttttgatcacattgttctgcattcaggacaaagacctccagagctccctaaatctacagaaatccatgagcaaaaacgccactgcaacaccacacgccattctaagccaactgacaagcctacaggcaactccaaaactatagaccacaaaagctctacagataatcatgaggctcctcccacttctgaagaaaactccagcaaccaagggaaagacccaatgatccggaaccagcgctctgttgatcctgctgactccactaccacacataaagaatccgctggaaaaaaacatataacgccagcacccaagagcaaaataaactgtcgtaagtccacaacaggcaaatcaacggtaacaagaaaatcagataaaactggaagacctttggaaaagtccatgagtactttggataagacaagtaccagctcacataagactacaacttccttccacaactcaggcaattcacagaccaagcaaaaaagcacatcttttccagaaaaaatcacagcagcctcaaaaacaacatacaagaccacaggaaccccagaagagtcagaaaaaactgaagattccagaacaacagttgcctcagacaagctcctgacaaaaactacaaaaaacatacaagagaccatatcagccaatgagctcacacaatctctagcagagcctacagaacatggaggaaggacagccaatgagaacaacacaccatccccagcagagcctacagaaaatagagaaaggacagccaatgagaacaagaagaccatatgcaccaaagggaaaaacacaccagtcccagaaaagcctacagaaaacctggggaacaccacactgaccactgagaccataaaagccccagtaaagtccacagaaaacccagaaaaaacagcagcagtcacaaagactataaaaccttcagtcaaggtcacaggagacaaatctctcactactacctcttctcatctaaataaaactgaagttactcatcaggtgcccactggttctttcaccctcattacatctagaacgaagctgagttctatcacatcagaagccacaggaaacaagagccatccatacctcaataaagatggctcacagaaaggtatccacgctggacagatgggagagaatgattcattccctgcatgggccatagttattgtggtcctggtggctgtgattctcctcctggtgttccttggcctgatcttcttggtctcctatatgatgcggacacgccgcacactaacccagaacacccagtacaatgatgcagaggatgagggtggccccaattcctacccggtctacctgatggagcagcagaatcttggcatgggccagatcccttccccacggtgatcttggagtaggcgcccagccctggctcttccatgctctgcccctttcctggatgaggaaccggactcacaatttctatttccgggactacaggaagggcagagaatactgacggttaccagtattaacccttca

SEQ ID NO: 126786 - DNA, 5392 bp, Homo sapiens
  Payload ID: 4855
  Gene Symbol: DGCR14
  Gene Name: DiGeorge syndrome critical region gene 14
  Uniprot ID: Q96DF8
  ENST ID: ENST00000252137
  CDS Start-End: 45-1475
cctgtgacgcgcctgctgggcccgagctttttcctgggatagcgatggagacgccgggcgcatcagcgtcgtccttgttgcttcccgccgcgtccaggcccccgaggaagcgcgaggcgggagaggctggggctgcgacgagcaagcagcgggtcctggacgaggaagagtatatcgagggcctccagacggtcatccaaagggatttctttcctgatgtggagaagctccaggcacagaaggagtacctggaagccgaggagaatggagacttggaacggatgcgccagattgccatcaagtttggctctgccttgggcaagatgtcccgggagcccccgccaccctatgtgactccagccacatttgaaacccctgaggtgcatgcaggcactggagtggtgggcaacaagcccaggccccgcggccgaggcctggaggatggagaggctggagaggaggaggagaaggagccgctgcccagcctagatgtcttcctgagccgctacacgagtgaggacaatgcctccttccaggagatcatggaggtggccaaggagagaagccgggcacgccacgcttggctctaccaggctgaggaagagtttgagaagaggcagaaagataatctcgaactcccgtcagcagagcaccaggccatcgagagcagccaggccagtgtggagacctggaagtacaaggccaagaattccctcatgtactatccagagggtgtccctgacgaggagcagctgtttaagaagccccggcaggtggtacataagaacacgcgcttccttagggaccccttcagccaagccctgagcaggtgccagctccagcaggcagccgccctcaatgcccagcacaaacagggcaaggtgggccccgatggcaaggagctgatcccccaggagtcccctcgagtgggtggatttggatttgttgccactccttcccctgcccctggtgtgaacgagtccccgatgatgacctggggggaggttgagaacacacccttgagagttgaagggtcggaaacgccctacgtggacaggacacccggcccagcttttaagatcctggagccaggccgcagggagcggctgggtctgaagatggccaacgaggccgctgccaagaaccgggccaagaagcaggaagccttgcggagagtgacggagaatctggccagcctcacccccaaaggcctgagcccagccatgtcgccagccctacagcgccttgtgagcaggacggccagcaagtacacagaccgggccctgcgggccagctacacaccatccccagcacgctccacccacctcaagaccccggccagtgggctgcagacccccacaagcacaccggcgcctggctctgccacacgcacccctctcacacaggacccggcctccatcacggacaacctgctgcagctccctgcccggcgcaaagcttcggacttcttttagagccaggcctgggctgggctcatagacgcttcacagagcctgcagggcagctgtacacccagcagaggactccagccttctcggggcccaggcctgggccagaagctgttgaccataccaggagtcactggagaaaggggctgtgctggggccagactggcacaaggcactcgtgcccacaccacaccccagggccttgccaagctgtttgctgtttaattggccccttgaactgtcattaaagaacacctaggtacagtctggggggttgcctctccatcttgctccccacacgagccctagccttgccctggggcctgcatcacgtctcaggactgcggggcttgaagcgaggggccccccaggtgaggaagctgcaggtggggcggctgtgggagcaccgggtgactggcgttgctttctgcggcactcggaacctgtgttctgagttgagctcacatcctgcagtgctttctgcttctctggggggatatgaaggagaaacggagcccttggaagttgtacccttaggttcccctgcggttctgggcccaggtctgcagcctccactctgggcttgccggctgtgaggtgcgctggttataggactgtgtgggggctgcatatcaggtgatctcagctatcaccttctcccagcacctggcttccagctcatggggtgggactatcccactcacccctctgctataggcactgcccatcttatgctgctggccctggcctcacctggtcacttccaccaacaggagctcccagataacagtgggttgctggacagatcaggctgggactcttaaggggtgggggacgtggggccttcagtgctttatcccctaggaaagggtgcacgttatcccaagggagcccccaggaagtggggagggaggggggaggagcatgtctaggtgctgaccacctggagcacttggccagcaagtgggccgcatgctttgggagcaatgggtgacccagcaggaagcacaaaagaccggccagtgtgccatcatcaagggctgctgagcagcttgaagagccactgggtggggagggcacacggggaggtctcagctggggctgcccctggaggacagggcagggaacttgagggctgaggacagaaatctcacatgactccaggaaatagaggaagaggaggatgctgagcgagggattgtgagggagtgggggtaggtcagagggggctgaactgcaggaagccagggggagtcgtggaccactggagctggccagccccagggcattggggacaaggccaggtcagagggagacagtgtgggcctggtgggtggaccctggcagaggccctcttgtcccccacaaggccaggccacactgtgattctgcctgtacctgagcatctgtcctgtgctcctaggccggagaccactgtgtgtcaggtggggcggttggctgagtcccagagaaaaacactcctcactgggcactcttgatgcttgcacacaccctgtggtttatttggtggtcagtaaggaacgtctttgctgctaagtggaagaaagctaatggaacgtaatcaaaatagtggtttaattgacgaattttacttgcacctgtgccttcttcagatcctacctgcctacttagtttacgtgaaggccgactgcaccatgccccccaaccccgacccccaccacacacaacggggccattgtcatgctaggtgcttgctttccccacctcagctccggagatgtgatggtctttggccctggaggtctcggccagcctgtcctccatcctgttctcgttctcgggcaccaccagcagccggtgctgggttttggctccaagcttgtggtcgggccggtggtcgggcctcaagcctgtcttggtgtccagtttgcactcagcgcggtacttgccctccccctccctcttgaaggaggcagaagacgtggctttgggcttggggggctgcagccacgagtggctgaggatctcatcgatgtggagccgctggctgacgtcgggctgcagcatgcggtagatgaggtccttgcactcgcaggtcaggttcttggagcgcgggaagtccacacggtgctccttctggatacgcagcatcttcctgatgtcggagtcgtcatagggcatggagccgcagaccatgatgtacaggatcacgcccaggctccagatgtcatacaccttgggctggtaggggatgctctgcagcacctcgggggctgcatatgctgccgacccgcagaaggtcttgctgaggatgatgcgcccattgctgtcccgcaggcagcgcttggagaagccaaagtcagacagcttgatgttgaagtccttgtcgaggagaaggttctcgcacttgaggtcccggtggacgatgtccaggtcgtggcagtacttgacggcggaggagagctgtcggaacatcttgcgtgccacgtcctcatgcagggctccctggcacttgatgaactcgaggaggtcgccctggacgccaagctccatgatgatgtagatccgtccgtcagaggtctcaaagatctcgtaagtcttgatgatggagccgtggttgacagttgccaggatgtccatctcccgaggaaggaatctctccacaaagtcagtaggtgttttcttgcggtcgatgatcttgacagccacattgaacttgaggcgctcagagtaggcagatttgacttttgcgtaggaacccttgccaagattgatgcctacgatgtaacccttcttccttaggactgtggcatcgtccatggtgccaggagcgactggcgccgctgccgtctacatccccccgtcatgtgggccagcaggcattgtcctcatttacactaccggaggcgtctggctgggctgccctgggctgggcttcgactcaggggtggaacactcagcattgtctccgggtgacttcagccaatgaactcataaagccaaggagtgggggcggggactgggctgagggagaacagggtctctggaaccgtggaagccaggctggtctggcaggagcacccactccccgcccgctggaaggaagcctgtccccaggacaggactctggtggccctgctgctgctgcattggtttccctgtcacaagtcaagctggaggggaggcggcccacgtccagcctgtttgcatcacctggctgtggggactgaccctgcattggtctttgtcccactagggtgggtttcctgcagcttctttggctatgaagaaaagcacccccagggctgtgtccttggtgtggtaggacagttgtccctgacagtcacccagacaggcctgcatagcaccccagttacacagacagatttccacagcactgccttaccattgagcacatagttaaatctagggaaatcagtgcccagacatcaaagctagaaatgaaacatggtcagcaggagccttgcatgggcttctcttttgctggagcaagccaaaataataggaacggttttacattcctagtgccaggacccatctcgggtcgacaaaatctgaagacaagttaagggaacaggcagctgtttgaatagatcaattggatagtctaaggcagctctctggaccaagctgtaaaggagatacaatcgaaataatcactccggtaccacagtagacaggccttgaaggcactgggccccttttaatcggacttagcaagcattttttttgcctctgaccttctccttggaacaaaattagttaccagtagacttaggtgattgctgtactgcatgtaggcacataaccccaacctatataaacagtaagaaaattgtagcactttgagttggtctgctggaattatctccagccttctccctgtatccagttacagtgataaactcccttctttccta

SEQ ID NO: 126787 - DNA, 1808 bp, Homo sapiens
  Payload ID: 4855
  Gene Symbol: DGCR14
  Gene Name: DiGeorge syndrome critical region gene 14
  ENST ID: ENST00000434568
  CDS Start-End: 45-926
cctgtgacgcgcctgctgggcccgagctttttcctgggatagcgatggagacgccgggcgcatcagcgtcgtccttgttgcttcccgccgcgtccaggcccccgaggaagcgcgaggcgggagaggctggggctgcgacgagcaagcagcgggtcctggacgaggaagagtatatcgagggcctccagacggtcatccaaagggatttctttcctgatgtggagaagctccaggcacagaaggagtacctggaagccgaggagaatggagacttggaacggatgcgccagattgccatcaagtttggctctgccttgggcaagatgtcccgggagcccccgccaccctatgtgactccagccacatttgaaacccctgaggtgcatgcaggcactggagtggtgggcaacaagcccaggccccgcggccgaggcctggaggatggagaggctggagaggaggaggagaaggagccgctgcccagcctagatgtcttcctgagccgctacacgagtgaggacaatgcctccttccaggagatcatggaggtggccaaggagagaagccgggcacgccacgcttggctctaccaggctgaggaagagtttgagaagaggcagaaagataatctcgaactcccgtcagcagagcaccaggccatcgagagcagccaggccagtgtggagacctggaagtacaaggccaagaattccctcatgtactatccagagggtgtccctgacgaggagcagctgtttaagaagccccggcaggtggtacataagaacacgcgcttccttagggaccccttcagccaagccctgagcaggtgccagctccagcaggcagccgccctcaatgcccaggggccctccctctctttctccaagaaggctgccaaccccagagccccagccttgccctgaggagaggaagtgtttccagcatgttcccacgtgtttgcccaccggccagctgtcgagcgtgggctgcggtccccctgatgccagcctctctgcttgttccagcacaaacagggcaaggtgtgaacgagtccccgatgatgacctggggggaggttgagaacacacccttgagagttgaagggtcggaaacgccctacgtggacaggacacccggcccagcttttaagatcctggagccaggccgcagggagcggctgggtctgaagatggccaacgaggccgctgccaagaaccgggccaagaagcaggaagccttgcggagagtgacggagaatctggccagcctcacccccaaaggcctgagcccagccatgtcgccagccctacagcgccttgtgagcaggacggccagcaagtacacagaccgggccctgcgggccagctacacaccatccccagcacgctccacccacctcaagaccccggccagtgggctgcagacccccacaagcacaccggcgcctggctctgccacacgcacccctctcacacaggacccggcctccatcacggacaacctgctgcagctccctgcccggcgcaaagcttcggacttcttttagagccaggcctgggctgggctcatagacgcttcacagagcctgcagggcagctgtacacccagcagaggactccagccttctcggggcccaggcctgggccagaagctgttgaccataccaggagtcactggagaaaggggctgtgctggggccagactggcacaaggcactcgtgcccacaccacaccccagggccttgccaagctgtttgctgtttaattggccccttgaactgtcattaaagaacacctaggtacag

SEQ ID NO: 126788 - DNA, 4480 bp, Homo sapiens
  Payload ID: 4856
  Gene Symbol: DGCR2
  Gene Name: DiGeorge syndrome critical region gene 2
  Uniprot ID: P98153
  ENST ID: ENST00000263196
  CDS Start-End: 249-1901
ggggcggggcggcgcggcgcggagccgagcaggacggccgccatcttgcgcgcagctggagtcggtgcctgaggttgcagccgagagtgtgcgccagcccgcggcccagccgaagctctttcccgccgcctctccgcgcctcgcccaggttcagctccgcctgaccctccgcttggcacggtcccctgaccctcagtccggcctggtccggccttccagccgccccggggacgatgaacggaggataaatggtgcccaaggcagacagcggcgccttcctgctgctcttcctgctcgtgctcactgtcaccgagccgctgcggccagagctgcggtgcaaccctgggcagtttgcgtgtcgcagcggcaccatccagtgcatccccctcccctggcagtgtgacggctgggcgacttgcgaggatgagagcgacgaagccaactgtccagaagtgaccggggaggtgcgtcctcatcatgggaaggaggctgtggatccgcggcaggggcgggccagaggaggcgacccttcgcacttccacgcggtgaacgtggcgcagcccgttcgcttcagcagtttcctagggaagtgcccgacagggtggcaccactacgaaggcacggccagctgctaccgggtctacctgagcggggagaactactgggatgccgcgcagacctgccagcgcctgaatggctctctcgccaccttctccactgaccaggagctgcgctttgtcctggcccaggaatgggaccagcccgagcggagctttggttggaaggaccagcgcaagttgtgggttggctatcagtatgttatcactggccggaaccgctccttggaaggtcgctgggaggtggcattcaaaggctcttcagaggtgttcctgcccccagaccccatctttgcctcggccatgtctgagaacgacaacgtgttctgtgcccagcttcagtgcttccatttccccaccctgcggcaccacgacctccacagctggcacgccgagagctgctacgagaagtcttcatttctgtgtaaaagaagtcaaacatgtgttgacatcaaggacaacgtggtggatgaagggttctacttcacccctaagggggacgacccatgcctgagctgcacctgccatggaggggagcctgagatgtgtgtggctgctctctgtgagaggccccagggctgccaacagtaccgcaaggaccccaaagagtgctgcaagttcatgtgtctggacccagatggcaacagtctgtttgactccatggccagcgggatgcgcctggtcgtcagctgcatctcctccttcctcatcctgtcactgctgctcttcatggtccaccggctgcgccagcggcgccgggagcgcatcgagtccctgattggagcaaacttgcaccacttcaacctcggccgcaggatccctggctttgattacggcccagacgggtttggcacgggcctcacgccgctgcatctttctgacgacggagagggtgggactttccatttccacgaccctccacctccctacacggcatacaagtacccggacatcggccagcccgacgaccctccgccgccctacgaggcctccatccacccggacagtgtgttctatgaccctgcagacgatgatgcttttgagcctgtggaggtcagcctgccagcccctggggatggtgggagtgaaggtgcattactccggcgcctggagcagcctctgcccactgcgggggcctctctggcagacctggaagactctgccgacagcagcagcgccctgctcgtgccccctgaccctgcccagagcgggagcaccccagctgcagaggcactgccagggggtggccgccacagccgcagctccctcaatactgtggtgtagacggcctggcctgtaccccaacggtctgggagcacctgtctgttgtagaaaacaccggtccctggggagacttgaaaggcccctgtcccagcctggacgccacgcactgccgcacgtcactggcgggctcgcgtgtgtacatagagaccacagcccgccttctgccaaaagaagtgatggcctgcaccgagcttccttgagggcttcagaaacatgcatagctttggatcactgtcttctcctttataaatggcagaagagtgacaaaattcattcagaccgcacatgttagaggcagggaatgaagaaggtactgtgggccatggccacacctgatgcgtttttggtgggcttacttggtgcagtgtgctgtccagagagacctgctgacccagtctgggacaggcacagtgggagctgccacagtgccccttgctggccgccctcaggagggggcctctggaccgtcagtgtggcgtaggcagtgggtctgcttcagggaggcagcctcttgactttgtcacaacggttgcactgaagatggcccccacaagcccagttgtgaatatcaaggtgaccctgcccctggctgggagctcccctggggctctggaacctgaagccctgagaaggagagcttggaaggaggttgagctcttcactgtgtctttccatctgggctctgcagcccagctctgtggcaggaggcctgaccccaccccatcagtccctctcccagcattgctgtgcatggctccctcaggaagaagctctggagtggggccgaggccccagatgctctgctggggtctggggactgagctgcctcctgtctctccactctggagccctgggctcttgcctcctgttgaattgcccctgggcctgcccccggccccatttgtgccataaagggttgcttcattgcaggaggggtggctgaaaccaccatcctgggctgcatctatctccttaaagtccactccttacatcaccgccactactgcagctcagtgcccagcggccgcatgcacacctcccggcccctcctcagcagcgcaggggctgggggcccttcctggcacccttttgcctgacggaccctgttgcctgctcctgggcagtggttttgttgcctgacacagggcctttaacatttctgaggtttggagattaagcgggttctgtgcgatttttagcacatccatatcttttctacgttgaatgtctggatctttcctttgtatgtttgtgtctctgtgtgtgtatgtggccaagcgtctgcaggtgagggtggcacatggaacttcacgggtcactgggggcccactcttccagggtcatcgatgcatcctgggctgtgctgaggcagtgctgtctcgctcagtctttccagaccagcggggcagcacctgggaggcctgtctgaagcatgcagttctgtggtgctgctcggggatggactccatgcacagtccacttcttgacacattctcacactgtggctggagacccattttttccatcccatgtggaatgagaatcttgagttgcccacagacagacttgacctttgtgccagaactgtccagagctgtgagttttgttactgaattgcctgtccctgagcttggcctgctggagcatgatgctggaggctgtgtgcgggcaggcttgtgctccccttggagaagggctgctacttaacaaggaagtcctggccacaggagtcccctactggctgcagaggacgaagcaggaagcatgccgtggatcccacatgcactggggcagggcagccaggttccagagcagcaggcatgtgcattatgggtgccaggtggccagtgagggcccgaggaccacgcagcagagtcccccacgggcctgagcctgagagctcagaggattcctgccaggcctcagaactgtgtgtgcgggacagggtggctggcacgagatgtgtgggactgggacgcttcctttggggaccagaggaacattaggggccggtcagacacgtagggggcagtgaggaaacggggtaaagtggaccatgcaggctgcagagggtgggccttgggctggccggggttgctgggtggccccttccccatgggcctccacaagcactcaggccactggcacgttgggccaggcagaaggtccacatggcagggctgcctggaacaccgctgccactgtggctccaggaggcccttgggagcatgaggagagctggactcgctcatctgttcttgcaccaccatccagaatgccccctttgcaaggcctgctgcagtccccagtctgaccagcaagtcccggggtcacccttgctgaaccttgtgctccaggggtcctcctcctctaggaccagcttgccacggtttctcagagcccaggtgccctctgacctgccatgcggaggtgggatttgatactgtacattgtcttgatgcctgtttttttatgttttcattaagggtttttagtttttggttgggttgacactaacttttcttaagatgctgtgagaatcatttcatccaaatgccaaataaacttgtgttccggaa

SEQ ID NO: 126789 - DNA, 4814 bp, Homo sapiens
  Payload ID: 4856
  Gene Symbol: DGCR2
  Gene Name: DiGeorge syndrome critical region gene 2
  ENST ID: ENST00000389262
  CDS Start-End: 1255-2235
gcgcgcagctggagtcggtgcctgaggttgcagccgagagtgtgcgccagcccgcggcccagccgaagctctttcccgccgcctctccgcgcctcgcccaggttcagctccgcctgaccctccgcttggcacggtcccctgaccctcagtccggcctggtccggccttccagccgccccggggacgatgaacggaggataaatggtgcccaaggcagacagcggcgccttcctgctgctcttcctgctcgtgctcactgtcaccgagccgctgcggccagagctgcggtgcaaccctgggcagtttgcgtgtcgcagcggcaccatccagtgcatccccctcccctggcagtgtgacggctgggcgacttgcgaggatgagagcgacgaagccaactgtccagaagtgaccggggaggtgcgtcctcatcatgggaaggaggctgtggatccgcggcaggggcgggccagaggaggcgacccttcgcacttccacgcggtgaacgtggcgcagcccgttcgcttcagcaggaagtgcccgacagggtggcaccactacgaaggcacggccagctgctaccgggtctacctgagcggggagaactactgggatgccgcgcagacctgccagcgcctgaatggctctctcgccaccttctccactgaccaggagctgcgctttgtcctggcccaggaatgggaccagcccgagcggagctttggttggaaggaccagcgcaagttgtgggttggctatcagtatgttatcactggccggaaccgctccttggaaggtcgctgggaggtggcattcaaagattggggtgtgagtgataccatggtacatagacgcttactatgcccatgtgtcggtaccctgcacacacatttgaagttgggagctcgtttccgcagggttcctgtgcgccttggtggagcgctctccaggcgctcccccaggcccacaccagcctgtgagccccgcctgggggccaagaccctgcaggtttgacagcaccaggtcatgatgtgccctggagacagaactgccgctgctgctgccagaagacatgaggccaggatttctgtaacatttgtgcagaaaggttgaaaaagtacagatccttgtgtagggagaatcatccacaccgccccacgtgctgctcccagggccttcccgtcagcaccagcagtgtagcttctgtctggctcttcagaggtgttcctgcccccagaccccatctttgcctcggccatgtctgagaacgacaacgtgttctgtgcccagcttcagtgcttccatttccccaccctgcggcaccacgacctccacagctggcacgccgagagctgctacgagaagtcttcatttctgtgtaaaagaagtcaaacatgtgttgacatcaaggacaacgtggtggatgaagggttctacttcacccctaagggggacgacccatgcctgagctgcacctgccatggaggggagcctgagatgtgtgtggctgctctctgtgagaggccccagggctgccaacagtaccgcaaggaccccaaagagtgctgcaagttcatgtgtctggacccagatggcaacagtctgtttgactccatggccagcgggatgcgcctggtcgtcagctgcatctcctccttcctcatcctgtcactgctgctcttcatggtccaccggctgcgccagcggcgccgggagcgcatcgagtccctgattggagcaaacttgcaccacttcaacctcggccgcaggatccctggctttgattacggcccagacgggtttggcacgggcctcacgccgctgcatctttctgacgacggagagggtgggactttccatttccacgaccctccacctccctacacggcatacaagtacccggacatcggccagcccgacgaccctccgccgccctacgaggcctccatccacccggacagtgtgttctatgaccctgcagacgatgatgcttttgagcctgtggaggtcagcctgccagcccctggggatggtgggagtgaaggtgcattactccggcgcctggagcagcctctgcccactgcgggggcctctctggcagacctggaagactctgccgacagcagcagcgccctgctcgtgccccctgaccctgcccagagcgggagcaccccagctgcagaggcactgccagggggtggccgccacagccgcagctccctcaatactgtggtgtagacggcctggcctgtaccccaacggtctgggagcacctgtctgttgtagaaaacaccggtccctggggagacttgaaaggcccctgtcccagcctggacgccacgcactgccgcacgtcactggcgggctcgcgtgtgtacatagagaccacagcccgccttctgccaaaagaagtgatggcctgcaccgagcttccttgagggcttcagaaacatgcatagctttggatcactgtcttctcctttataaatggcagaagagtgacaaaattcattcagaccgcacatgttagaggcagggaatgaagaaggtactgtgggccatggccacacctgatgcgtttttggtgggcttacttggtgcagtgtgctgtccagagagacctgctgacccagtctgggacaggcacagtgggagctgccacagtgccccttgctggccgccctcaggagggggcctctggaccgtcagtgtggcgtaggcagtgggtctgcttcagggaggcagcctcttgactttgtcacaacggttgcactgaagatggcccccacaagcccagttgtgaatatcaaggtgaccctgcccctggctgggagctcccctggggctctggaacctgaagccctgagaaggagagcttggaaggaggttgagctcttcactgtgtctttccatctgggctctgcagcccagctctgtggcaggaggcctgaccccaccccatcagtccctctcccagcattgctgtgcatggctccctcaggaagaagctctggagtggggccgaggccccagatgctctgctggggtctggggactgagctgcctcctgtctctccactctggagccctgggctcttgcctcctgttgaattgcccctgggcctgcccccggccccatttgtgccataaagggttgcttcattgcaggaggggtggctgaaaccaccatcctgggctgcatctatctccttaaagtccactccttacatcaccgccactactgcagctcagtgcccagcggccgcatgcacacctcccggcccctcctcagcagcgcaggggctgggggcccttcctggcacccttttgcctgacggaccctgttgcctgctcctgggcagtggttttgttgcctgacacagggcctttaacatttctgaggtttggagattaagcgggttctgtgcgatttttagcacatccatatcttttctacgttgaatgtctggatctttcctttgtatgtttgtgtctctgtgtgtgtatgtggccaagcgtctgcaggtgagggtggcacatggaacttcacgggtcactgggggcccactcttccagggtcatcgatgcatcctgggctgtgctgaggcagtgctgtctcgctcagtctttccagaccagcggggcagcacctgggaggcctgtctgaagcatgcagttctgtggtgctgctcggggatggactccatgcacagtccacttcttgacacattctcacactgtggctggagacccattttttccatcccatgtggaatgagaatcttgagttgcccacagacagacttgacctttgtgccagaactgtccagagctgtgagttttgttactgaattgcctgtccctgagcttggcctgctggagcatgatgctggaggctgtgtgcgggcaggcttgtgctccccttggagaagggctgctacttaacaaggaagtcctggccacaggagtcccctactggctgcagaggacgaagcaggaagcatgccgtggatcccacatgcactggggcagggcagccaggttccagagcagcaggcatgtgcattatgggtgccaggtggccagtgagggcccgaggaccacgcagcagagtcccccacgggcctgagcctgagagctcagaggattcctgccaggcctcagaactgtgtgtgcgggacagggtggctggcacgagatgtgtgggactgggacgcttcctttggggaccagaggaacattaggggccggtcagacacgtagggggcagtgaggaaacggggtaaagtggaccatgcaggctgcagagggtgggccttgggctggccggggttgctgggtggccccttccccatgggcctccacaagcactcaggccactggcacgttgggccaggcagaaggtccacatggcagggctgcctggaacaccgctgccactgtggctccaggaggcccttgggagcatgaggagagctggactcgctcatctgttcttgcaccaccatccagaatgccccctttgcaaggcctgctgcagtccccagtctgaccagcaagtcccggggtcacccttgctgaaccttgtgctccaggggtcctcctcctctaggaccagcttgccacggtttctcagagcccaggtgccctctgacctgccatgcggaggtgggatttgatactgtacattgtcttgatgcctgtttttttatgttttcattaagggtttttagtttttggttgggttgacactaacttttcttaagatgctgtgagaatcatttcatccaaatgccaaataaacttgtgttccggaa

SEQ ID NO: 126790 - DNA, 4361 bp, Homo sapiens
  Payload ID: 4856
  Gene Symbol: DGCR2
  Gene Name: DiGeorge syndrome critical region gene 2
  Uniprot ID: P98153
  ENST ID: ENST00000537045
  CDS Start-End: 249-1778
ggggcggggcggcgcggcgcggagccgagcaggacggccgccatcttgcgcgcagctggagtcggtgcctgaggttgcagccgagagtgtgcgccagcccgcggcccagccgaagctctttcccgccgcctctccgcgcctcgcccaggttcagctccgcctgaccctccgcttggcacggtcccctgaccctcagtccggcctggtccggccttccagccgccccggggacgatgaacggaggataaatggtgcccaaggcagacagcggcgccttcctgctgctcttcctgctcgtgctcactgtcaccgagccgctgcggccagaagtgaccggggaggtgcgtcctcatcatgggaaggaggctgtggatccgcggcaggggcgggccagaggaggcgacccttcgcacttccacgcggtgaacgtggcgcagcccgttcgcttcagcagtttcctagggaagtgcccgacagggtggcaccactacgaaggcacggccagctgctaccgggtctacctgagcggggagaactactgggatgccgcgcagacctgccagcgcctgaatggctctctcgccaccttctccactgaccaggagctgcgctttgtcctggcccaggaatgggaccagcccgagcggagctttggttggaaggaccagcgcaagttgtgggttggctatcagtatgttatcactggccggaaccgctccttggaaggtcgctgggaggtggcattcaaaggctcttcagaggtgttcctgcccccagaccccatctttgcctcggccatgtctgagaacgacaacgtgttctgtgcccagcttcagtgcttccatttccccaccctgcggcaccacgacctccacagctggcacgccgagagctgctacgagaagtcttcatttctgtgtaaaagaagtcaaacatgtgttgacatcaaggacaacgtggtggatgaagggttctacttcacccctaagggggacgacccatgcctgagctgcacctgccatggaggggagcctgagatgtgtgtggctgctctctgtgagaggccccagggctgccaacagtaccgcaaggaccccaaagagtgctgcaagttcatgtgtctggacccagatggcaacagtctgtttgactccatggccagcgggatgcgcctggtcgtcagctgcatctcctccttcctcatcctgtcactgctgctcttcatggtccaccggctgcgccagcggcgccgggagcgcatcgagtccctgattggagcaaacttgcaccacttcaacctcggccgcaggatccctggctttgattacggcccagacgggtttggcacgggcctcacgccgctgcatctttctgacgacggagagggtgggactttccatttccacgaccctccacctccctacacggcatacaagtacccggacatcggccagcccgacgaccctccgccgccctacgaggcctccatccacccggacagtgtgttctatgaccctgcagacgatgatgcttttgagcctgtggaggtcagcctgccagcccctggggatggtgggagtgaaggtgcattactccggcgcctggagcagcctctgcccactgcgggggcctctctggcagacctggaagactctgccgacagcagcagcgccctgctcgtgccccctgaccctgcccagagcgggagcaccccagctgcagaggcactgccagggggtggccgccacagccgcagctccctcaatactgtggtgtagacggcctggcctgtaccccaacggtctgggagcacctgtctgttgtagaaaacaccggtccctggggagacttgaaaggcccctgtcccagcctggacgccacgcactgccgcacgtcactggcgggctcgcgtgtgtacatagagaccacagcccgccttctgccaaaagaagtgatggcctgcaccgagcttccttgagggcttcagaaacatgcatagctttggatcactgtcttctcctttataaatggcagaagagtgacaaaattcattcagaccgcacatgttagaggcagggaatgaagaaggtactgtgggccatggccacacctgatgcgtttttggtgggcttacttggtgcagtgtgctgtccagagagacctgctgacccagtctgggacaggcacagtgggagctgccacagtgccccttgctggccgccctcaggagggggcctctggaccgtcagtgtggcgtaggcagtgggtctgcttcagggaggcagcctcttgactttgtcacaacggttgcactgaagatggcccccacaagcccagttgtgaatatcaaggtgaccctgcccctggctgggagctcccctggggctctggaacctgaagccctgagaaggagagcttggaaggaggttgagctcttcactgtgtctttccatctgggctctgcagcccagctctgtggcaggaggcctgaccccaccccatcagtccctctcccagcattgctgtgcatggctccctcaggaagaagctctggagtggggccgaggccccagatgctctgctggggtctggggactgagctgcctcctgtctctccactctggagccctgggctcttgcctcctgttgaattgcccctgggcctgcccccggccccatttgtgccataaagggttgcttcattgcaggaggggtggctgaaaccaccatcctgggctgcatctatctccttaaagtccactccttacatcaccgccactactgcagctcagtgcccagcggccgcatgcacacctcccggcccctcctcagcagcgcaggggctgggggcccttcctggcacccttttgcctgacggaccctgttgcctgctcctgggcagtggttttgttgcctgacacagggcctttaacatttctgaggtttggagattaagcgggttctgtgcgatttttagcacatccatatcttttctacgttgaatgtctggatctttcctttgtatgtttgtgtctctgtgtgtgtatgtggccaagcgtctgcaggtgagggtggcacatggaacttcacgggtcactgggggcccactcttccagggtcatcgatgcatcctgggctgtgctgaggcagtgctgtctcgctcagtctttccagaccagcggggcagcacctgggaggcctgtctgaagcatgcagttctgtggtgctgctcggggatggactccatgcacagtccacttcttgacacattctcacactgtggctggagacccattttttccatcccatgtggaatgagaatcttgagttgcccacagacagacttgacctttgtgccagaactgtccagagctgtgagttttgttactgaattgcctgtccctgagcttggcctgctggagcatgatgctggaggctgtgtgcgggcaggcttgtgctccccttggagaagggctgctacttaacaaggaagtcctggccacaggagtcccctactggctgcagaggacgaagcaggaagcatgccgtggatcccacatgcactggggcagggcagccaggttccagagcagcaggcatgtgcattatgggtgccaggtggccagtgagggcccgaggaccacgcagcagagtcccccacgggcctgagcctgagagctcagaggattcctgccaggcctcagaactgtgtgtgcgggacagggtggctggcacgagatgtgtgggactgggacgcttcctttggggaccagaggaacattaggggccggtcagacacgtagggggcagtgaggaaacggggtaaagtggaccatgcaggctgcagagggtgggccttgggctggccggggttgctgggtggccccttccccatgggcctccacaagcactcaggccactggcacgttgggccaggcagaaggtccacatggcagggctgcctggaacaccgctgccactgtggctccaggaggcccttgggagcatgaggagagctggactcgctcatctgttcttgcaccaccatccagaatgccccctttgcaaggcctgctgcagtccccagtctgaccagcaagtcccggggtcacccttgctgaaccttgtgctccaggggtcctcctcctctaggaccagcttgccacggtttctcagagcccaggtgccctctgacctgccatgcggaggtgggatttgatactgtacattgtcttgatgcctgtttttttatgttttcattaagggtttttagtttttggttgggttgacactaacttttcttaagatgctgtgagaatcatttcatccaaatgccaaataaacttgtgttccggaagagg

SEQ ID NO: 126791 - DNA, 4484 bp, Homo sapiens
  Payload ID: 4856
  Gene Symbol: DGCR2
  Gene Name: DiGeorge syndrome critical region gene 2
  ENST ID: ENST00000545799
  CDS Start-End: 249-1901
ggggcggggcggcgcggcgcggagccgagcaggacggccgccatcttgcgcgcagctggagtcggtgcctgaggttgcagccgagagtgtgcgccagcccgcggcccagccgaagctctttcccgccgcctctccgcgcctcgcccaggttcagctccgcctgaccctccgcttggcacggtcccctgaccctcagtccggcctggtccggccttccagccgccccggggacgatgaacggaggataaatggtgcccaaggcagacagcggcgccttcctgctgctcttcctgctcgtgctcactgtcaccgagccgctgcggccagagctgcggtgcaaccctgggcagtttgcgtgtcgcagcggcaccatccagtgcatccccctcccctggcagtgtgacggctgggcgacttgcgaggatgagagcgacgaagccaactgtccagaagtgaccggggaggtgcgtcctcatcatgggaaggaggctgtggatccgcggcaggggcgggccagaggaggcgacccttcgcacttccacgcggtgaacgtggcgcagcccgttcgcttcagcagtaacctcaggaagtgcccgacagggtggcaccactacgaaggcacggccagctgctaccgggtctacctgagcggggagaactactgggatgccgcgcagacctgccagcgcctgaatggctctctcgccaccttctccactgaccaggagctgcgctttgtcctggcccaggaatgggaccagcccgagcggagctttggttggaaggaccagcgcaagttgtgggttggctatcagtatgttatcactggccggaaccgctccttggaaggtcgctgggaggtggcattcaaaggctcttcagaggtgttcctgcccccagaccccatctttgcctcggccatgtctgagaacgacaacgtgttctgtgcccagcttcagtgcttccatttccccaccctgcggcaccacgacctccacagctggcacgccgagagctgctacgagaagtcttcatttctgtgtaaaagaagtcaaacatgtgttgacatcaaggacaacgtggtggatgaagggttctacttcacccctaagggggacgacccatgcctgagctgcacctgccatggaggggagcctgagatgtgtgtggctgctctctgtgagaggccccagggctgccaacagtaccgcaaggaccccaaagagtgctgcaagttcatgtgtctggacccagatggcaacagtctgtttgactccatggccagcgggatgcgcctggtcgtcagctgcatctcctccttcctcatcctgtcactgctgctcttcatggtccaccggctgcgccagcggcgccgggagcgcatcgagtccctgattggagcaaacttgcaccacttcaacctcggccgcaggatccctggctttgattacggcccagacgggtttggcacgggcctcacgccgctgcatctttctgacgacggagagggtgggactttccatttccacgaccctccacctccctacacggcatacaagtacccggacatcggccagcccgacgaccctccgccgccctacgaggcctccatccacccggacagtgtgttctatgaccctgcagacgatgatgcttttgagcctgtggaggtcagcctgccagcccctggggatggtgggagtgaaggtgcattactccggcgcctggagcagcctctgcccactgcgggggcctctctggcagacctggaagactctgccgacagcagcagcgccctgctcgtgccccctgaccctgcccagagcgggagcaccccagctgcagaggcactgccagggggtggccgccacagccgcagctccctcaatactgtggtgtagacggcctggcctgtaccccaacggtctgggagcacctgtctgttgtagaaaacaccggtccctggggagacttgaaaggcccctgtcccagcctggacgccacgcactgccgcacgtcactggcgggctcgcgtgtgtacatagagaccacagcccgccttctgccaaaagaagtgatggcctgcaccgagcttccttgagggcttcagaaacatgcatagctttggatcactgtcttctcctttataaatggcagaagagtgacaaaattcattcagaccgcacatgttagaggcagggaatgaagaaggtactgtgggccatggccacacctgatgcgtttttggtgggcttacttggtgcagtgtgctgtccagagagacctgctgacccagtctgggacaggcacagtgggagctgccacagtgccccttgctggccgccctcaggagggggcctctggaccgtcagtgtggcgtaggcagtgggtctgcttcagggaggcagcctcttgactttgtcacaacggttgcactgaagatggcccccacaagcccagttgtgaatatcaaggtgaccctgcccctggctgggagctcccctggggctctggaacctgaagccctgagaaggagagcttggaaggaggttgagctcttcactgtgtctttccatctgggctctgcagcccagctctgtggcaggaggcctgaccccaccccatcagtccctctcccagcattgctgtgcatggctccctcaggaagaagctctggagtggggccgaggccccagatgctctgctggggtctggggactgagctgcctcctgtctctccactctggagccctgggctcttgcctcctgttgaattgcccctgggcctgcccccggccccatttgtgccataaagggttgcttcattgcaggaggggtggctgaaaccaccatcctgggctgcatctatctccttaaagtccactccttacatcaccgccactactgcagctcagtgcccagcggccgcatgcacacctcccggcccctcctcagcagcgcaggggctgggggcccttcctggcacccttttgcctgacggaccctgttgcctgctcctgggcagtggttttgttgcctgacacagggcctttaacatttctgaggtttggagattaagcgggttctgtgcgatttttagcacatccatatcttttctacgttgaatgtctggatctttcctttgtatgtttgtgtctctgtgtgtgtatgtggccaagcgtctgcaggtgagggtggcacatggaacttcacgggtcactgggggcccactcttccagggtcatcgatgcatcctgggctgtgctgaggcagtgctgtctcgctcagtctttccagaccagcggggcagcacctgggaggcctgtctgaagcatgcagttctgtggtgctgctcggggatggactccatgcacagtccacttcttgacacattctcacactgtggctggagacccattttttccatcccatgtggaatgagaatcttgagttgcccacagacagacttgacctttgtgccagaactgtccagagctgtgagttttgttactgaattgcctgtccctgagcttggcctgctggagcatgatgctggaggctgtgtgcgggcaggcttgtgctccccttggagaagggctgctacttaacaaggaagtcctggccacaggagtcccctactggctgcagaggacgaagcaggaagcatgccgtggatcccacatgcactggggcagggcagccaggttccagagcagcaggcatgtgcattatgggtgccaggtggccagtgagggcccgaggaccacgcagcagagtcccccacgggcctgagcctgagagctcagaggattcctgccaggcctcagaactgtgtgtgcgggacagggtggctggcacgagatgtgtgggactgggacgcttcctttggggaccagaggaacattaggggccggtcagacacgtagggggcagtgaggaaacggggtaaagtggaccatgcaggctgcagagggtgggccttgggctggccggggttgctgggtggccccttccccatgggcctccacaagcactcaggccactggcacgttgggccaggcagaaggtccacatggcagggctgcctggaacaccgctgccactgtggctccaggaggcccttgggagcatgaggagagctggactcgctcatctgttcttgcaccaccatccagaatgccccctttgcaaggcctgctgcagtccccagtctgaccagcaagtcccggggtcacccttgctgaaccttgtgctccaggggtcctcctcctctaggaccagcttgccacggtttctcagagcccaggtgccctctgacctgccatgcggaggtgggatttgatactgtacattgtcttgatgcctgtttttttatgttttcattaagggtttttagtttttggttgggttgacactaacttttcttaagatgctgtgagaatcatttcatccaaatgccaaataaacttgtgttccggaagagg

SEQ ID NO: 126792 - DNA, 1235 bp, Homo sapiens
  Payload ID: 4856
  Gene Symbol: DGCR2
  Gene Name: DiGeorge syndrome critical region gene 2
  ENST ID: ENST00000615747
  CDS Start-End: 249-1235
ggggcggggcggcgcggcgcggagccgagcaggacggccgccatcttgcgcgcagctggagtcggtgcctgaggttgcagccgagagtgtgcgccagcccgcggcccagccgaagctctttcccgccgcctctccgcgcctcgcccaggttcagctccgcctgaccctccgcttggcacggtcccctgaccctcagtccggcctggtccggccttccagccgccccggggacgatgaacggaggataaatggtgcccaaggcagacagcggcgccttcctgctgctcttcctgctcgtgctcactgtcaccgagccgctgcggccagagctgcggtgcaaccctgggcagtttgcgtgtcgcagcggcaccatccagtgcatccccctcccctggcagtgtgacggctgggcgacttgcgaggatgagagcgacgaagccaactgtccagaagtgaccggggaggtgcgtcctcatcatgggaaggaggctgtggatccgcggcaggggcgggccagaggaggcgacccttcgcacttccacgcggtgaacgtggcgcagcccgttcgcttcagcagtaacctcaggaagtgcccgacagggtggcaccactacgaaggcacggccagctgctaccgggtctacctgagcggggagaactactgggatgccgcgcagacctgccagcgcctgaatggctctctcgccaccttctccactgaccaggagctgcgctttgtcctggcccaggaatgggaccagcccgagcggagctttggttggaaggaccagcgcaagttgtgggttggctatcagtatgttatcactggccggaaccgctccttggaaggtcgctgggaggtggcattcaaaggctcttcagaggtgttcctgcccccagaccccatctttgcctcggccatgtctgagaacgacaacgtgttctgtgcccagcttcagtgcttccatttccccaccctgcggcaccacgacctccacagctggcacgccgagagctgctacgagaagtcttcatttctgtgtaaaagaagtcaaacatgtgttgacatcaaggacaacgtggtggatgaagggttctacttcacccctaagggggacgacccatgcctgagctgcacctgccatggaggggagcctgagatgtgtgtggctgctctctgtgagaggccccagggctgccaacaccctctctcctgcacggccagagcgacttag

SEQ ID NO: 126793 - DNA, 1214 bp, Homo sapiens
  Payload ID: 4857
  Gene Symbol: DGCR6
  Gene Name: DiGeorge syndrome critical region gene 6
  Uniprot ID: Q14129
  ENST ID: ENST00000331444
  CDS Start-End: 153-815
cgcgaggcgcgccgcgatcggggactgtcctaagacgggcggggcgcgctgcgctagggactgtcataaaaggggcgggacgcgccgcggtcgggatgacgtgagctgggggcgctcgtcgctgcagccggcggctagcgggcgtccgcgccatggagcgctacgcgggcgccttggaggaggtggcggacggtgcccggcagcaggagcgacactaccagctgctgtcggcgttacagagcctggtgaaggagttgcccagctcattccagcagcgcttgtcctacaccacgctgagcgacctggccctggcgcttctcgacggcaccgtgttcgaaatcgtgcaggggctactggagatccagcacctcaccgaaaagagcctgtacaaccagcgcctgcgcctacagaacgagcatcgagtgctcaggcaggcgctgcggcagaagcaccaggaagcccagcaggcctgccggccccataacctgcctgtgcttcaggcggctcagcagcgagaactagaggcggtggagcaccggatccgtgaggagcagcgggcgatggaccagaagatcgtcctggagctggaccggaaggtggctgaccagcagagcacactggagaaggcgggggtggctggcttctacgtgaccaccaacccacaggagctgatgctgcagatgaacctgctggaactcatccggaagctgcagcagaggggctgctgggcagggaaggcagccctggggctaggaggtccctggcagttgcctgctgcccagtgtgaccagaaaggcagccctgtcccaccatagccacaggcagcagaagtctgggcagagttcatcttcttgacctttggccactgccttcccagctgcccgcagggggttccccctgctgaggagagaccaggtggaccccagctgcctgtcacccttcatctgggacttgctgtcaaaccctaggatagtctcataaaggggaggctgggccagcctgctgctgtctgcttcagggccaggcagagagtgaggctgggggttctcacaccttactccaccgggcacatcccaacctgcactggggcccactcgagcgcttgttctggtctcagccgctcccttggcagctgcagcccccatgcagaagaggctcccaggcccaagctctgtgtgacccagagaaataaagatgcctcagtgtggcccgca

SEQ ID NO: 126794 - DNA, 1199 bp, Homo sapiens
  Payload ID: 4857
  Gene Symbol: DGCR6
  Gene Name: DiGeorge syndrome critical region gene 6
  Uniprot ID: Q14129
  ENST ID: ENST00000427407
  CDS Start-End: 25-513
cggcggctagcgggcgtccgcgccatggagcgctacgcgggcgccttggaggaggtggcggacggtgcccggcagcaggagcgacactaccagctgctgtcggcgttacagagcctggtgaaggagttgcccagctcattccagcagcgcttgtcctacaccacgctgagcgacctggccctggcgcttctcgacggcaccgtgttcgaaatcgtgcaggggctactggagatccagcacctcaccgaaaagagcctgtacaaccagcgcctgcgcctacagaacgagcatcgagtgccccgcaccttctggaatcccctggagacttgccgtgacagtggggtgggaggatggaggaggctggcgtcctccccagtgcagacacccctttggcctggctgctctgctgggttgtgctcaggcaggcgctgcggcagaagcaccaggaagcccagcaggcctgccggccccataacctgcctgtgcttcaggcggctcagcagcgagaactagaggcggtggagcaccggatccgtgaggagcagcgggcgatggaccagaagatcgtcctggagctggaccggaaggtggctgaccagcagagcacactggagaaggcgggggtggctggcttctacgtgaccaccaacccacaggagctgatgctgcagatgaacctgctggaactcatccggaagctgcagcagaggggctgctgggcagggaaggcagccctggggctaggaggtccctggcagttgcctgctgcccagtgtgaccagaaaggcagccctgtcccaccatagccacaggcagcagaagtctgggcagagttcatcttcttgacctttggccactgccttcccagctgcccgcagggggttccccctgctgaggagagaccaggtggaccccagctgcctgtcacccttcatctgggacttgctgtcaaaccctaggatagtctcataaaggggaggctgggccagcctgctgctgtctgcttcagggccaggcagagagtgaggctgggggttctcacaccttactccaccgggcacatcccaacctgcactggggcccactcgagcgcttgttctggtctcagccgctcccttggcagctgcagcccccatgcagaagaggctcccaggcccaagctctgtgtgacccagagaaataaagatgcctcagtgtgg

SEQ ID NO: 126795 - DNA, 1039 bp, Homo sapiens
  Payload ID: 4857
  Gene Symbol: DGCR6
  Gene Name: DiGeorge syndrome critical region gene 6
  ENST ID: ENST00000413981
  CDS Start-End: 386-640
ctcagcaagggccggtgggattctacatggtcctgcgatatccaggcgacggagtctcgcctctaaagtggcccggggagcaggaagctcattccagcagcgcttgtcctacaccacgctgagcgacctggccctggcgcttctcgacggcaccgtgttcgaaatcgtgcaggggctactggagatccagcacctcaccgaaaagagcctgtacaaccagcgcctgcgcctacagaacgagcatcgagtgctcaggcaggcgctgcggcagaagcaccaggaagcccagcaggcctgccggccccataacctgcctgtgcttcaggcggctcagcagcgagaactagaggcggtggagcaccggatccgtgaggagcagcgggcgatggaccagaagatcgtcctggagctggaccggaaggtggctgaccagcagagcacactggagaaggcgggggtggctggcttctacgtgaccaccaacccacaggagctgatgctgcagatgaacctgctggaactcatccggaagctgcagcagaggggctgctgggcagggaaggcagccctggggctaggaggtccctggcagttgcctgctgcccagtgtgaccagaaaggcagccctgtcccaccatagccacaggcagcagaagtctgggcagagttcatcttcttgacctttggccactgccttcccagctgcccgcagggggttccccctgctgaggagagaccaggtggaccccagctgcctgtcacccttcatctgggacttgctgtcaaaccctaggatagtctcataaaggggaggctgggccagcctgctgctgtctgcttcagggccaggcagagagtgaggctgggggttctcacaccttactccaccgggcacatcccaacctgcactggggcccactcgagcgcttgttctggtctcagccgctcccttggcagctgcagcccccatgcagaagaggctcccaggcccaagctctgtgtgacccagagaaataaagatgcctcagtgtggcccgca

SEQ ID NO: 126796 - DNA, 1435 bp, Homo sapiens
  Payload ID: 4857
  Gene Symbol: DGCR6
  Gene Name: DiGeorge syndrome critical region gene 6
  ENST ID: ENST00000480608
  CDS Start-End: 21-455
ggctagcgggcgtccgcgccatggagcgctacgcgggcgccttggaggaggtggcggacggtgcccggcagcaggagcgacactaccagctgctgtcggcgttacagagcctggtgaaggagttgcccagctcattccagcagcgcttgtcctacaccacgctgagcgacctggccctggcgcttctcgacggcaccgtgttcgaaatcgtgcaggggctactggagatccagcacctcaccgaaaagagcctgtacaaccagcgcctgcgcctacagaacgagcatcgaggtgcgcgggggcagcgggaggaggtgccgcctcctcggggtcggcgcctcccggcagctcttggtatctgtgcagctcggctccttccttgggagtgttcggaagaggtccctaagattaacaaaatcaagggcgcagagactgagacagcgcctttttggtgaccaatgtgtccaacgagttttgttttcagttgcgcagcacccaccttcttagcagaaactccctgttcgggcttccctgtgccccacccccttccaggcctgatggccctaggcctccgtgcttggttggccggcaggctgactctggtggtagatctgactgcgttgccctccggtaattggagttctgttgacaggcaggcgctgcggcagaagcaccaggaagcccagcaggcctgccggccccataacctgcctgtgcttcaggcggctcagcagcgagaactagaggcggtggagcaccggatccgtgaggagcagcgggcgatggaccagaagatcgtcctggagctggaccggaaggtggctgaccagcagagcacactggagaaggcgggggtggctggcttctacgtgaccaccaacccacaggagctgatgctgcagatgaacctgctggaactcatccggaagctgcagcagaggggctgctgggcagggaaggcagccctggggctaggaggtccctggcagttgcctgctgcccagtgtgaccagaaaggcagccctgtcccaccatagccacaggcagcagaagtctgggcagagttcatcttcttgacctttggccactgccttcccagctgcccgcagggggttccccctgctgaggagagaccaggtggaccccagctgcctgtcacccttcatctgggacttgctgtcaaaccctaggatagtctcataaaggggaggctgggccagcctgctgctgtctgcttcagggccaggcagagagtgaggctgggggttctcacaccttactccaccgggcacatcccaacctgcactggggcccactcgagcgcttgttctggtctcagccgctcccttggcagctgcagcccccatgcagaagaggctcccaggcccaagctctgtgtgacccagagaaataaagatgcctcagtgtggcccgc

SEQ ID NO: 126797 - DNA, 3245 bp, Homo sapiens
  Payload ID: 4857
  Gene Symbol: DGCR6
  Gene Name: DiGeorge syndrome critical region gene 6
  ENST ID: ENST00000483718
  CDS Start-End: 51-365
gagctgggggcgctcgtcgctgcagccggcggctagcgggcgtccgcgccatggagcgctacgcgggcgccttggaggaggtggcggacggtgcccggcagcaggagcgacactaccagctgctgtcggcgttacagagcctgctcattccagcagcgcttgtcctacaccacgctgagcgacctggccctggcgcttctcgacggcaccgtgttcgaaatcgtgcaggggctactggagatccagcacctcaccgaaaagagcctgtacaaccagcgcctgcgcctacagaacgagcatcgagtgctcaggcaggcgctgcggcagaagcaccaggaagcccagcaggcctgccggccccataacctgcctgtgcttcaggcggctcagcagcgagaactagaggcggtggagcaccggatccgtgaggagcagcgggcgatggaccagaagatcgtcctggagctggaccggaaggtggctgaccagcagagcacactggagaaggcgggggtggctggcttctacgtgaccaccaacccacaggagctgatgctgcagatgaacctgctggaactcatccggaagctgcagcagaggggctgctgggcagggaaggcagccctggggctaggaggtccctggcagttgcctgctgcccagtgtgaccagaaaggcagccctgtcccaccatagccacaggcagcagaagtctgggcagagttcatcttcttgacctttggccactgccttcccagctgcccgcagggggttccccctgctgaggagagaccaggtggaccccagctgcctgtcacccttcatctgggacttgctgtcaaaccctaggatagtctcataaaggggaggctgggccagcctgctgctgtctgcttcagggccaggcagagagtgaggctgggggttctcacaccttactccaccgggcacatcccaacctgcactggggcccactcgagcgcttgttctggtctcagccgctcccttggcagctgcagcccccatgcagaagaggctcccaggcccaagctctgtgtgacccagagaaataaagatgcctcagtgtggcccgcatgtggcttgtgtgatagctgcaggttctgccataaccggggccctggtagggcccccacctctgttgcagcagaggcctctacctgggggccccttcctgggctgtgtgcccagcccaccacccctccccctgcctggagactgggaccctccagcctttcctgccccagccctggtcccaggatgctgtcactgccatctgtacaggggcccccatccaagccccagggcatgaggaccacatccagcctgctttgtggggctgggggctggagagcatgggagaaggcccgaagtgcaagtatgcgcctgccgcagcctggtcagtgtcctgtgggaaccactaggaggagcctgatgcaggtcactggggtagaggactcagggtggcaggaatggcctgaggaggagccctgcggggaggcgtgccaggcccacctggggagcttggcctctgcatctgcatgagtcccctccgtgctggcctgggcccatgggccctgctgggtccttgtggagtcagggttgggggtgtccagcaccctgggtggccaggtctgcgcagggcctggcccccaggaacagatgatgctggaagccagagtctgggatgagacttctctgaccctgtctgagccactccctctttgttgcccagagctgaccctgtgtgagggcaaagggctctcagctgcaggaacagtggtttattgaccaggcaggcctccccagcccggccactgctccccaaggggctcgggctgtgtgggctggccttggcagaaggtggacaatcctctaggtccaaggacatgggggtcacagaggtgggggccttgggcccacacattcgaggagagttcccaaaagtttccagtggctgtcccaggcaggtatcaggttcggcccacacctgagtgcccatactctgggcagggctgggaggcacctgacctcacctccagcagctctgcaagtgtggggtgaaaaaaggtgaatctgtgtgaggatggggttggctgcagctgtggtgatggcctgggcgggggcggggggtgctggaggctaagggtgtgctggcgggtgctaggcagggcgatggaagaggttgccagttcggagccgcctcaagagctccagccacagcagctgccgctcccgatgggtgcccttcatgaggctgctgttctccagggcacggcgggacaagtagggcagcacctccatcacggggccatagggcacgtacttgtacacggggtagccggcctggcctgcatgggggcagatacaccatgaggcccaggcccagcaccgtaccccatcgcaccagggagggccccactcacccagcgggaagctgatctggtcacacatgcctagcagctgtccaaagtacacccggtggtcagcaggatgcaggcccagctcctccatcctgtgcaggtgaagccaggaactgagggccagttccaggacactgtccccagtgcagggatacagggctcctgtcccagctctgagcctgtcctgccatcccaggtgccccatctgcactctccagacttcatcccctgcaaggtggggctggggtatgggctctgcctggccctgccccagtgaggcctcttcccagcaggactctgctgggctgccctactcgtctccctggggaggcctcagcccttggccaacaaggcctcccacctgctttccctcccctctcctctctcacctctcctctagctcccttcttggaggtgcagcccttcctcgggccctgacccacccagcagcctgccccacagggcagagaagctcctcagctctcctgccatcccttcctcaagcccctccagggttctgtggtatgactggtctccggcccctgccctcgccctctgtgggctgctgccctgccccatccccacagctgctgtgtcccacacagctgccaccagcccccgagtcctcggaaggcggctgctctgaatcgagatgtgttgcaaatgtcaaatacacacgggatttaggagactttgtagaaaaataatgcacgatgccgcgttgcttttctaaaagcaactggaatacaatttgaagtaatattttgaatattttgggttaattaaaattattcttgaaattca

SEQ ID NO: 126798 - DNA, 1837 bp, Homo sapiens
  Payload ID: 4857
  Gene Symbol: DGCR6
  Gene Name: DiGeorge syndrome critical region gene 6
  ENST ID: ENST00000608842
  CDS Start-End: 23-457
gcggctagcgggcgtccgcgccatggagcgctacgcgggcgccttggaggaggtggcggacggtgcccggcagcaggagcgacactaccagctgctgtcggcgttacagagcctggtgaaggagttgcccagctcattccagcagcgcttgtcctacaccacgctgagcgacctggccctggcgcttctcgacggcaccgtgttcgaaatcgtgcaggggctactggagatccagcacctcaccgaaaagagcctgtacaaccagcgcctgcgcctacagaacgagcatcgaggtgcgcgggggcagcgggaggaggtgccgcctcctcggggtcggcgcctcccggcagctcttggtatctgtgcagctcggctccttccttgggagtgttcggaagaggtccctaagattaacaaaatcaagggcgcagagactgagacagcgcctttttggtgaccaatgtgtccaacgagttttgttttcagttgcgcagcacccaccttcttagcagaaactccctgttcgggcttccctgtgccccacccccttccaggcctgatggccctaggcctccgtgcttggttggccggcaggctgactctggtggtagatctgactgcgttgccctccggtaattggagttctgttgacaggtgagcagcgcccttgggtagttggaggtctgttgacagctgtgcgcgcccttcagggtcagttccctctcaggcctgcagggcctcattctagttgcacatcaaattcctaagcactgtctcctgtggcgccctcccaaaccagaagagcttcccacttgagccgcatgcttcctgggcttcggagccctttcctgcaaattatatagggcaggtccccctgcaccatcagatttccacctttgctgttttatttttcccaaacttcttattttaaaagttcaaacatttggaaaaactgaaaagacagtgtagtgcatacgcttgtgctctccaccgaaagttcagtagttaacattttgctctagttcttgacatcccaaaatacatacatgtgacagcatagaattcaccaagagtcttcagcattcctggagaccaggattttcaacccagccatgctgacatttgtggctgggtaagtctttatggtgagatgctgtcttgcgcattgcaggatggcaggggtaccctccctagtcgtgaaaaccaagaatgcctccagacaacctgggtggtggggtcaaccttggccttggattgggagcaagtgctctagaacaagagcggtctcctacacagctgcagagggtagccccctgagaaattaactgttccaggtgtctcctgactttcagtgcatggccacatcatggtacctaacttgtggcaaattgttgctttataagtaaggatccagtccaagttcatgtactacaattggttactttggtctctttgcttctggaacagtccccaacatttattgtggcattgactttttatagagtctaattctataattagaatgccctgctctggatctatcagaggaaatgcttcctcgtgcatttaacctgcttctccactctctgggtttactgtacactggactcctggtaggagcctgattagaggcaggtttaatgtggcaaaaattcctcctagcggggcaaggcccccttccccagaaggcaggcagtgtccatctgctccaggattggtgtgtttctatcaagaatggatgttggattttggcagtttcctttttggcagctcttgagatgatcacgtggtgaatcattttctattactacagtgaattacagtcacttgaattcca

SEQ ID NO: 126799 - DNA, 1154 bp, Homo sapiens
  Payload ID: 4858
  Gene Symbol: DGCR6L
  Gene Name: DiGeorge syndrome critical region gene 6-like
  Uniprot ID: Q9BY27
  ENST ID: ENST00000248879
  CDS Start-End: 93-755
aatcgtaaaaggggcgggacgcgccgcgctcgggatgtcgtgaagctgggggagctcgtcgccgccgccggcggctagcgggcgtccgcgccatggagcgctacgcggccgccttggaggaggtggcggacggtgcccggcagcaggagcgacactaccagttgctgtcggcgctacagagcctggtgaaggagttgcccagctctttccagcagcgcctgtcctacaccacgctcagcgacctggccctggcgcttctcgacggcaccgtgttcgaaatcgtgcaggggctactggagatccagcacctcaccgaaaagagcctgtacaaccagcgcctgcgcctacagaacgagcaccgagtgctcaggcaggcgctgcggcagaagcaccaggaagcccagcaggcctgccggccccacaacctgcctgtggttcaggcggctcagcagcgagaactagaggccgtggaacaccggatccgtgaggagcagcgggcgatggaccagaagatcatcctggagctggaccggaaggtggctgaccagcagagcacactggagaaggcgggggtggctggcttctacgtgaccaccaacccacaggagctgatgctgcagatgaacctgctggaactcatccgaaagctgcagcagaggggctgccgggcagggaatgcagccctgggactgggaggtccctggcagtcgcctgctgcccagtgtgaccagaaaggcagccctgtcccaccatagccacaggcagcagaagtctgggcagagttcatcttcttgacctttggccactgccttcccagctgcccgcagggggttccccctgctgaggagagaccaggtggaccccagctgcctgtcacccttcatctgggacttgctgtcaaaccctaggatagtctcataaaggggaggctgggccagcctgctgctgtctgcttcaggaccaggcagagagtgaggctgggggttctcacaccttactccaccgggcacatcccaacctgcactggggcccacccgagcgcttgttctggtctcagccgctcccttggcagctgcagcccccatgcagaagaggctcccaggcccaagctctgtgtgacccagagaaataaagatgcctcagtgtggcccaaa

SEQ ID NO: 126800 - DNA, 962 bp, Homo sapiens
  Payload ID: 4858
  Gene Symbol: DGCR6L
  Gene Name: DiGeorge syndrome critical region gene 6-like
  ENST ID: ENST00000405465
  CDS Start-End: 22-570
cggctagcgggcgtccgcgccatggagcgctacgcggccgccttggaggaggtggcggacggtgcccggcagcaggagcgacactaccagttgctgtcggcgctacagagcctggtgaaggagttgcccagcgcctgtcctacaccacgctcagcgacctggccctggcgcttctcgacggcaccgtgttcgaaatcgtgcaggggctactggagatccagcacctcaccgaaaagagcctgtacaaccagcgcctgcgcctacagaacgagcaccgaggccgtggaacaccggatccgtgaggagcagcgggcgatggaccagaagatcatcctggagctggaccggaaggtggctgaccagcagagcacactggagaaggcgggggtggctggcttctacgtgaccaccaacccacaggagctgatgctgcagatgaacctgctggaactcatccgaaagctgcagcagaggggctgccgggcagggaatgcagccctgggactgggaggtccctggcagtcgcctgctgcccagtgtgaccagaaaggcagccctgtcccaccatagccacaggcagcagaagtctgggcagagttcatcttcttgacctttggccactgccttcccagctgcccgcagggggttccccctgctgaggagagaccaggtggaccccagctgcctgtcacccttcatctgggacttgctgtcaaaccctaggatagtctcataaaggggaggctgggccagcctgctgctgtctgcttcaggaccaggcagagagtgaggctgggggttctcacaccttactccaccgggcacatcccaacctgcactggggcccacccgagcgcttgttctggtctcagccgctcccttggcagctgcagcccccatgcagaagaggctcccaggcccaagctctgtgtgacccagagaaataaagatgcctcagtgtg

SEQ ID NO: 126801 - DNA, 935 bp, Homo sapiens
  Payload ID: 4858
  Gene Symbol: DGCR6L
  Gene Name: DiGeorge syndrome critical region gene 6-like
  ENST ID: ENST00000443409
  CDS Start-End: 93-386
aatcgtaaaaggggcgggacgcgccgcgctcgggatgtcgtgaagctgggggagctcgtcgccgccgccggcggctagcgggcgtccgcgccatggagcgctacgcggccgccttggaggaggtggcggacggtgcccggcagcaggagcgacactaccagttgctgtcggcgctacagagcctggtgaaggagttgcccagctctttccagcagcgcctgtcctacaccacgctcagcgacctggccctggcgcttctcgacggcaccgtgttcgaaatcgtgcaggggctactggagatccagcacctcaccgaaaagagcctgtacaaccagcgcctgcgcctacagaacgagcaccgaggccgtggaacaccggatccgtgaggagcagcgggcgatggaccagaagatcatcctggagctggaccggaaggtggctgaccagcagagcacactggagaaggcgggggtggctggcttctacgtgaccaccaacccacaggagctgatgctgcagatgaacctgctggaactcatccgaaagctgcagcagaggggctgccgggcagggaatgcagccctgggactgggaggtccctggcagtcgcctgctgcccagtgtgaccagaaaggcagccctgtcccaccatagccacaggcagcagaagtctgggcagagttcatcttcttgacctttggccactgccttcccagctgcccgcagggggttccccctgctgaggagagaccaggtggaccccagctgcctgtcacccttcatctgggacttgctgtcaaaccctaggatagtctcataaaggggaggctgggccagcctgctgctgtctgcttcaggaccaggcagagagtgaggctgggggttctcacaccttactccaccgggcacatcccaacctgcactggggcccaccc

SEQ ID NO: 126802 - DNA, 2895 bp, Homo sapiens
  Payload ID: 4859
  Gene Symbol: DIEXF
  Gene Name: digestive organ expansion factor homolog (zebrafish)
  ENST ID: ENST00000457820
  CDS Start-End: 1-746
actgctctacatggagctttttagctccacttcctcagcagtttcacctcaagatcctgttccttcctcttaccccactaaggctgctgttgctgtctgcacaggtactgatagtggtgccattccgggaagctgctttgcgggtggtgcagctcttcatcagcctcctcgagggtgacagcaagaagaaaatcattgtgagcaacaaaaagaggtttcagggagaatatggatcagatcccgaggagagaccacccaacttgaagaggcctgaggattatgaagccgtatttgtgggcaatattgatgaccacttcaggattggagtggcaatacttcagagaagcatccgactctatgccccgttttactcctcggatatcctcattgcttcccccctgggcttgaggaccatcattggtggagaaggagagaagaagagagattttgactttctgtcttctatcgagcttctcatcattgatcaagctgacatttacctgatgcagaactgggagcatgtcctgcatttgatgaatcacatgaacctactacccctggactcacatggggtagacttttctcgagtgcggatgtggagcctcaataattggtccaagtactatcgccagacactgctatttggggcccttcaggatgcccagatcaactcagtgttcaacaagtactgtgtcaacatgcaaggccaggtgggttctcgtcttgtttcctcagtatcttcatgagcactgtttattgtttgggtcctgaggtagaaggaggcgatagcttctggtcaagaaggggatggctgtccacctaacgctcttgttgactactggcaggtggccgtgaggaatgtcccaatgacaggctctatcagtcatgtcctggtgcagctcccacatgtcttccagaggatggaagctgaaaacctagcttcagtgattgatgccaggtaacccactcctcccagcaggcccctggggaccacatagagagatttgacttgggcatacaaacctagaattggattccattttgcttttattgataactaccaaatcagttgagataattgaacttaattatgtcatttgtcagaggaggaaactgaagcacagagagaaatagtgactttggcctaggtctcataactagttagtagcagggttattactataaatcaggactctttcactcttgactgtggcattttaaaattatacagctttatgctacaaagtgtctcatgtcagcaagttaattgtaagcccctcagggaaagaactatttttctaattgtataatttccccctttttcttcattgtgtttagttaggggaccccaaagaagcttagtgaggcttagtatatggtagatgttcagtgattatttgttgactgttggactgagtgactgagtgactgactgactgactgaatagtgtggtgtgtacttcctagagtaattctctgggatataatggtattacatctgttttttacaatgaatagtgttgacacttatttttttagtgtgcttatcaagttttatccttacataatctctttgagaggaggtaaatcatattggcctctggggaggtaatcttttaacacgagattgtaatttgctcagggtcacacagttaagagacaccataagcttagctctagacattaattttgccctttgccattccaaatcaggtttaacttttttgtgaacaagattttgccacagtatcgtgatgcagtcatgtctcacacgctcatctatatcccctcctactttgacttcgtgcgtcttcgaaattacttcaagaaggaggaattgaattttacccacatctgcgagtacacgcagaagtctggtgtctccagggccagacacttcttccttcaaggagagaaacagtttctacttttcacagagcgcttccatttctacaaaaggtaaagtggtgccaggtttcaagcctcctctctgaaggggaggtgcaggacaaatcatggcctgctctgaatgcatggcaggcttcgtggtgttgagatcatccctcactctcgcactcttacaaagtagccagagagtttttggtttggacagactcttcttggttggttagttggttttctcccaaaatgggcattgctgaagaaggatgtagaaaccaaagcataccctgtctatagacctggcatgtagctgtggttatacactgcaagaaggacattacaggacaactcaaatgaatacaaggaaggggagggaccttccctgtattcacttgagttgtccctgtctagactttttccctctgtttgccctcagtgcacagacaaaagcattgagaactgtgttttctggggagatggaggctgagtacagtgtcagtttccagacagttgcggtgttcctgaggtatgcacagatactccctaccaaggagaactaggaccgtgggctccttgacatttgcaggaggtaaaagggtaagggcttcaagttgaatgttgaagggtttcagcgtttgcttagatttcctaccaggtgactttgacaaaataagttgattggtcttcatgttatttttttaaaaactcaggccaggtgcagtggctcacacctgtaatcccagcactttgggaggccaaggcaggcgaatcacctgtggtcaggagttcaagaccatcccggctaacatggtgaaaccccgtttctactaaaaatataaaaaattagttgagcgtggtggtgtgtgcctataatcccagctactcgggaggctgaggcaggagaatagcttgaacccgggaggcagaggttgcagttagctgagatcgtgccattgcactccagcttgggcaacaagagcgaaactccatctc

SEQ ID NO: 126803 - DNA, 8446 bp, Homo sapiens
  Payload ID: 4859
  Gene Symbol: DIEXF
  Gene Name: digestive organ expansion factor homolog (zebrafish)
  Uniprot ID: Q68CQ4
  ENST ID: ENST00000491415
  CDS Start-End: 58-2328
caacttcctggtggaaaaccgcgactcttgcaagtgggcaaacttgacgttttcgctatgggcaaacgcgggagccggagccagagccagctactcaacaccctaactaaaaagcagaagaaacatcttcgagatttcggcgaggagcatcccttctatgacagggtttccagaaaggaagcaaagccacagatttgtcaactgtcagagagttcagattcttcagattctgaaagcgactcagagagtgaaccacaacaagtttctggctaccacagactacttgctacattaaagaatgtttctgaggaagaagaggaagatgaggaggaggaagaggaagaagacagtattgtagatgatgcagaaatgaacgatgaagatggtggtagcgatgtcagtgtggaagaagagatggctgcagagtctactgaaagtccagagaatgtagctttatctgctgaccctgagggaaaagaagatggggaagagccaccgggcacatcacaaacatcccccgaagagttcacagatgcaaaacacgagtcactgttcagcctggaaaccaattttctggaagaggaaagtggagacaactcttctttgaaagcctctcaagatccatttcttcaacatgtgaacaaagaactgaaagaaaaagcaattcaggctgttgccacaaatcccaaaactacccacgagcttaaatggcctattctgggccagcttttcttttcctctaagtttcagaagttggaaacatttaaacccccaaaggatattgacttaaagtcacttcatctccagaagcctctggaatccacctggactaagaccaacagccagttcctatctggtccccaaaaatcaagcagcccattcacccccctccagaaagaactcttcttaattatgaattcttaccgggacctgttctacccggaaaggactgctctgaagaacggggaagagatccgccatgtgtattgcctgcatgtgataaatcacatcctcaaagccaatgcccaggtgcttggcaacaatagcagacgccgaagccagaagtttggagtgggtgatgatgatgacttcagagaccaagggttaacaaggcccaaggtactgatagtggtgccattccgggaagctgctttgcgggtggtgcagctcttcatcagcctcctcgagggtgacagcaagaagaaaatcattgtgagcaacaaaaagaggtttcagggagaatatggatcagatcccgaggagagaccacccaacttgaagaggcctgaggattatgaagccgtatttgtgggcaatattgatgaccacttcaggattggagtggcaatacttcagagaagcatccgactctatgccccgttttactcctcggatatcctcattgcttcccccctgggcttgaggaccatcattggtggagaaggagagaagaagagagattttgactttctgtcttctatcgagcttctcatcattgatcaagctgacatttacctgatgcagaactgggagcatgtcctgcatttgatgaatcacatgaacctactacccctggactcacatggggtagacttttctcgagtgcggatgtggagcctcaataattggtccaagtactatcgccagacactgctatttggggcccttcaggatgcccagatcaactcagtgttcaacaagtactgtgtcaacatgcaaggccaggtggccgtgaggaatgtcccaatgacaggctctatcagtcatgtcctggtgcagctcccacatgtcttccagaggatggaagctgaaaacctagcttcagtgattgatgccaggtttaacttttttgtgaacaagattttgccacagtatcgtgatgcagtcatgtctcacacgctcatctatatcccctcctactttgacttcgtgcgtcttcgaaattacttcaagaaggaggaattgaattttacccacatctgcgagtacacgcagaagtctggtgtctccagggccagacacttcttccttcaaggagagaaacagtttctacttttcacagagcgcttccatttctacaaaaggtatacaataaaaggcatcaggaacctgattttctatgaactgccgacatatccacacttttacagtgaaatctgtaatatgctgagagccaccaacagaggagaagaggccacgtggacctgcactgttctctactccaaatatgatgcccagaggttagctgccgtggttggtgtggagcgggcggcacagatgctacagtccaacaagaatgtccacctcttcattactggagaaaaatgaaattttgttgggcaggaagtggtatttggcatgatacataatgtttgattctatgccatttggacccaattctgattacttacagaagaaggactgatacaaagaaagtgcatgaggcaatgtcagtattatctgacatctttcttttcaggtcatgtgtccctgaaaagttaaatgtaaaccagattttggtaaatcccatctttcagaagtgaagagggggctagaaggactctgagaagttggtagaagaaaactcccacttgtgaatatttttgtgagacataaattcttttattacgatttacctctaatttattacacttagtaaattcttccagatttttctatttgtttgacacttccttaaagtaaggaatacacattgcttgcgagaactggttatgagacattggaatacttcttgctgctacatgtcatcttaattttggatggcatgggttttgtaaaacttattctgccccagccaaacttttttgaaaccttaaatagtctaccttaattcagcctagaagagtacattgatttactgatcttttttcatattcataatactaaatgttttagttttgttcaaatatatgcttaaaatcacgttatttaaaaaacacatcagctctgtctcaagaagtaattttgttgaaactccatgttaaaatatccatcttcaacagtagtgtcttcataataactagtcattttttcagtcataaacagatgcaaataaaaaggaaattacacttttaaaaacatttttattttgaaacattctcaaacagaaaaattccaagtacagaacctgaaccatttgagagtgagttgccaacccagtgggcctatcacctttaaatactttagtatatatttcctgtaaacaattaagggtattgtttgtgattaggaatgccccaccaataaggataatgtgaatatttcagaatccaaaaaaattcgaaacacgtctggtcccaagcatttcagataagagatattcaactcatcctagtatggactcgtagtttcttcttttattcaatgggttacggtttgttacatcattatttctttagatgcgtaactggtctcaaatatggccgctgggagcaccttcaggttagcccctgtgtacttttgacatgtcccccatctacttgggcactgctgtattttttgacaatgagacattccaggtttctctactccagccctgcttgcttttagtaggaaattattataaaaggttagattggagtgcttactattgtggtgccactcatcccaggctcagtggtcagaacttgggaattgtgtacatgtatgcacacacatatgtacacacgttgtctaaatttgcttcacattaatatctaaatttactttcatatccatatattgaaaaccatgaattcacaccagtacctccaattctagtccaacaacacaggattgcttctcattttctttccatattgataactcctttctcagacagtggctcccattatcctcaatgtaataacccatgattggtacagattttttttatccttgggcacgcttaaaattacttagcaaaaacaaaaagtaaaatcagttttgaagtaatatttctgctaaatatttagacatttttacttctttttcttcagcatggtaagtaaaaccatttattccatatttagatggttttctaaatttcagaaaatttagttagataaaagccgaccgaacccatgctacaaagaactttttgtatctataggcatgccctgtggttactggcgtaattgtgctgctgtttatcatagatcctgtatattatgagaataagaaatgagtttatttacctcattcagaaatgtgaggcgaagggactgtaattacctggatctttttttttttttttgagatggagtctcgctctgttgcccaggctggagtacactggcatgatcttggcttactgcaatctgtgcctcccgagttcaagcgattctcgtgcctccgcctcccaagtagctgggactacaggcgcatgccaccatgcacagctaattttttatatttttagtagagatggggttttgccatgttggccaggctggtctcaaactcttgacctcaagtgatctgcccacctcagcctcccaaagtgctggggttacaggcctgagccgccacgcctggccaattacctacatctttttctactgccatattcttttgcctgtgaattgtagttcatctcgtggtttccattattactattcacacgactcccaaatctccagcttctctggctctccactcacatgtgagtctggatttcaaatccatgatgtagccccagaaataaccattttattaagcacccctagtgattttcatgctggcatagagccaaacccagccaactgcttcttgcctgcagagaacactgaggatttcaagtgtgaacaaagtagtgttgctttgttcctggctcagcacctgaaaagaaggtaagcctctgcagttagccctggctccttagtgcattgcagagtggagtctctgcaatggttttattaaaaggatgccttgaagatctggtctctctcaacacacaataagcgagaagagaggctactgaaatacggatgcgtgagctggaattacacactaccttgatgttaacaaggctcatttgcagcaagcaagtgcctatatagggtctgaaatatagacaaaggatggtcccaatcctggaaacagtggaattaaaaggtatggaaaggaacttacccagaaagtaacacttttaaatgttttttcttttcccatagttaaaacaaccagcttagcacttttctttttgagagagaaaaagctttgaatcgtggatgcttctcacagctggctgcaccacgtgcagtgttcaaaaaacaagaacaagctaatcatagagaaccagcagcagctaaacagccctctgcttgcttccaaagggcttataattgagcacagatggtcctagtggagatggggaatgtgtccctgctgactcctcataccccagaggaccaaggggggctcatgaaggctctcagccctgattgtgccctcgtgagggcaaggagctatgctgctgaaggaggaaagggaaaggcaggtggggccagaccctattggccatctgaccagccttcccaagcccacgtgagcagatctagggtctcaagattacagaaggcctggggtgagggagcaagagttggaagttctttatagttgtctgaagagcctcattgtccaactgcaggggcctgaggtgcccaaagcttcgtggaaaagtaatgtcagtggaatgctcagaagtggctcttttcagggcacggcttctgaggagcgtggggccaccacagctagccctccctccgtctagccatcctctccttccagtccctttcccatcttttctctcaaaggagcatggtagtgatcttcattaccaaatttctactccacacttattttaaaaagcttttctgaaagcctggctacatagaattctaaacagatttcagtcaacttttaattagagtcaatgaatggggagtaaatacacagataatccaaaattgatgtaagcattggaaggggaaagagggaacgcttctttccctctgggcttggtcatttcctcccaagcaaaccccgcgacgttcagccgtcttcctcctatgccacgtgctctcaccagaactgcagcaaaactgcattttatgtcctgtgtctaaagctaaacacatgttcctgtctacttttgctttgttcctgtttcccttctgtgaggaccttcccctcctcagatgtggggagttgccgcctccacttgcattacatgtatttcagagtaggtcctaggctccccttacacctctggtcacgttgccattattcctatggtagataaaggggatgagaaagaacagagctccaggcctttttcaaacaaactggttttctcagtatagccctatgctcaaaaggagtgaggacaggtatgtgactgccataaggagctgtttgctttgcacagagaaatctaatctttctcctgctgggcagctcagtacagatgtcccctcactgctggaagaaacacctgcccttgcttgttctcctgatggcccctcacagtcaggtgtgggatggcacatttctaggtgctcctcgccgagctgtcatgggcttcagtcttgggcctctgcagctggctgtgaccaggtggaaactgtagccttggctgacccagagaaggaaaggaggcagtctgccgcttggctgatttaggagttgtgctgaattcctgcccatctgttctcccagctgagccaaggccaaagctgtctaccttttgccaacctaaggaatgacacagagcatggagcaccatcactgaaacatctgccccagtgccctgccaccttcgtcctcactgacctctgcagcctctctcatctgccagttttgattccgcaaggagaggtggccctgggctcacagctggtgtttgtccacagatgttcatgggtttctttgtgttctctcattttttcaaagctgggtgttgggaccaacatcaccactgacattctgtggctctaaacaagtcctcacgaccacttctcagttttctcatctttatgaagtatggagtaatccccactagccttatagagggactgtgtgagaagggaagagactgctattgtttgccctatatccacctacttccctagttccagaacgctggactttaatgagataacaaagtacctagtaaaaacactgcatcattttccatcccccaccccttgcagtaaaatgtggcccatgagacagaagcactaactactgagcaggacttctaggggagttctttaaaactcagaggagcaccacttttaccttctgctcttccctttttcctgcctggaacgcagaagtgatggctgaagctcctgaggctataagctctgtacgtaggagagtggtgaagaaaggagcttggttctgcaaggatgttgtagagctgccataccagtcctgcatggtattcctgtgcactactgttacgtgaacacacaaacacctaatttgtttaagccattaggccaggcctctattagccattcctgactgatacagaagacaaaaatggcatcacagactcctgaactccaaagacactgcctattctttcgtctgttcttggcaagcaccaacattgagactgtacttcagggttgatgctggccatttggtggcgtgaggagtgggcactcacatgtctctgctagcagttctgacgtgtccattccacactggatccatagaacgagggaacacaagtgtcttctcataagatttatagaaacagtgatcgttgcagaaaaataattagcaagagaacagacttcagctctctgaaggctgatgaccacctgtttctcatctcttctagtgtatgtcaaagctaaattaggtcaaataggaaataagtcagaatccccaattcgatagaaacttacaggtcttgtgatctaatctgccacttgatccgtgaattacctataggtcatccctaagaggtggcctccagcttctgcttgaattccttcaaggatggggtgctcattgtggcttttctaatcatctctgattgttagaaacactgtgaaacttttatccatcagtcctgtttctgaagctgtacggtacaaattttttttttccccacttaaggctcaactattggaatacatctaccatgtctcctatgaaacttgcttctccaggccaatcatccttacttccttaaacttttttttttcctgaaaagttattcttttaatcttattaaaaaagcaacccatgcccattccacaaatacaagtgaaatagtgaaaaacaaaaatcaaactacatctatttggtgatcattattaatgtcttatgtttcctcccagattgttttctgcatgaataataaccaacaatgtgtgtgtatgtatatatatgcttttgcattaaaaggtggttttgaaggtaa

SEQ ID NO: 126804 - DNA, 1081 bp, Homo sapiens
  Payload ID: 4860
  Gene Symbol: DHDH
  Gene Name: dihydrodiol dehydrogenase (dimeric)
  Uniprot ID: Q9UQ10
  ENST ID: ENST00000221403
  CDS Start-End: 41-1045
ctggagggaccgaaggtgccgagggctccgcatcgcaaccatggcgctgcgctggggcatcgtgtctgtcggcctcatctccagcgacttcacagccgtgctgcagacgctgcctcgctctgagcaccaggtggtggcggtggcggcccgcgatctgagccgtgcgaaggagtttgcacagaaacacgacatccccaaggcctacggctcctatgaggagctggccaaggacccgagcgtggaggtggcctacattggcacccagcacccccagcacaaggcggcggtgatgctgtgcttggcggcgggcaaggccgttctgtgcgagaagcccacgggcgtgaacgcggcggaagttcgcgagatggtcgcggaggcccgatcccgagccctcttccttatggaggccatctggacccgcttctttcctgcctccgaggctctgaggtctgttttggcccagggaactctaggagacctccgggtggctcgggcagaatttgggaagaatctcatccacgttccccgggccgtagaccgggcccaggctgggggggccctgctggacatcggcatctactgtgtccagttcacctccatggtctttggagggcagaagccagagaagatttctgtcgtgggaaggcgtcatgaaacaggtgtggatgacactgtcacggtgctcctgcagtacccaggggaggtccatggcagcttcacctgcagcatcaccgtgcagctctccaacacggcctccgtgagcggcaccaagggcatggtacagctcctcaacccctgctggtgcccgaccgagctggtggtgaagggggagcataaggagttcccgctgcccccagtcccaaaggactgcaattttgacaacggggcaggcatgagttatgaggccaagcacgtctgggagtgcctacgcaagggtatgaaggaaagtcctgtgattcccctgtcggaaagtgagctcctggctgacatccttgaagaggtgaggaaggccattggagtcaccttcccccaagacaaacgctgatgtatccccgaataaataaagacatcttacatcttc

SEQ ID NO: 126805 - DNA, 776 bp, Homo sapiens
  Payload ID: 4860
  Gene Symbol: DHDH
  Gene Name: dihydrodiol dehydrogenase (dimeric)
  ENST ID: ENST00000522614
  CDS Start-End: 18-746
ggctccgcatcgcaaccatggcgctgcgctggggcatcgtgtctgtcggcctcatctccagcgacttcacagccgtgctgcagacgctgcctcgctctgagcaccaggtggtggcggtggcggcccgcgatctgagccgtgcgaaggagtttgcacagaaacacgacatccccaaggcctacggctcctatgaggagctggccaaggacccgagcgtggaggtggcctacattggcacccagcacccccagcacaaggcggcggtgatgctgtgcttggcggcgggcaaggccgttctgtgcgagaagcccacgggcgtgaacgcggcggaagttcgcgagatggtcgcggaggcccgatcccgagccctcttccttatggaggccatctggacccgcttctttcctgcctccgaggctctgaggtctgttttggcccagggaactctaggagacctccgggtggctcgggcagaatttgggaagaatctcatccacgttccccgggccgtagaccgggcccaggctgggggggccctgctggacatcggcatctactgtgtccagttcacctccatggtctttggagggcagaagccagagaagatttctgtcgtgggaaggcgtcatgaaacaggtatgaaggaaagtcctgtgattcccctgtcggaaagtgagctcctggctgacatccttgaagaggtgaggaaggccattggagtcaccttcccccaagacaaacgctgatgtatccccgaataaataaagacatcttac

SEQ ID NO: 126806 - DNA, 634 bp, Homo sapiens
  Payload ID: 4860
  Gene Symbol: DHDH
  Gene Name: dihydrodiol dehydrogenase (dimeric)
  ENST ID: ENST00000523250
  CDS Start-End: 21-608
gagggctccgcatcgcaaccatggcgctgcgctggggcatcgtgtctgtcggcctcatctccagcgacttcacagccgtgctgcagacgctgcctcgctctgagcaccaggtggtggcggtggcggcccgcgatctgagccgtgcgaaggagtttgcacagaaacacgacatccccaaggcctacggctcctatgaggagctggccaaggacccgagcgtgggtgtggatgacactgtcacggtgctcctgcagtacccaggggaggtccatggcagcttcacctgcagcatcaccgtgcagctctccaacacggcctccgtgagcggcaccaagggcatggtacagctcctcaacccctgctggtgcccgaccgagctggtggtgaagggggagcataaggagttcccgctgcccccagtcccaaaggactgcaattttgacaacggggcaggcatgagttatgaggccaagcacgtctgggagtgcctacgcaagggtatgaaggaaagtcctgtgattcccctgtcggaaagtgagctcctggctgacatccttgaagaggtgaggaaggccattggagtcaccttcccccaagacaaacgctgatgtatccccgaataaataaagacatc

SEQ ID NO: 126807 - DNA, 715 bp, Homo sapiens
  Payload ID: 4860
  Gene Symbol: DHDH
  Gene Name: dihydrodiol dehydrogenase (dimeric)
  ENST ID: ENST00000520557
  CDS Start-End: 1-414
atctccagcgacttcacagccgtgctgcagacgctgcctcgctctgagcaccaggtggtggcggtggcggcccgcgatctgagccgtgcgaaggagtttgcacagaaacacgacatccccaaggcctacggctcctatgaggagctggccaaggacccgagcgtgggccatctggacccgcttctttcctgcctccgaggctctgaggtctgttttggcccagggaactctaggagacctccgggtggctcgggcagaatttgggaagaatctcatccacgttccccgggccgtagaccgggcccaggctgggggggccctgctggacatcggcatctactgtgtccagttcacctccatggtctttggagggcagaagccagagaagatttctgtcgtgggaaggcgtcatgaaacagctcctcaacccctgctggtgcccgaccgagctggtggtgaagggggagcataaggagttcccgctgcccccagtcccaaaggactgcaattttgacaacggggcaggcatgagttatgaggccaagcacgtctgggagtgcctacgcaagggtatgaaggaaagtcctgtgattcccctgtcggaaagtgagctcctggctgacatccttgaagaggtgaggaaggccattggagtcaccttcccccaagacaaacgctgatgtatccccgaataaataaagacatcttacatctt

SEQ ID NO: 126808 - DNA, 3917 bp, Homo sapiens
  Payload ID: 4861
  Gene Symbol: DHFR
  Gene Name: dihydrofolate reductase
  Uniprot ID: P00374
  ENST ID: ENST00000439211
  CDS Start-End: 495-1058
agtcccagacagaacctactatgtgcggcggcagctggggcgggaaggcgggagctgggggcgctgggggcgctgcggccgctgcggccgctgcagccgctgcagcgccagggtccacctggtcggctgcacctgtggaggaggaggtggatttcaggcttcccgtagactggaagaatcggctcaaaaccgcttgcctcgcaggggctgagctggaggcagcgaggccgcccgacgcaggcttccggcgagacatggcagggcaaggatggcagcccggcggcagggcctggcgaggagcgcgagcccgcggccgcagttcccaggcgtctgcgggcgcgagcacgccgcgaccctgcgtgcgccggggcgggggggcggggcctcgcctgcacaaatggggacgaggggggcggggcggccacaatttcgcgccaaacttgaccgcgcgttctgctgtaacgagcgggctcggaggtcctcccgctgctgtcatggttggttcgctaaactgcatcgtcgctgtgtcccagaacatgggcatcggcaagaacggggacctgccctggccaccgctcaggaatgaattcagatatttccagagaatgaccacaacctcttcagtagaaggtaaacagaatctggtgattatgggtaagaagacctggttctccattcctgagaagaatcgacctttaaagggtagaattaatttagttctcagcagagaactcaaggaacctccacaaggagctcattttctttccagaagtctagatgatgccttaaaacttactgaacaaccagaattagcaaataaagtagacatggtctggatagttggtggcagttctgtttataaggaagccatgaatcacccaggccatcttaaactatttgtgacaaggatcatgcaagactttgaaagtgacacgttttttccagaaattgatttggagaaatataaacttctgccagaatacccaggtgttctctctgatgtccaggaggagaaaggcattaagtacaaatttgaagtatatgagaagaatgattaatatgaaggtgttttctagtttaagttgttccccctccctctgaaaaaagtatgtatttttacattagaaaaggttttttgttgactttagatctataattatttctaagcaactagtttttattccccactactcttgtctctatcagataccatttatgagacattcttgctataactaagtgcttctccaagaccccaactgagtccccagcacctgctacagtgagctgccattccacacccatcacatgtggcactcttgccagtccttgacattgtcgggcttttcacatgttggtaatatttattaaagatgaagatccacatacccttcaactgagcagtttcactagtggaaataccaaaagcttcctacgtgtatatccagaggtttgtagataaatgttgccaccttgtttgtaacagtgaaaaattgaaaacaacctggaagtccagtgatgggaaaatgagtatgtttctgtcttagattggggaacccaaagcagattgcaagactgaaatttcagtgaaagcagtgtatttgctaggtcataccagaaatcatcaattgaggtacggagaaactgaactgagaaggtaagaaaagcaatttaaagtcagcgagcaggttctcattgataacaagctccatactgctgagatacagggaaatggaggggggaaagctggagtattgatcccgcccccctccttggttgtcagctccctgtcctgtgtgtgggcggaacatagtccagctgctctatagcaagtctcaggtgtttgcagtaagaagctgctggcatgcacgggaacagtgaatgccaaacacttaaagcaattcgatgtttaagtatgtaagttcttttttttttagacagcgtttcgctcttgttgcccaggctagcatgcaatggtgtgacctcggcttactgcaacctccgccttcccagattcaagcgattctcctgcctcaggctcccaagtagctaggaccaggtgcgcgccaccacgcccggctaatttttgtattttgtatttttagtagagatggggtttcaccatgttggtcaggctagtctcgaactcgtgaccgcaagcgattcacccacctcagcctcccaaagtgctgggattaccggcttgagccaccacacccggcacatcttcattctttttatgtagtaaaaagtataaggccacacatggtttatttgaagtattttataatttaaaaaaatacagaagcaggaaaaccaattataagttcaagtgagggatgatggttgcttgaaccaaagggttgcatgtagtaagaaattgtgatttaagatatattttaaagttataagtagcaggatattctgatggagtttgactttggttttgggcccagggagtttcagatgcctttgagaaatgaatgaagtagagagaaaataaaagaaaaaccagccaggcacagtggctcacacctgtaatcccagcgctttgggaggctaaggcaggcagatcacttgagaccagcttgggcaacatggcaaagccccatctctacaaaaaacacaaaaattagctgggcattgtggcgcacacctgtattcccatctagtcaggaagctgagatggaagaattaattgagcccacgagttcaaggctgcagtgagtcgtgattgtgccactgcactccagccggggtgacagaagagaccttgtctcgaaaaggaatctgaaaacaatggaaccatgccttcataattctagaaagttattttcaactgataaatctatattcacccaaataatcaagggtgaaggtaaaataatacatttttagacaagcaaagactcaggggttacctccatgtgccctttttagggaagctgttggagaaaatactccagcaaaatgaaggagtacacaaaccagagaatgacatgaatccagcaaataggatccaacacaggcaatattccagctatggagctagctttaaaaaggaacagtaaaaatattaatcggttagctgggtggaatggcccatgcctgtagtcccagctactcaggaggctcagcagcaggacgacttgagcccaagagttccagaccagcctggccaccttagtgagatcccttctcttaaaaataataacttattgccagatttggggcatttggaaagaagttcattgaagataaagcaaaagtaaaaaaaaaaaaaaaaaaaacaaggggaaagggttggttaggcaatcattctagggcagaaagaagtacaggataggaagagcataatacactgtttttctcaacaaggagcagtatgtacacagtcataatgatgtgactgcttagcccctaaatatggtaactactctgggacaatatgggaggaaaagtgaagattgtgatggtgtaagagctaaatcctcatctgtcatatccagaaatcactatataatatataataatgaaatgactaagttatgtgaggaaaaaaacagaagacattgctaaaagagttaaaagtcattgctctggagaattaggagggatggggcaggggactgttaggatgcattataaactgaaaagcctttttaaaattttatgtattaatatatgcattcacttgaaaaactaaaaaaaaacaataatttggaaaaacccatgaaggtaactaacggaaggaaaaactaagagaatgaaaagtatttgcctctggaaagaacaactggcaggactgttgttttcattgtaagacttttggagccatttaattgtacttaaccattttcatctatttctttaataagaacaattccatcttaataaagagttacacttgttaataa

SEQ ID NO: 126809 - DNA, 1447 bp, Homo sapiens
  Payload ID: 4861
  Gene Symbol: DHFR
  Gene Name: dihydrofolate reductase
  Uniprot ID: P00374
  ENST ID: ENST00000504396
  CDS Start-End: 176-583
aatttcgcgccaaacttgaccgcgcgttctgctgtaacgagcgggctcggaggtcctcccgctgctgtcatggttggttcgctaaactgcatcgtcgctgtgtcccagaacatgggcatcggcaagaacggggacctgccctggccaccgctcaggtaaacagaatctggtgattatgggtaagaagacctggttctccattcctgagaagaatcgacctttaaagggtagaattaatttagttctcagcagagaactcaaggaacctccacaaggagctcattttctttccagaagtctagatgatgccttaaaacttactgaacaaccagaattagcaaataaagtagacatggtctggatagttggtggcagttctgtttataaggaagccatgaatcacccaggccatcttaaactatttgtgacaaggatcatgcaagactttgaaagtgacacgttttttccagaaattgatttggagaaatataaacttctgccagaatacccaggtgttctctctgatgtccaggaggagaaaggcattaagtacaaatttgaagtatatgagaagaatgattaatatgaaggtgttttctagtttaagttgttccccctccctctgaaaaaagtatgtatttttacattagaaaaggttttttgttgactttagatctataattatttctaagcaactagtttttattccccactactcttgtctctatcagataccatttatgagacattcttgctataactaagtgcttctccaagaccccaactgagtccccagcacctgctacagtgagctgccattccacacccatcacatgtggcactcttgccagtccttgacattgtcgggcttttcacatgttggtaatatttattaaagatgaagatccacatacccttcaactgagcagtttcactagtggaaataccaaaagcttcctacgtgtatatccagaggtttgtagataaatgttgccaccttgtttgtaacagtgaaaaattgaaaacaacctggaagtccagtgatgggaaaatgagtatgtttctgtcttagattggggaacccaaagcagattgcaagactgaaatttcagtgaaagcagtgtatttgctaggtcataccagaaatcatcaattgaggtacggagaaactgaactgagaaggtaagaaaagcaatttaaagtcagcgagcaggttctcattgataacaagctccatactgctgagatacagggaaatggaggggggaaagctggagtattgatcccgcccccctccttggttgtcagctccctgtcctgtgtgtgggcggaacatagtccagctgctctatagcaagtctcaggtgtttgcagtaagaagctgctggcatgcacgggaacagtgaatgccaaacacttaaagcaattcgatgtttaagtatgtaag

SEQ ID NO: 126810 - DNA, 1474 bp, Homo sapiens
  Payload ID: 4861
  Gene Symbol: DHFR
  Gene Name: dihydrofolate reductase
  ENST ID: ENST00000511032
  CDS Start-End: 64-453
gcgccaaacttgaccgcgcgttctgctgtaacgagcgggctcggaggtcctcccgctgctgtcatggttggttcgctaaactgcatcgtcgctgtgtcccagaacatgggcatcggcaagaacggggacctgccctggccaccgctcaggaatgaattcagatatttccagagaatgaccacaacctcttcagtagaaggtaaacagaatctggtgattatgggtaagaagacctggttctccattcctgagaagaatcgacctttaaagggtagaattaatttagttctcagcagagaactcaaggaacctccacaaggagctcattttctttccagaagtctagatgatgccttaaaacttactgaacaaccagaattagcaaataaagtagacatggtctggatagttggtggcagttctgtttataagatacccaggtgttctctctgatgtccaggaggagaaaggcattaagtacaaatttgaagtatatgagaagaatgattaatatgaaggtgttttctagtttaagttgttccccctccctctgaaaaaagtatgtatttttacattagaaaaggttttttgttgactttagatctataattatttctaagcaactagtttttattccccactactcttgtctctatcagataccatttatgagacattcttgctataactaagtgcttctccaagaccccaactgagtccccagcacctgctacagtgagctgccattccacacccatcacatgtggcactcttgccagtccttgacattgtcgggcttttcacatgttggtaatatttattaaagatgaagatccacatacccttcaactgagcagtttcactagtggaaataccaaaagcttcctacgtgtatatccagaggtttgtagataaatgttgccaccttgtttgtaacagtgaaaaattgaaaacaacctggaagtccagtgatgggaaaatgagtatgtttctgtcttagattggggaacccaaagcagattgcaagactgaaatttcagtgaaagcagtgtatttgctaggtcataccagaaatcatcaattgaggtacggagaaactgaactgagaaggtaagaaaagcaatttaaagtcagcgagcaggttctcattgataacaagctccatactgctgagatacagggaaatggaggggggaaagctggagtattgatcccgcccccctccttggttgtcagctccctgtcctgtgtgtgggcggaacatagtccagctgctctatagcaagtctcaggtgtttgcagtaagaagctgctggcatgcacgggaacagtgaatgccaaacacttaaagcaattcgatgtttaagtatgtaagttcttttttttttagacagcgtttcgctcttgttgcccaggctagcatgcaatggtgtgacctcggcttactgcaacctccgccttcccagattcaagc

SEQ ID NO: 126811 - DNA, 1719 bp, Homo sapiens
  Payload ID: 4861
  Gene Symbol: DHFR
  Gene Name: dihydrofolate reductase
  Uniprot ID: P00374
  ENST ID: ENST00000505337
  CDS Start-End: 186-749
gcggccgcagttcccaggcgtctgcgggcgcgagcacgccgcgaccctgcgtgcgccggggcgggggggcggggcctcgcctgcacaaatggggacgaggggggcggggcggccacaatttcgcgccaaacttgaccgcgcgttctgctgtaacgagcgggctcggaggtcctcccgctgctgtcatggttggttcgctaaactgcatcgtcgctgtgtcccagaacatgggcatcggcaagaacggggacctgccctggccaccgctcaggaatgaattcagatatttccagagaatgaccacaacctcttcagtagaaggtaaacagaatctggtgattatgggtaagaagacctggttctccattcctgagaagaatcgacctttaaagggtagaattaatttagttctcagcagagaactcaaggaacctccacaaggagctcattttctttccagaagtctagatgatgccttaaaacttactgaacaaccagaattagcaaataaagtagacatggtctggatagttggtggcagttctgtttataaggaagccatgaatcacccaggccatcttaaactatttgtgacaaggatcatgcaagactttgaaagtgacacgttttttccagaaattgatttggagaaatataaacttctgccagaatacccaggtgttctctctgatgtccaggaggagaaaggcattaagtacaaatttgaagtatatgagaagaatgattaatatgaaggtgttttctagtttaagttgttccccctccctctgaaaaaaataccatttatgagacattcttgctataactaagtgcttctccaagaccccaactgagtccccagcacctgctacagtgagctgccattccacacccatcacatgtggcactcttgccagtccttgacattgtcgggcttttcacatgttggtaatatttattaaagatgaagatccacatacccttcaactgagcagtttcactagtggaaataccaaaagcttcctacgtgtatatccagaggtttgtagataaatgttgccaccttgtttgtaacagtgaaaaattgaaaacaacctggaagtccagtgatgggaaaatgagtatgtttctgtcttagattggggaacccaaagcagattgcaagactgaaatttcagtgaaagcagtgtatttgctaggtcataccagaaatcatcaattgaggtacggagaaactgaactgagaaggtaagaaaagcaatttaaagtcagcgagcaggttctcattgataacaagctccatactgctgagatacagggaaatggaggggggaaagctggagtattgatcccgcccccctccttggttgtcagctccctgtcctgtgtgtgggcggaacatagtccagctgctctatagcaagtctcaggtgtttgcagtaagaagctgctggcatgcacgggaacagtgaatgccaaacacttaaagcaattcgatgtttaagtatgtaagttcttttttttttagacagcgtttcgctcttgttgcccaggctagcatgcaatggtgtgacctcggcttactgcaacctccgccttcccagattcaagcgattctcctgcctcaggctcccaagtagctaggaccaggtgcgcgccaccacgcccggctaatttttgtattttgtatttttagtagagatggggtttcaccatgtt

SEQ ID NO: 126812 - DNA, 3927 bp, Homo sapiens
  Payload ID: 4862
  Gene Symbol: DHFRL1
  Gene Name: dihydrofolate reductase-like 1
  Uniprot ID: Q86XF0
  ENST ID: ENST00000314636
  CDS Start-End: 338-901
gagatactgatttgctcgcgctatagaattcttgtcgaagaggcttagctcccgcgggagatttcgtgcgcagttacttccggtagctggtaaaggctgatacttcccaggacgcggaggtaacgggccagggccaaagcgactttcgctacttggattggtcggcgtagctttgggcggccggaccttagaaagtcacacatctgcgcgcctgtgcggcccctgcttctgcggatgctgaggcacgtaaaaaaatttgaagaagggaatttcgcggcattcttggcctggcttcctggcgtagccagcaagttcggaggtgttaaccgctgctgtcatgtttcttttgctaaactgcatcgtcgctgtgtcccaaaacatgggcatcggcaagaacggggacctgcccaggccgccgctcaggaatgaattcaggtatttccagagaatgaccacaacttcttcagtagagggtaaacagaatctggtgattatgggtaggaagacctggttctccattcctgagaagaatcgacctttaaaggatagaattaatttagttctcagcagagaactcaaggaacctccacaaggagctcattttcttgccagaagtttggatgatgccttaaaacttactgaacgaccagaattagcaaataaagtagacatgatttggatagttggtggcagttctgtttataaggaagccatgaatcacctaggccatcttaaactatttgtgacaaggatcatgcaggactttgaaagtgacacgtttttttcagaaattgacttggagaaatataaacttctgcctgaatacccaggtgttctctctgatgtccaggaggggaaacacatcaagtacaaatttgaagtatgtgagaaggatgattaatatgaaggtgttttctggtttaagttgttccccctccctctgagaaaagtatgcatttttacattagaaaagggacttttgttgacttcagatctatggataattatttctaagcaacgtgtttttattcctcactaatcttggctatatcagataccatttatgaaacattcttgctataactgtctctccaagaccccgactgagtccccagcacctgctacagtgagctgccattccacacccatcacatgtggcactcttgccactccttgacattgtcaggcttttctaatgttggtagtatttattaaagatgaagatgcacatacccttcagctgagcagtttcactagtaggaaataccaaaagcttcgtacatgtatatccagaggtttgtagacaaatgttgcagccttttttgtaacagtgaaaaactgaaaacaacctggaagtccagtgatgggaaaatgaatatatttctgtcttagattggggaacccaaagcagattccaagactgaaatttaagtgaaagcagtttatttgctaggtcataccagaagtcatcaatcgaagtatggagaaatggaactgagaaggtaaaaaccagttcaaaatcagtgaggaggttctcaatggtaacgagctccatactgctgagatacagggaaacggaggggagaaagctagagtatttaacccccactccttggttgtcagctccctgtcctgtgtgtgggcagaacgtactccacctactcaatagcaagttccaggtgtttgctgaaagaagctgctgtaatgtacgggaacggtgaatgccaaacacttaaagcaattccatgtttaagtatgtaaactcttcatacttttttttttttttctttttaagacagaatttcactcttgttgcccaggcggagtgcaatggaacaaccttggctcacggcaacttcagccttcccaggttcaagcaattctcctgcctcaggctcctgggtggctgggactacaggcgcgtgccaccacgccaggctaattttgtatttttggtggggacattccatgttggtcaggctagtctcgaactcctgacctcaggtgatcctcctgcctcggccttcaggggtgctgggattacaggcatcagccactgcacttggcagatcttcattcttttagtaaaaagtataaagccacacatggtttatttgaaatattttataatttaaaaaagtacagaagcaggaaaaccaattctaggttcaagtgagggatgatggtagtttgaaccaaaggattgcatgtggtaagaaattgtgatttaagatatattttaaagttggaagtagcaggatattctgatggagtttgactttggttttgggcccactgagtttgagatgcctttgagaaatgaaagaagtagagagagaattaaaaactggccaggagtggtggctcacgcctgtggtcccagcactttggggggctgaggtgggtggatcacctgagaccagcttgggcaacatggtggagccctgtctctacagaagatacaaaaattggctgggcattgtggcacacacctgtagtctcgtctactcacggggctgagatggaggattcaattgagcccatgagttcaaggctgcagtgagtcgtgattttgccactgcactcctgcctgggtgacagaagagaccctgtctcaaaaaagaatctgaaaacaacggaaccatgccttcagaattctataaagttattttcaactgataaatctatattcaggcaaagaatcaagggtgaaggtaaaataatacatttttagacaagcaaagactcaggggttacatgtaccctttcttgggaagctatcggagaaaatactccagcaaaatgaaggcgtacacaaaccagagaatgacgtggatccagcaaatagtatccaacacaggcaatattccagctatggagctagctttaaaaagaaacagtaaaaatactaatagattagctgggtgggatggcccatgcttgtagtcccagctactcaggaggctaagcaaaaggatggcttgagcccaagagttcagagcagcctggccaccatagtgagatcccttctcttaaaaataataggttattgccagatttggggcatttggaaagaagtgcattgaagataaagcaaaagtaaaaaaaaaaaaaaacaaaaaaaaacaagggggaagggttggttaggcaataattaattctagggcaggaagaagtacaggataggaagtaagagcatcatacgctgtttttctcaacaatgggcaatatgtacatagtcataatgatgtggtgactgactgcttagcccctaaatctggtaactactttgggacaatatggggggaaaagtgaagatagtgatggtgtaagagctaaatcctcatctgtcatatcaagaaatcactatataatgtataacataatcaagaaatgactaagtagttatgtgaagaaaagaatggaacattgctagaagagttagaagtcattgctccagagaattaggagggatggggcaggggactgttaggatgcattataaactgaagaggcttttaaagattacatgtattaatatatgtattcacttgaaaaactaaaaaaatagtaattttttaaaacccatggaggtaactaccagaaggaaaaactaagagaatgaaaagtgctttcctctggaaagaacaagtcgcaggactgttttcattgtaagacttttggagccatttgattttacttaaccattttcatatatttctttaataaaaataattctatcttaataaaaagttacactcattcattaaaaaaagaattttaagactgtaataagaatcatagtttatttctgttagagaaaggcaatgtgttatacttggaaagaggtcatattaattttatcacatttttgggactcagcatctttatattttctgattttaaataaacaactttgcttatgaa

SEQ ID NO: 126813 - DNA, 4038 bp, Homo sapiens
  Payload ID: 4862
  Gene Symbol: DHFRL1
  Gene Name: dihydrofolate reductase-like 1
  Uniprot ID: Q86XF0
  ENST ID: ENST00000394221
  CDS Start-End: 451-1014
atcccagcaccctccctcgccacctcggccgcgtccagaagcgtctcattcagatagaggtacccagccgggccccaggtctcacctgggtcagcattgtcccgctgagagctttcaaacaacaggtgtacgcgaatcagtatcaaaaagcctccagggaactgaaaaaaacagtctgacttccgggattcgcgggcatccactttcattctcacgtttcctcttcaatttctcgcgagatactgatttgctcgcgctatagaattcttgtcgaagaggcttagctcccgcgggagatttcgtgcgcagttacttccggtagctggtaaaggctgatacttcccaggacgcggaggcacgtaaaaaaatttgaagaagggaatttcgcggcattcttggcctggcttcctggcgtagccagcaagttcggaggtgttaaccgctgctgtcatgtttcttttgctaaactgcatcgtcgctgtgtcccaaaacatgggcatcggcaagaacggggacctgcccaggccgccgctcaggaatgaattcaggtatttccagagaatgaccacaacttcttcagtagagggtaaacagaatctggtgattatgggtaggaagacctggttctccattcctgagaagaatcgacctttaaaggatagaattaatttagttctcagcagagaactcaaggaacctccacaaggagctcattttcttgccagaagtttggatgatgccttaaaacttactgaacgaccagaattagcaaataaagtagacatgatttggatagttggtggcagttctgtttataaggaagccatgaatcacctaggccatcttaaactatttgtgacaaggatcatgcaggactttgaaagtgacacgtttttttcagaaattgacttggagaaatataaacttctgcctgaatacccaggtgttctctctgatgtccaggaggggaaacacatcaagtacaaatttgaagtatgtgagaaggatgattaatatgaaggtgttttctggtttaagttgttccccctccctctgagaaaagtatgcatttttacattagaaaagggacttttgttgacttcagatctatggataattatttctaagcaacgtgtttttattcctcactaatcttggctatatcagataccatttatgaaacattcttgctataactgtctctccaagaccccgactgagtccccagcacctgctacagtgagctgccattccacacccatcacatgtggcactcttgccactccttgacattgtcaggcttttctaatgttggtagtatttattaaagatgaagatgcacatacccttcagctgagcagtttcactagtaggaaataccaaaagcttcgtacatgtatatccagaggtttgtagacaaatgttgcagccttttttgtaacagtgaaaaactgaaaacaacctggaagtccagtgatgggaaaatgaatatatttctgtcttagattggggaacccaaagcagattccaagactgaaatttaagtgaaagcagtttatttgctaggtcataccagaagtcatcaatcgaagtatggagaaatggaactgagaaggtaaaaaccagttcaaaatcagtgaggaggttctcaatggtaacgagctccatactgctgagatacagggaaacggaggggagaaagctagagtatttaacccccactccttggttgtcagctccctgtcctgtgtgtgggcagaacgtactccacctactcaatagcaagttccaggtgtttgctgaaagaagctgctgtaatgtacgggaacggtgaatgccaaacacttaaagcaattccatgtttaagtatgtaaactcttcatacttttttttttttttctttttaagacagaatttcactcttgttgcccaggcggagtgcaatggaacaaccttggctcacggcaacttcagccttcccaggttcaagcaattctcctgcctcaggctcctgggtggctgggactacaggcgcgtgccaccacgccaggctaattttgtatttttggtggggacattccatgttggtcaggctagtctcgaactcctgacctcaggtgatcctcctgcctcggccttcaggggtgctgggattacaggcatcagccactgcacttggcagatcttcattcttttagtaaaaagtataaagccacacatggtttatttgaaatattttataatttaaaaaagtacagaagcaggaaaaccaattctaggttcaagtgagggatgatggtagtttgaaccaaaggattgcatgtggtaagaaattgtgatttaagatatattttaaagttggaagtagcaggatattctgatggagtttgactttggttttgggcccactgagtttgagatgcctttgagaaatgaaagaagtagagagagaattaaaaactggccaggagtggtggctcacgcctgtggtcccagcactttggggggctgaggtgggtggatcacctgagaccagcttgggcaacatggtggagccctgtctctacagaagatacaaaaattggctgggcattgtggcacacacctgtagtctcgtctactcacggggctgagatggaggattcaattgagcccatgagttcaaggctgcagtgagtcgtgattttgccactgcactcctgcctgggtgacagaagagaccctgtctcaaaaaagaatctgaaaacaacggaaccatgccttcagaattctataaagttattttcaactgataaatctatattcaggcaaagaatcaagggtgaaggtaaaataatacatttttagacaagcaaagactcaggggttacatgtaccctttcttgggaagctatcggagaaaatactccagcaaaatgaaggcgtacacaaaccagagaatgacgtggatccagcaaatagtatccaacacaggcaatattccagctatggagctagctttaaaaagaaacagtaaaaatactaatagattagctgggtgggatggcccatgcttgtagtcccagctactcaggaggctaagcaaaaggatggcttgagcccaagagttcagagcagcctggccaccatagtgagatcccttctcttaaaaataataggttattgccagatttggggcatttggaaagaagtgcattgaagataaagcaaaagtaaaaaaaaaaaaaaacaaaaaaaaacaagggggaagggttggttaggcaataattaattctagggcaggaagaagtacaggataggaagtaagagcatcatacgctgtttttctcaacaatgggcaatatgtacatagtcataatgatgtggtgactgactgcttagcccctaaatctggtaactactttgggacaatatggggggaaaagtgaagatagtgatggtgtaagagctaaatcctcatctgtcatatcaagaaatcactatataatgtataacataatcaagaaatgactaagtagttatgtgaagaaaagaatggaacattgctagaagagttagaagtcattgctccagagaattaggagggatggggcaggggactgttaggatgcattataaactgaagaggcttttaaagattacatgtattaatatatgtattcacttgaaaaactaaaaaaatagtaattttttaaaacccatggaggtaactaccagaaggaaaaactaagagaatgaaaagtgctttcctctggaaagaacaagtcgcaggactgttttcattgtaagacttttggagccatttgattttacttaaccattttcatatatttctttaataaaaataattctatcttaataaaaagttacactcattcattaaaaaaagaattttaagactgtaataagaatcatagtttatttctgttagagaaaggcaatgtgttatacttggaaagaggtcatattaattttatcacatttttgggactcagcatctttatattttctgattttaaataaacaactttgcttatg

SEQ ID NO: 126814 - DNA, 1831 bp, Homo sapiens
  Payload ID: 4862
  Gene Symbol: DHFRL1
  Gene Name: dihydrofolate reductase-like 1
  Uniprot ID: Q86XF0
  ENST ID: ENST00000461173
  CDS Start-End: 127-690
ggtaaaggctgatacttcccaggacgcggaggcacgtaaaaaaatttgaagaagggaatttcgcggcattcttggcctggcttcctggcgtagccagcaagttcggaggtgttaaccgctgctgtcatgtttcttttgctaaactgcatcgtcgctgtgtcccaaaacatgggcatcggcaagaacggggacctgcccaggccgccgctcaggaatgaattcaggtatttccagagaatgaccacaacttcttcagtagagggtaaacagaatctggtgattatgggtaggaagacctggttctccattcctgagaagaatcgacctttaaaggatagaattaatttagttctcagcagagaactcaaggaacctccacaaggagctcattttcttgccagaagtttggatgatgccttaaaacttactgaacgaccagaattagcaaataaagtagacatgatttggatagttggtggcagttctgtttataaggaagccatgaatcacctaggccatcttaaactatttgtgacaaggatcatgcaggactttgaaagtgacacgtttttttcagaaattgacttggagaaatataaacttctgcctgaatacccaggtgttctctctgatgtccaggaggggaaacacatcaagtacaaatttgaagtatgtgagaaggatgattaatatgaaggtgttttctggtttaagttgttccccctccctctgagaaaagtatgcatttttacattagaaaagggacttttgttgacttcagatctatggataattatttctaagcaacgtgtttttattcctcactaatcttggctatatcagataccatttatgaaacattcttgctataactgtctctccaagaccccgactgagtccccagcacctgctacagtgagctgccattccacacccatcacatgtggcactcttgccactccttgacattgtcaggcttttctaatgttggtagtatttattaaagatgaagatgcacatacccttcagctgagcagtttcactagtaggaaataccaaaagcttcgtacatgtatatccagaggtttgtagacaaatgttgcagccttttttgtaacagtgaaaaactgaaaacaacctggaagtccagtgatgggaaaatgaatatatttctgtcttagattggggaacccaaagcagattccaagactgaaatttaagtgaaagcagtttatttgctaggtcataccagaagtcatcaatcgaagtatggagaaatggaactgagaaggtaaaaaccagttcaaaatcagtgaggaggttctcaatggtaacgagctccatactgctgagatacagggaaacggaggggagaaagctagagtatttaacccccactccttggttgtcagctccctgtcctgtgtgtgggcagaacgtactccacctactcaatagcaagttccaggtgtttgctgaaagaagctgctgtaatgtacgggaacggtgaatgccaaacacttaaagcaattccatgtttaagtatgtaaactcttcatacttttttttttttttctttttaagacagaatttcactcttgttgcccaggcggagtgcaatggaacaaccttggctcacggcaacttcagccttcccagctactcaggaggctaagcaaaaggatggcttgagcccaagagttcagagcagcctggccaccatagtgagatcccttctcttaaaaataataggttattgccagatttggggcatttggaaagaagtgcattgaagataaagcaaaagtaaaaaaaaaaaaaaacaaaaaaa

SEQ ID NO: 126815 - DNA, 591 bp, Homo sapiens
  Payload ID: 4862
  Gene Symbol: DHFRL1
  Gene Name: dihydrofolate reductase-like 1
  ENST ID: ENST00000496983
  CDS Start-End: 249-591
aaaacaaatctcagccctccaagagctggagggagtgggtactagaagtctgcgagctggacggaagggactcagcattacagcactcagcattatttcagggcttgacagtaaagccaaagaaacgctgatctcgcgaggggacgaacaaaggcacgtaaaaaaatttgaagaagggaatttcgcggcattcttggcctggcttcctggcgtagccagcaagttcggaggtgttaaccgctgctgtcatgtttcttttgctaaactgcatcgtcgctgtgtcccaaaacatgggcatcggcaagaacggggacctgcccaggccgccgctcaggaatgaattcaggtatttccagagaatgaccacaacttcttcagtagagggtaaacagaatctggtgattatgggtaggaagacctggttctccattcctgagaagaatcgacctttaaaggatagaattaatttagttctcagcagagaactcaaggaacctccacaaggagctcattttcttgccagaagtttggatgatgccttaaaacttactgaacgaccagaattagcaaataaagtagacatgatttgga

SEQ ID NO: 126816 - DNA, 1802 bp, Homo sapiens
  Payload ID: 4862
  Gene Symbol: DHFRL1
  Gene Name: dihydrofolate reductase-like 1
  Uniprot ID: Q86XF0
  ENST ID: ENST00000619045
  CDS Start-End: 127-690
ggtaaaggctgatacttcccaggacgcggaggcacgtaaaaaaatttgaagaagggaatttcgcggcattcttggcctggcttcctggcgtagccagcaagttcggaggtgttaaccgctgctgtcatgtttcttttgctaaactgcatcgtcgctgtgtcccaaaacatgggcatcggcaagaacggggacctgcccaggccgccgctcaggaatgaattcaggtatttccagagaatgaccacaacttcttcagtagagggtaaacagaatctggtgattatgggtaggaagacctggttctccattcctgagaagaatcgacctttaaaggatagaattaatttagttctcagcagagaactcaaggaacctccacaaggagctcattttcttgccagaagtttggatgatgccttaaaacttactgaacgaccagaattagcaaataaagtagacatgatttggatagttggtggcagttctgtttataaggaagccatgaatcacctaggccatcttaaactatttgtgacaaggatcatgcaggactttgaaagtgacacgtttttttcagaaattgacttggagaaatataaacttctgcctgaatacccaggtgttctctctgatgtccaggaggggaaacacatcaagtacaaatttgaagtatgtgagaaggatgattaatatgaaggtgttttctggtttaagttgttccccctccctctgagaaaagtatgcatttttacattagaaaagggacttttgttgacttcagatctatggataattatttctaagcaacgtgtttttattcctcactaatcttggctatatcagataccatttatgaaacattcttgctataactgtctctccaagaccccgactgagtccccagcacctgctacagtgagctgccattccacacccatcacatgtggcactcttgccactccttgacattgtcaggcttttctaatgttggtagtatttattaaagatgaagatgcacatacccttcagctgagcagtttcactagtaggaaataccaaaagcttcgtacatgtatatccagaggtttgtagacaaatgttgcagccttttttgtaacagtgaaaaactgaaaacaacctggaagtccagtgatgggaaaatgaatatatttctgtcttagattggggaacccaaagcagattccaagactgaaatttaagtgaaagcagtttatttgctaggtcataccagaagtcatcaatcgaagtatggagaaatggaactgagaaggtaaaaaccagttcaaaatcagtgaggaggttctcaatggtaacgagctccatactgctgagatacagggaaacggaggggagaaagctagagtatttaacccccactccttggttgtcagctccctgtcctgtgtgtgggcagaacgtactccacctactcaatagcaagttccaggtgtttgctgaaagaagctgctgtaatgtacgggaacggtgaatgccaaacacttaaagcaattccatgtttaagtatgtaaactcttcatacttttttttttttttctttttaagacagaatttcactcttgttgcccaggcggagtgcaatggaacaaccttggctcacggcaacttcagccttcccagctactcaggaggctaagcaaaaggatggcttgagcccaagagttcagagcagcctggccaccatagtgagatcccttctcttaaaaataataggttattgccagatttggggcatttggaaagaagtgcattgaagataaagc

SEQ ID NO: 126817 - DNA, 1521 bp, Homo sapiens
  Payload ID: 4863
  Gene Symbol: DBT
  Gene Name: dihydrolipoamide branched chain transacylase E2
  ENST ID: ENST00000370131
  CDS Start-End: 1-963
atggctgcagtccgtatgctgagaacctggagcaggaatgcggggaagctgatttgtgttcgctattttcaaacatgtggtaatgttcatgttttgaagccaaattatgtgtgtttctttggttatccttcattcaagtatagtcatccacatcacttcctgaaaacaactgctgctctccgtggacaggttgttcagttcaagctctcagacattggagaagggattagagaagtaactgttaaagaatggtatgtaaaagaaggagatacagtgtctcagtttgatagcatctgtgaagttcaaagtgataaagcttctgttaccatcactagtcgttatgatggagtcattaaaaaactctattataatctagacgatattgcctatgtggggaagccattagtagacatagaaacggaagctttaaaagattcagaagaagatgttgttgaaactcctgcagtgtctcatgatgaacatacacaccaagagataaagggccgaaaaacactggcaactcctgcagttcgccgtctggcaatggaaaacaatattaagctgagtgaagttgttggctcaggaaaagatggcagaatacttaaagaagatatcctcaactatttggaaaagcagacaggagctatattgcctccttcacccaaagttgaaattatgccacctccaccaaagccaaaagacatgactgttcctatactagtatcaaaacctccggtattcacaggcaaagacaaaacagaacccataaaaggctttcaaaaagcaatggtcaagactatgtctgcagccctgaagatacctcattttggttattgtgatgagattgaccttactgaactggttaagctccgagaagaattaaaacccattgcatttgctcgtggaattaaactctcctttatgcctttcttcttaaagtattacttctcatggaaatcttaagatcaacatgtcagtgaggaaatcacctagaatttagacattttctttggaactttggctggtctgtatcattattttgaaaatctccttgatgtttacaagctacctgactactttatcttttattctttaatgattagggtgacctagttccacatggcctgaaggtaacattggcagtaatgtgactaggtacatgtagacttgaaattaaactcagcataaataagagttctctctctccctccttttatacctcttattgtttcaaattctctatcctttctaagttaaaagtactaaaattgcattctttttctgttaaacaggctgcttccttgggattactacagtttcctatccttaacgcttctgtggatgaaaactgccagaatataacatataaggttggctatgcagagtaaaaatgttcttattattaatagaagatggggcaaatgtgcttgtagattagagacttctattgtacctcaaatagtgatcttttttagactagaattaaaggtatggggtaaaacattaaacttaagtctaatt

SEQ ID NO: 126818 - DNA, 10799 bp, Homo sapiens
  Payload ID: 4863
  Gene Symbol: DBT
  Gene Name: dihydrolipoamide branched chain transacylase E2
  Uniprot ID: P11182
  ENST ID: ENST00000370132
  CDS Start-End: 15-1463
atttccggggtaagatggctgcagtccgtatgctgagaacctggagcaggaatgcggggaagctgatttgtgttcgctattttcaaacatgtggtaatgttcatgttttgaagccaaattatgtgtgtttctttggttatccttcattcaagtatagtcatccacatcacttcctgaaaacaactgctgctctccgtggacaggttgttcagttcaagctctcagacattggagaagggattagagaagtaactgttaaagaatggtatgtaaaagaaggagatacagtgtctcagtttgatagcatctgtgaagttcaaagtgataaagcttctgttaccatcactagtcgttatgatggagtcattaaaaaactctattataatctagacgatattgcctatgtggggaagccattagtagacatagaaacggaagctttaaaagattcagaagaagatgttgttgaaactcctgcagtgtctcatgatgaacatacacaccaagagataaagggccgaaaaacactggcaactcctgcagttcgccgtctggcaatggaaaacaatattaagctgagtgaagttgttggctcaggaaaagatggcagaatacttaaagaagatatcctcaactatttggaaaagcagacaggagctatattgcctccttcacccaaagttgaaattatgccacctccaccaaagccaaaagacatgactgttcctatactagtatcaaaacctccggtattcacaggcaaagacaaaacagaacccataaaaggctttcaaaaagcaatggtcaagactatgtctgcagccctgaagatacctcattttggttattgtgatgagattgaccttactgaactggttaagctccgagaagaattaaaacccattgcatttgctcgtggaattaaactctcctttatgcctttcttcttaaaggctgcttccttgggattactacagtttcctatccttaacgcttctgtggatgaaaactgccagaatataacatataaggcttctcataacattgggatagcaatggatactgagcagggtttgattgtccctaatgtgaaaaatgttcagatctgctctatatttgacatcgccactgaactgaaccgcctccagaaattgggctctgtgagtcagctcagcaccactgatcttacaggaggaacatttactctttccaacattggatcaattggtggtacctttgccaaaccagtgataatgccacctgaagtagccattggggcccttggatcaattaaggccattccccgatttaaccagaaaggagaagtatataaggcacagataatgaatgtgagctggtcagctgatcacagagttattgatggtgctacaatgtcacgcttctccaatttgtggaaatcctatttagaaaacccagcttttatgctactagatctgaaatgaagactgataagacattcttgaactttttgagcttccaaagagtatgtaaaccctagctgtgccagcacatgttcatctttacaatttatattgtaaatgatttgtatcgtatgattaaggatctaaggcacaatatttgtcactgttctattagactttttactgaaaatgaataatggtgtaatggttctcctggggctgtcacattttataggtcagagtgtgacttcttaatatggtgctgatgtttttgtgtcaatggcttgaaactggcaagattaacaaaattaggccgggcatggtggctcacgcctgtaatcccagcactttgggaggcccaggtgggcggatcacctgaggttagaagtttgagaccagcctggccaacatggtgaaacctggcctctactaaaaatacaaaaattagccgggtgtggtggtgggtacctataatcccagctacttgggaggctgaggcaggagaatcgcttgaacctgggaggtggaggttgcagtgagctgagatcgtgctattgcactccagcctgggcgacagagcaagacgccatctcaaaaacaaaaaaacaaaattcatgttactaaaagacaggtagccatatacagacagtatatgccctattttttttaactgactcttaatgaaactttaattttacttaattaagaaatggaatttatatacaaaaatattttccatttccgttattatgctaattgttgtatgaaataagtgcaattatacttctcttttgagatatccaagagtatattcttgctctgtatagagaatatcatctgatagtgtcttatttatattaattaatgtctttgaaaagggaaaagtataaactggccttaaaattgtccaattatagttttataaccagtctattaaaggtgtttgtttaaaatggatatagttttagatttgtggtaatgctttggtattttcttggggaagaccttcacctttgcaaacttccctcatgtaaggaaggtactttaaatgtagcagccactgacatttctttttttaaaaaaaatttgagaagtctacttccttttaacttttttggtcttcagctaaaaaataggataagaaattaaggtctattccattctccatatcctgggtaagaatgtaaataagaggagaaggaagagtctaatagtaattatggatataaaaaataagaaattttgtatagaaatgaaggtttcataatgatcattttgttaaaggtctactttaatcagaaatagcaacgagatgaatgtatccaacatttcaatttgcattcggaaatccatgttgtttctaatattgtccagttgaaaactgtatgccaaaattagttgtttaagtgaagttttgtgacagaaaaaaggttgttttaatatctacttggtttttctcaaaatggaaataattttaaaatcaggaaagaataaatcagccaggtgtgatgacttgtaactgtaatcccagttataggggaggctgaagcaggaggatcacttgaggccaggagtttgagaccagcctgggcaacatagtgagatcccatctcaaaaaacattatttttaaaattagcctggtggctcacgcctgtaatcccagcactttgggaggccgaggtggccagatcacctgaggtcaggagttcgagaccaccctggccaacatggtgaaaccccatctctacagttttgtaaaaatacaaaaaattacctgggcctggtggcacacgcctgtagtcccagctacttgggaggctgaggcaggagaattgcttgagcccaagaggtggaggttacagtgagcagagatcacaccactgcactccagcctgggtggcagagcaacactttgtctcagaaaaaaaaaaaaaaaccaaaaagccaagtgtggtggtgtgcacctatagtcccagctactcaggaagctgagacaagaggatcaattgagcccaggagttcaaagctgtagtgagctgtcattgtgccactatcctccagtatgggtgacagagtgagacctggtctctaaaaaataaaataaaataaaaaaaacaggtcaaataaatgctgttgttgtaaaatttcagataatacaaagagttaaccaataaaagaaaaagtcattcataatcttaccactattaacattttgatgtatctatctgtatgtatggctattcttttttgttaaaacatgatcatagcatatctactattttattatttgatttttaaaatttaacattatattatgggtaaccttacatgtcaataaacaattccacattgtcatgctttaaatggctgcataggctgggtgtggtggctcacgcctgtaatcctaccactttgggaggccaaggcaggtagatcacaaggtcaggagttcgagaccagcctggccaatatggtgaaacctcatctctattgaaaatacaaaaatcagccaggcacggtggcaggcgcctgtagtccacctactcgggaggctgaggcaggagaactgcttgaacccagcggcagaggttgcagtgagccaagattgagccactgcactccagcctggtgatagagcgagactctgtctctaaataaataaataaataaataaatgtctgcatagtattccattgtatgcatttattatacattcaaacattaaacatctaccataccaatcatggttctaagcatacagtagccaccttcatgcttccttgattgggcttacagtctagtaaggagacagatattaaataactgcataaaacactgttcttggtaggtaataacccagatgctatgagccatccagtaaaggttaccgatcttatctggaaggatcagaagatggatgtcccataatttaaccaattatctattgataggcatttattgagttttaaatgaataatgacatgatcaataaaaatgtcctcctcacttaaagaatagaaaaaccaggagaagggagttctgaaataagtaagtatgtaggtccagcatcaatggctcaagatactctattcccaaataacccttaagttatctggttctattccaacccttgggtattactatcttctctttggtctcatgcattgagaattcagcaaaggatttgttccctacagtgtgcacggcccttaggatagcaggattccctgaagagggccaaaggggcaggagcgcagccttagtggcagtgctggtccatgaggctctacaaagcaagggatgggtgtttgggaggaggaaaaggctcttgctgtactcctagaggttggaattaaagtggaaaagccagaaaattcaagtcctttactaacatgtctggagattagaaggtatatgtacatgggggagaagccaaaattattgctgcgagtggtcagcaagaaaatcaaggctcttttcattattttgagcattcctctgatatttgaaaaggaagtacaacaggaaaggaagtctgaggatggaagctaaaattggtatgaatttatattttagagatcaaaatgtaccttatgttgaaacctatgtaagaagtgattatgtagaaagagtgaaagtgatagctcttagtctggaaagcccactggcttgtttgggcatttctcatggcttcccactcaaagtggatccccaaaatcacttgatggatttccttgctgatttctaagtaaactatggtttaagaaagaaatgacagggctcagcactgccctacagtaccaagaatacaaatgtttccatgaagtcttcaaaggcatttgtaaaattcaggctgtaagtgattagttagttcattctgcacttatttattaactgtatattcagttccaggctctagggtagagattatggataaaggtgaattagatagatgaagtttttgccctcacagcaaaagctttagccaataattaaagctatcactggaagtgggtctgtgccaataacctagagaagagcagtgcttttagagttgagctatattcccaatcagttcttaatggtggttttacccccttccctctacactgtcttttcttgagattggatcatgtgtgtgaacccacatcatttccagtcaaaatcaccaagagaggccggacacagtggctcatgcctataatcccagcactttgggaggcctaaatgggtgggcctcttgagtccagagtttgagaccagcctgggcgaccccagctctaccaaaaaaaccaaaaaacaaaaaataccaaaaaaaaaaaaaattaggccgatgaagtgacatgcacctgtgtgccacctactcaggaggctgaggtggcaggatcacttgcatctgggggcaaaggctgccgtgagctgagattgtgccattgcgctccagcctgggcgacagagcaagactctgtgtgtgtgtgtgtgtgtgtgtgtgtgtgtgtgtgtgtgtgtgtgtgtgtgtgtgtgtatacacacacacatatatatacacacacccccaggagaccttttgtctttcttggttcatgtgcccatcagtgtgggcaggagaatagaatactctgtccacacttgagtcttagtcacctttggagcctaggagtcagccatcctcattcaactacatggatcgagaatgggaatctgggagaatttttttatgggcagattaaaaaggaagttaactatgtaaagtaaggcattgccttcccaccccatcccacctcagttcgtgttaaattatgaatttttctaagagagttctttaatgacatggatagagaggaagctgaggtggcagtagagtagggagtggaaggcaaatacataagatactattaaactgtgaagctgtttgttacaattccaagattttataatttctccaacaaaaaacatttgtattttcttcccagtttaagttcaatgttaatttgagaaataattctactctcaaacttcatgttatgctgacagttcaactgatgctgtcaaaatgtgaattactaacttcagtattctctattcatctgatttttcttaaaatgtttgcgtgttaatatactcactagctttaatgctctactcttatactggcaccttaattatggtaaaaggtaaaaggttaagttaaaattcccaatcctagttatttggtcaaacagaagattaacagaactccatggcttaccacaggaatatttatcaagagaaaaagaagatacctatttgaatttacatgacactttctgtgaaatatctggattaccagattagtctgaaacaaatgccttccaaattctacagcgcatgcccaaggcactctttacagtacctgttcgggtcttttcttctaattttaagcacctacccaaacgtcttcccaggcttgtcataataagcaaataacctcagagcagacaaagtgattcaatctaagaaccttgaatttctctccttttcacctcaaaatttctattctcacactttctttttgtttctctttccgagaagtggttctccatcagcaaataccaactgttttctgtcctctattatttattccatctcttcctcctgatccctgccccatgttgaacccccattgccccactttgatccttcagtctcttcctcacatccagaactgtaccagatttactcccttagcacactgattaaaatttatttccatttccttatggaggaggtattagagactgatcccagacctctacaaatttcattgtggcagggtaatgttatgtgtccataaaccttgttccttttctttcagcctgcagttaggtagagccatgtcatttatttgtaactattagaatatgggtatatgggttgaagtaatgtaggccatttccagacatggcccataacacttctcaagagattcttcatattctatctcttcccctccaacatgcacccttcaaggttgaagatggcaccacacaagatagaaggagccagtgttccaaatgactaggcagagcagaatgctcccctccctacaccctagcaccaattggtttggatgtgatagttgaataatacacttttattgttttaagacattaatattttgagattaatctgcaagtctagttagtaaaactcgaactctgagctgtctaatgcagtagcctctagccacatgtagctatttaaatttaaattttaattttaattaatcaaaattcaactcagatatactagccacatttcaattgctcagtagccacactaattaaatttaaatttaaatagctacatgtggcttatagcaccataccagatagcacagatgtagactgtttccatcatcacagaaaattctattggatagtgctgccttaactaataagacacaaatgttcttattttttaaatagtccctaaaacaaacgaaaaacaaagaactcccttctctaatggcaaatttcagtttgcctaaaagaagactcagaatgcttttcttatattgttacctctgactgccactaaatgaataaatttcctgtcttgctccttctgccaaacttcttgaatgggtgatctttaactccttgcaatcctggcttttttccccagtgctcacctgtaatcagtgttggccacaactcccacccagatgtctcctaaatagttctctgaacccacctctgtcctgatctacagacattcattccaatgctttagcatttcaaggtcatcaaatgactcagtgacatctcagacagtcagacagaccaggtcaactatgaactatttatgccaaaccttacatggttcatgttatccttgctatcccatcaaaataaccacaggctttttttttttttttttttaatttttgagatggagtctcactctgtcaccccgactagagtgcagtggtgcgatctcggctctgctcactgcaacctccgtctcctgggttcaaacagtgctcattcctcaactcccaagtagctgagattacaggcatgcaccatcacgcctggctaatttttctatttttagcagagatggggtttcgccatgttggccaggctggtctcgaactcctgacctcaagtgatctgcccgcctccacctcacaaagctttgggattacaggcatgagccacggtgcctggcctgcagcctcctttattttacaaaaggcattaccacttaaacactgaagatagcacgaatctctgatgtttgcaagttcagaataaaatggaaatgaaaattcattatgtggcagtctcagtactgagcacaaaggcttttaaccacaagcaaattactgtgctagccagaccgtgtgagagaactccaggccagcttgctaaaactgagcaggagaatttggagagagtccagaggagagccacagaaacaactgaagcatgacaagaataattgcagttctgttatagagaggtcatctatatcaggcttttatggagtaccatgtggaatgttaccacgcagagcatggggaacagctgttgtgactcaacaagagacaggacagaagaaatgagaacaggtggaagatcaataatttaggtttgatatggggaaagatggaacagtcaaagggattcacactgatttttggctgagcagaaggcagagtctcctccaacgggcaatgtaagtgcccccactcatctacaccccgagaagagccatcaaactgtattaaacttggaaaaagctatttaacttcaagtgtgctgcgagaaaacttcataatagttcctaagatgtgctaaaaagtaaagtccaaaaagatcataaagtctgtagagaagttctaagagtgcagtcagctataaaaacctagcaatttaatttcttagaaaaatgtagctggagttcaaactgtagtaacaaaggcaagtaaattaagttgtgggcaggtgtaattaagttaataggaatggcagggatgaatataaatcagaacaggactaacagtttgaaacattagatattcaaatgctcagagctgatgagccgagccactacgctaacaactctgcaaaccaaaggtttcacaaattgcacaagaacctggcctcgatcccattgtgttgctggcataagattagaagggcctgttggttcaattgttgctttggacagaggaggacaaacttgccacagtgaagaaatcatttttaaaaaccaccactgtcctttagtgcactaatttctctaataactaggtgtatattagaaataatgatatataagtgcagtatactccagtttcaacagaatggtgtcacttctgtaaaatgttgattttcagattgtcatactttctaaatacaaaaatttgtcacagcttccacatttacaagatattaaacattccataaaatatttgtagaaatatgaaaaaccaatttttgtagttgccttttgaaatgtatacaaaatatcccacatgggcaacatggtaaaacctcgtctctacaaaaaaaaaaaaaaaaatacaaaaagttagccaggcctggtggtgcacgcctgtggtcccagctactcgggaagctgaagtgagatcacctgtgcccaggaggtcgaagctgcagtgagctgtgattgcaccactgcactccagcctgggtgacagagtgagactttgtctcaaataaacaaaaagagacatatacaaaatatattagaaagttgggttaatatcctacaaacaaagtattacatagtttgcacaggattatgtgtgtaaaaagttttaaattcagtatagcttttatttctgcagaactaaaagtagtgcataaaaataaaagtgggatgagcatatctttttaatttgctatgcagtaaaaagtatctcagtcaacatataggaaaccagtgccatttctgtatcatttgacaccgaaggggtattgttttttgttttgttttgtttttcttttgaagaaagacttttatgtcttttattctattcttccgatttggggtttaaattacccccaataagtttgcagaatattctgattactactgcttaggtgatatatttcatatgagaactatctttacacaatgggaaaaaatatggtaaccacttcattcatcagagaagttgtgttttgtttacttgtattttgtttgctaaatgaaattggttatttagactcatggcatgctttttctcaaatggagatttaaaagtcatttccaatgtccttctaacttctggccaattcccagtaggctatagaataaacagttttcatataatagtc

SEQ ID NO: 126819 - DNA, 3755 bp, Homo sapiens
  Payload ID: 4864
  Gene Symbol: DLD
  Gene Name: dihydrolipoamide dehydrogenase
  Uniprot ID: P09622
  ENST ID: ENST00000205402
  CDS Start-End: 282-1811
agtataagaatacattgtagctcgacattttggcaccagcccctaaagcattcccaccaccacccccgctgcgacaaagccctgcgctccttacgacagcgtacgacgccgagcctgacaggaacgcctcgtgcggtagaaccgcgcgggccaatcgcgctgctcccgggtgatgacgtaggctgcgcctgtgcatgcgcagggaggggagaccttggcggagcggcggaggcgcccagcggaggtgaaagtattggcggaaaggaaaatacagcggaaaaatgcagagctggagtcgtgtgtactgctccttggccaagagaggccatttcaatcgaatatctcatggcctacagggactttctgcagtgcctctgagaacttacgcagatcagccgattgatgctgatgtaacagttataggttctggtcctggaggatatgttgctgctattaaagctgcccagttaggcttcaagacagtctgcattgagaaaaatgaaacacttggtggaacatgcttgaatgttggttgtattccttctaaggctttattgaacaactctcattattaccatatggcccatggaaaagattttgcatctagaggaattgaaatgtccgaagttcgcttgaatttagacaagatgatggagcagaagagtactgcagtaaaagctttaacaggtggaattgcccacttattcaaacagaataaggttgttcatgtcaatggatatggaaagataactggcaaaaatcaagtcactgctacgaaagctgatggcggcactcaggttattgatacaaagaacattcttatagccacgggttcagaagttactccttttcctggaatcacgatagatgaagatacaatagtgtcatctacaggtgctttatctttaaaaaaagttccagaaaagatggttgttattggtgcaggagtaataggtgtagaattgggttcagtttggcaaagacttggtgcagatgtgacagcagttgaatttttaggtcatgtaggtggagttggaattgatatggagatatctaaaaactttcaacgcatccttcaaaaacaggggtttaaatttaaattgaatacaaaggttactggtgctaccaagaagtcagatggaaaaattgatgtttctattgaagctgcttctggtggtaaagctgaagttatcacttgtgatgtactcttggtttgcattggccgacgaccctttactaagaatttgggactagaagagctgggaattgaactagatcccagaggtagaattccagtcaataccagatttcaaactaaaattccaaatatctatgccattggtgatgtagttgctggtccaatgctggctcacaaagcagaggatgaaggcattatctgtgttgaaggaatggctggtggtgctgtgcacattgactacaattgtgtgccatcagtgatttacacacaccctgaagttgcttgggttggcaaatcagaagagcagttgaaagaagagggtattgagtacaaagttgggaaattcccatttgctgctaacagcagagctaagacaaatgctgacacagatggcatggtgaagatccttgggcagaaatcgacagacagagtactgggagcacatattcttggaccaggtgctggagaaatggtaaatgaagctgctcttgctttggaatatggagcatcctgtgaagatatagctagagtctgtcatgcacatccgaccttatcagaagcttttagagaagcaaatcttgctgcgtcatttggcaaatcaatcaacttttgaattagaagattatatatatttttttctgaaatttcctgggagcttttgtagaagtcacattcctgaacaggatattctcacagctccaagaatttctaggactgaattatgaaacttttggaaggtatttaataggtttggacaaaatggaatactcttatatctatattttacataaatttagtattttgtttcagtgcactaatgtgtaagacaaaaagctacttattgtagcatcctggaatatctccgtcaactcatattttcatgctgttcatgaaagattcaatgcccctgaatttaaatagcttttttctctgatacagaaaagttgaattttacatggctggagctagaatttgatatgtgaacagttgtgtttgaagcacagtgatcaagttatttttaatttggttttcacattggaaacaagtcagtcattcagatatgattcaaatgtctataaaccgaactgatgtaagtaaacggtctctcacttgttttatttaacctctaaattctttcattttaggggtagcatttgtgttgaagaggttttaaagcttccattgttgtctgcaactctgaagggtaattatatagttacccaaattaagagagtctatttacggaactcaaatacgtgggcattcaaatgtattacagtggggaatgaagatactgaaataaacgtcttaaatattcatttactggttatcatgagtacgtgttgagatggtcatagttttttttatgactacttctagtgtatattctaatttcttttctaggcctgaatgtatctttattttcatgttataggacaatattaaggcattttaaaggtcatcatcctttcatctattttagatacacctactaaatgtttaatatatacttttggagaagtacaacataagggagtctttaatctgtgttttccttggctgggttaatgactgtttatttaaagagtgttgtaaaattggatgtgtggtgtttaaaatggccatgtcctgaggaaacttaagtaacaaagtactaaatgctaagtaggcttttgcatattgtaactaaatttaagaataattcagattaagtagttctgaaatttggtatagatagcatagattgtctcatgctcatgagtgacataatgaccctggattctgttacatacttctaaagaaaattgattgttgtcttaggaggcagttaacttggctgaacaccaactccacactctgtcttgtttgtaggtggcagcagctgaaatctcttctcagttgttttagctttagctatgctgctggaagtctttcccatgcaagtgtgtagttcaggggtcaaccagagtttgggcagaaggaagtctgccccttctgtgcctcctgttttttgggggtttcccctttatgttccagctgttgtggttgccccatattctgccttctgatccttaaccaataaaacttggcttttgtttccccctcaagtgagaacccgttaaaaatgagacattgagccagtgctgttcactttttaagtgccaacttccctctactttccacttgtttatagttgtttccagtgcctttagttttttctaaaatatatttgttcagagtttgcagttgctatcagcaggagggttggtctgatatctgtgtgctactttgccattattggaagtgaactctgcatctttttaaaaatttgaaatcccggtatcatgtgaagtgctgtttatgtaaatctcaacatatcccttactcagggaaaaaaaagtttttagttagggaatagtgaaatataatttaatatggaattctagctgtagagttaaatccatctttaagtgtttacattcagtatgagaatgcaaatttatctgtatggggaataaagtcctaggaataaaacaagttttaagtgttcacttac

SEQ ID NO: 126820 - DNA, 1859 bp, Homo sapiens
  Payload ID: 4864
  Gene Symbol: DLD
  Gene Name: dihydrolipoamide dehydrogenase
  Uniprot ID: P09622
  ENST ID: ENST00000437604
  CDS Start-End: 78-1463
aggggagaccttggcggagcggcggaggcgcccagcggaggtgaaagtattggcggaaaggaaaatacagcggaaaaatgcagagctggagtcgtgtgtactgctccttggccaagagaggccatttcaatcgaatatctcatggcctacagggactttctgcagtgcctctgagaacttacgcagatcagccgattgatgctgatgtaacagttataggttctggtcctggaggatatgttgctgctattaaagctgcccagttaggcttcaagacagtctgcattgagaaaaatgaaacacttggtggaacatgcttgaatgttggttgtattccttctaaggctttattgaacaactctcattattaccatatggcccatggaaaagattttgcatctagaggaattgaaatgtccgaagttcgcttgaatttagacaagatgatggagcagaagagtactgcagtaaaagctttaacaggtggaattgcccacttattcaaacagaataagatagatgaagatacaatagtgtcatctacaggtgctttatctttaaaaaaagttccagaaaagatggttgttattggtgcaggagtaataggtgtagaattgggttcagtttggcaaagacttggtgcagatgtgacagcagttgaatttttaggtcatgtaggtggagttggaattgatatggagatatctaaaaactttcaacgcatccttcaaaaacaggggtttaaatttaaattgaatacaaaggttactggtgctaccaagaagtcagatggaaaaattgatgtttctattgaagctgcttctggtggtaaagctgaagttatcacttgtgatgtactcttggtttgcattggccgacgaccctttactaagaatttgggactagaagagctgggaattgaactagatcccagaggtagaattccagtcaataccagatttcaaactaaaattccaaatatctatgccattggtgatgtagttgctggtccaatgctggctcacaaagcagaggatgaaggcattatctgtgttgaaggaatggctggtggtgctgtgcacattgactacaattgtgtgccatcagtgatttacacacaccctgaagttgcttgggttggcaaatcagaagagcagttgaaagaagagggtattgagtacaaagttgggaaattcccatttgctgctaacagcagagctaagacaaatgctgacacagatggcatggtgaagatccttgggcagaaatcgacagacagagtactgggagcacatattcttggaccaggtgctggagaaatggtaaatgaagctgctcttgctttggaatatggagcatcctgtgaagatatagctagagtctgtcatgcacatccgaccttatcagaagcttttagagaagcaaatcttgctgcgtcatttggcaaatcaatcaacttttgaattagaagattatatatatttttttctgaaatttcctgggagcttttgtagaagtcacattcctgaacaggatattctcacagctccaagaatttctaggactgaattatgaaacttttggaaggtatttaataggtttggacaaaatggaatactcttatatctatattttacataaatttagtattttgtttcagtgcactaatgtgtaagacaaaaagctacttattgtagcatcctggaatatctccgtcaactcatattttcatgctgttcatgaaagattcaatgcccctgaatttaaatagcttttttctctgatacagaaaagttgaattttacatggctggagctagaatttgatatgtgaacagttgtgtttgaagcacagtgatc

SEQ ID NO: 126821 - DNA, 930 bp, Homo sapiens
  Payload ID: 4864
  Gene Symbol: DLD
  Gene Name: dihydrolipoamide dehydrogenase
  ENST ID: ENST00000451081
  CDS Start-End: 66-413
ggcggagcggcggaggcgcccagcggaggtgaaagtattggcggaaaggaaaatacagcggaaaaatgcagagctggagtcgtgtgtactgctccttggccaagagaggccatttcaatcgaatatctcatggcctacagggactttctgcagtgcctctgagaacttacgcagatcagccgattgatgctgatgtaacagttataggttctggtcctggaggatatgttgctgctattaaagctgcccagttaggcttcaagacagtctgcattgagaaaaatgaaacacttggtggaacatgcttgaatgttggttgtattccttctaaggctttattgaacaactctcattattaccatatggcccatggaaaagattttgcatctagaggaattgaaacattaggttgaaattttccagttggtgagtgaaaaacactgcatattgcttcaagaatttagctaagaactaaagattaattgaacaaattacagtgtccgaagttcgcttgaatttagacaagatgatggagcagaagagtactgcagtaaaagctttaacaggtggaattgcccacttattcaaacagaataaggttgttcatgtcaatggatatggaaagataactggcaaaaatcaagtcactgctacgaaagctgatggcggcactcaggttattgatacaaagaacattcttatagccacgggttcagaagttactccttttcctggaatcacgatgaagatacaatagtgtcatctacaggtgctttatctttaaaaaaagttccagaaaagatggttgttattggtgcaggagtaataggtgtagaattgggttcagtttggcaaagacttggtgcagatgtgacagcagttgaatttttaggtcatgtaggtggagttggaattgatatggagatatct

SEQ ID NO: 126822 - DNA, 2041 bp, Homo sapiens
  Payload ID: 4864
  Gene Symbol: DLD
  Gene Name: dihydrolipoamide dehydrogenase
  Uniprot ID: P09622
  ENST ID: ENST00000417551
  CDS Start-End: 88-1617
atgcgcagggaggggagaccttggcggagcggcggaggcgcccagcggaggtgaaagtattggcggaaaggaaaatacagcggaaaaatgcagagctggagtcgtgtgtactgctccttggccaagagaggccatttcaatcgaatatctcatggcctacagggactttctgcagtgcctctgagaacttacgcagatcagccgattgatgctgatgtaacagttataggttctggtcctggaggatatgttgctgctattaaagctgcccagttaggcttcaagacagtctgcattgagaaaaatgaaacacttggtggaacatgcttgaatgttggttgtattccttctaaggctttattgaacaactctcattattaccatatggcccatggaaaagattttgcatctagaggaattgaaatgtccgaagttcgcttgaatttagacaagatgatggagcagaagagtactgcagtaaaagctttaacaggtggaattgcccacttattcaaacagaataaggttgttcatgtcaatggatatggaaagataactggcaaaaatcaagtcactgctacgaaagctgatggcggcactcaggttattgatacaaagaacattcttatagccacgggttcagaagttactccttttcctggaatcacgatagatgaagatacaatagtgtcatctacaggtgctttatctttaaaaaaagttccagaaaagatggttgttattggtgcaggagtaataggtgtagaattgggttcagtttggcaaagacttggtgcagatgtgacagcagttgaatttttaggtcatgtaggtggagttggaattgatatggagatatctaaaaactttcaacgcatccttcaaaaacaggggtttaaatttaaattgaatacaaaggttactggtgctaccaagaagtcagatggaaaaattgatgtttctattgaagctgcttctggtggtaaagctgaagttatcacttgtgatgtactcttggtttgcattggccgacgaccctttactaagaatttgggactagaagagctgggaattgaactagatcccagaggtagaattccagtcaataccagatttcaaactaaaattccaaatatctatgccattggtgatgtagttgctggtccaatgctggctcacaaagcagaggatgaaggcattatctgtgttgaaggaatggctggtggtgctgtgcacattgactacaattgtgtgccatcagtgatttacacacaccctgaagttgcttgggttggcaaatcagaagagcagttgaaagaagagggtattgagtacaaagttgggaaattcccatttgctgctaacagcagagctaagacaaatgctgacacagatggcatggtgaagatccttgggcagaaatcgacagacagagtactgggagcacatattcttggaccaggtgctggagaaatggtaaatgaagctgctcttgctttggaatatggagcatcctgtgaagatatagctagagtctgtcatgcacatccgaccttatcagaagcttttagagaagcaaatcttgctgcgtcatttggcaaatcaatcaacttttgaattagaagattatatatatttttttctgaaatttcctgggagcttttgtagaagtcacattcctgaacaggatattctcacagctccaagaatttctaggactgaattatgaaacttttggaagcatttgtcttcaacagaatgtcttcagcactttgttttgcctcatctgccctcagttttgcttcagagacctaaatatgaagaataaattacccagggaagactttcattctttctaaaggagaccagaatattggaaatggctcaaaaatgatgttgaaaaactatgtacttggaatcatatgtctgggaaacaactttctcccattcaacaaagtattgtatcttacagactgcaagtattcagtatagagattcctaaacagtattctgatataaatagaactagcatttaaaattt

SEQ ID NO: 126823 - DNA, 1802 bp, Homo sapiens
  Payload ID: 4864
  Gene Symbol: DLD
  Gene Name: dihydrolipoamide dehydrogenase
  ENST ID: ENST00000415325
  CDS Start-End: 88-264
atgcgcagggaggggagaccttggcggagcggcggaggcgcccagcggaggtgaaagtattggcggaaaggaaaatacagcggaaaaatgcagagctggagtcgtgtgtactgctccttggccaagagaggccatttcaatcgaatatctcatggcctacagggactttctgcagtgcctctgagaacttacgcagatcagccgagctttattgaacaactctcattattaccatatggcccatggaaaagattttgcatctagaggaattgaaatgtccgaagttcgcttgaatttagacaagatgatggagcagaagagtactgcagtaaaagctttaacaggtggaattgcccacttattcaaacagaataaggttgttcatgtcaatggatatggaaagataactggcaaaaatcaagtcactgctacgaaagctgatggcggcactcaggttattgatacaaagaacattcttatagccacgggttcagaagttactccttttcctggaatcacgatagatgaagatacaatagtgtcatctacaggtgctttatctttaaaaaaagttccagaaaagatggttgttattggtgcaggagtaataggtgtagaattgggttcagtttggcaaagacttggtgcagatgtgacagcagttgaatttttaggtcatgtaggtggagttggaattgatatggagatatctaaaaactttcaacgcatccttcaaaaacaggggtttaaatttaaattgaatacaaaggttactggtgctaccaagaagtcagatggaaaaattgatgtttctattgaagctgcttctggtggtaaagctgaagttatcacttgtgatgtactcttggtttgcattggccgacgaccctttactaagaatttgggactagaagagctgggaattgaactagatcccagaggtagaattccagtcaataccagatttcaaactaaaattccaaatatctatgccattggtgatgtagttgctggtccaatgctggctcacaaagcagaggatgaaggcattatctgtgttgaaggaatggctggtggtgctgtgcacattgactacaattgtgtgccatcagtgatttacacacaccctgaagttgcttgggttggcaaatcagaagagcagttgaaagaagagggtattgagtacaaagttgggaaattcccatttgctgctaacagcagagctaagacaaatgctgacacagatggcatggtgaagatccttgggcagaaatcgacagacagagtactgggagcacatattcttggaccaggtgctggagaaatggtaaatgaagctgctcttgctttggaatatggagcatcctgtgaagatatagctagagtctgtcatgcacatccgaccttatcagaagcttttagagaagcaaatcttgctgcgtcatttggcaaatcaatcaacttttgaattagaagattatatatatttttttctgaaatttcctgggagcttttgtagaagtcacattcctgaacaggatattctcacagctccaagaatttctaggactgaattatgaaacttttggaaggtatttaataggtttggacaaaatggaatactcttatatctatattttacataaatttagtattttgtttcagtgcactaatgtgtaagacaaaaagctacttattgtagcatcctggaatatctccgtcaactcatattttcatgctgttcatgaaagattcaatgcccctgaatttaaatagcttttttctctgatacagaaaagttg

SEQ ID NO: 126824 - DNA, 682 bp, Homo sapiens
  Payload ID: 4864
  Gene Symbol: DLD
  Gene Name: dihydrolipoamide dehydrogenase
  ENST ID: ENST00000450038
  CDS Start-End: 66-410
ggcggagcggcggaggcgcccagcggaggtgaaagtattggcggaaaggaaaatacagcggaaaaatgcagagctggagtcgtgtgtactgctccttggccaagagaggccatttcaatcgaatatctcatggcctacagggactttctgcagtgcctctgagaacttacgcagatcagccgattgatgctgatgtaacagttataggttctggtcctggaggatatgttgctgctattaaagctgcccagttaggcttcaagacagtctgcattgagaaaaatgaaacacttggtggaacatgcttgaatgttggttgtattccttctaaggctttattgaacaactctcattattaccatatggcccatggaaaagattttgcatctagaggaattgaaaacttataaccatcgtaaagtgttcagaggatatgttatcacagtgggatataatgttttattttggactgcctttttacccaagcattaggttgaaattttccagttggtgagtgaaaaacactgcatattgcttcaagaatttagctaagaactaaagattaattgaacaaattacagtgtccgaagttcgcttgaatttagacaagatgatggagcagaagagtactgcagtaaaagctttaacaggtggaattgcccacttattcaaacagaataag

SEQ ID NO: 126825 - DNA, 1993 bp, Homo sapiens
  Payload ID: 4864
  Gene Symbol: DLD
  Gene Name: dihydrolipoamide dehydrogenase
  ENST ID: ENST00000440410
  CDS Start-End: 79-1539
gaggggagaccttggcggagcggcggaggcgcccagcggaggtgaaagtattggcggaaaggaaaatacagcggaaaaatgcagagctggagtcgtgtgtactgctccttggccaagagaggccatttcaatcgaatatctcatggcctacagggactttctgcagtgcctctgagaacttacgcagatcagccgattgatgctgatgtaacagttataggttctggtcctggaggatatgttgctgctattaaagctgcccagttaggcttcaaggctttattgaacaactctcattattaccatatggcccatggaaaagattttgcatctagaggaattgaaatgtccgaagttcgcttgaatttagacaagatgatggagcagaagagtactgcagtaaaagctttaacaggtggaattgcccacttattcaaacagaataaggttgttcatgtcaatggatatggaaagataactggcaaaaatcaagtcactgctacgaaagctgatggcggcactcaggttattgatacaaagaacattcttatagccacgggttcagaagttactccttttcctggaatcacgatagatgaagatacaatagtgtcatctacaggtgctttatctttaaaaaaagttccagaaaagatggttgttattggtgcaggagtaataggtgtagaattgggttcagtttggcaaagacttggtgcagatgtgacagcagttgaatttttaggtcatgtaggtggagttggaattgatatggagatatctaaaaactttcaacgcatccttcaaaaacaggggtttaaatttaaattgaatacaaaggttactggtgctaccaagaagtcagatggaaaaattgatgtttctattgaagctgcttctggtggtaaagctgaagttatcacttgtgatgtactcttggtttgcattggccgacgaccctttactaagaatttgggactagaagagctgggaattgaactagatcccagaggtagaattccagtcaataccagatttcaaactaaaattccaaatatctatgccattggtgatgtagttgctggtccaatgctggctcacaaagcagaggatgaaggcattatctgtgttgaaggaatggctggtggtgctgtgcacattgactacaattgtgtgccatcagtgatttacacacaccctgaagttgcttgggttggcaaatcagaagagcagttgaaagaagagggtattgagtacaaagttgggaaattcccatttgctgctaacagcagagctaagacaaatgctgacacagatggcatggtgaagatccttgggcagaaatcgacagacagagtactgggagcacatattcttggaccaggtgctggagaaatggtaaatgaagctgctcttgctttggaatatggagcatcctgtgaagatatagctagagtctgtcatgcacatccgaccttatcagaagcttttagagaagcaaatcttgctgcgtcatttggcaaatcaatcaacttttgaattagaagattatatatatttttttctgaaatttcctgggagcttttgtagaagtcacattcctgaacaggatattctcacagctccaagaatttctaggactgaattatgaaacttttggaaggtatttaataggtttggacaaaatggaatactcttatatctatattttacataaatttagtattttgtttcagtgcactaatgtgtaagacaaaaagctacttattgtagcatcctggaatatctccgtcaactcatattttcatgctgttcatgaaagattcaatgcccctgaatttaaatagcttttttctctgatacagaaaagttgaattttacatggctggagctagaatttgatatgtgaacagttgtgtttgaagcacagtgatcaagttatttttaatttggttttcacattggaaacaagtcagtcattcagatatgattc

SEQ ID NO: 126826 - DNA, 4458 bp, Homo sapiens
  Payload ID: 4865
  Gene Symbol: DLAT
  Gene Name: dihydrolipoamide S-acetyltransferase
  Uniprot ID: P10515
  ENST ID: ENST00000280346
  CDS Start-End: 660-2603
acaaacctgaaacgaaatctttgcaaccagtacagcctgcgcggggcgcggcccagtccatcccccttcggatgcgcagaagcagaggtcaccacgccggacccctcgattccctcgcgggcgattcctggctccttcaccaccccagcactccaagacccccgccctttggcctgaggctcccactgccctagccagttcccgggctcacttccagcttttccagaaagcttggccacgcccctcggcccagactctcaggccactcggccgcaattaacccgcgtctctgcgcctttttaggcccctccccctcggtcgtgcccttgtcatctcttaggccccgtctcaccctttcggatgcctcccctagaaccctaccactttccacccctttccgtctgttatttctcccaaacttgcgcccgcacaggcccctctggaacactcctgccccgtagtgcccctcgtccccgctccgtagagaaagagcgtgcgtgccgcgcatttctggcctggggagcgggtggagtaaacctgcgggaaccattttacgacaacgtgcggctgtgcggtgtggctgacggcaacgccgctgctcttggagaggtcactccggagacggcgttggttttggggtgtggggggttggtggcactatgtggcgcgtctgtgcgcgacgggctcagaatgtagccccatgggcgggactcgaggctcggtggacggccttgcaggaggtacccggaactccacgagtgacctcgcgatctggcccggctcccgctcgtcgcaacagcgtgactacagggtatggcggggtccgggcactgtgcggctggacccccagttctggggccacgccgcggaaccgcttactgctgcagcttttggggtcgcccggccgccgctattacagtcttcccccgcatcagaaggttccattgccttctctttcccccacaatgcaggcaggcaccatagcccgttgggaaaaaaaagagggggacaaaatcaatgaaggtgacctaattgcagaggttgaaactgataaagccactgttggatttgagagcctggaggagtgttatatggcaaagatacttgttgctgaaggtaccagggatgttcccatcggagcgatcatctgtatcacagttggcaagcctgaggatattgaggcctttaaaaattatacactggattcctcagcagcacctaccccacaagcggccccagcaccaacccctgctgccactgcttcgccacctacaccttctgctcaggctcctggtagctcatatccccctcacatgcaggtacttcttcctgccctctctcccaccatgaccatgggcacagttcagagatgggaaaaaaaagtgggtgagaagctaagtgaaggagacttactggcagagatagaaactgacaaagccactataggttttgaagtacaggaagaaggttatctggcaaaaatcctggtccctgaaggcacaagagatgtccctctaggaaccccactctgtatcattgtagaaaaagaggcagatatatcagcatttgctgactataggccaaccgaagtaacagatttaaaaccacaagtgccaccacctaccccacccccggtggccgctgttcctccaactccccagcctttagctcctacaccttcagcaccctgcccagctactcctgctggaccaaagggaagggtgtttgttagccctcttgcaaagaagttggcagtagagaaagggattgatcttacacaagtaaaagggacaggaccagatggtagaatcaccaagaaggatatcgactcttttgtgcctagtaaagttgctcctgctccggcagctgttgtgcctcccacaggtcctggaatggcaccagttcctacaggtgtcttcacagatatcccaatcagcaacattcgtcgggttattgcacagcgattaatgcaatcaaagcaaaccatacctcattattacctttctatcgatgtaaatatgggagaagttttgttggtacggaaagaacttaataagatattagaagggagaagcaaaatttctgtcaatgacttcatcataaaagcttcagctttggcatgtttaaaagttcccgaagcaaattcttcttggatggacacagttataagacaaaatcatgttgttgatgtcagtgttgcggtcagtactcctgcaggactcatcacacctattgtgtttaatgcacatataaaaggagtggaaaccattgctaatgatgttgtttctttagcaaccaaagcaagagagggtaaactacagccacatgaattccagggtggcacttttacgatctccaatttaggaatgtttggaattaagaatttctctgctattattaacccacctcaagcatgtattttggcaattggtgcttcagaggataaactggtccctgcagataatgaaaaagggtttgatgtggctagcatgatgtctgttacactcagttgtgatcaccgggtggtggatggagcagttggagcccagtggcttgctgagtttagaaagtaccttgaaaaacctatcactatgttgttgtaactaactcaagaatttctaaactctcccaggtcacactgattcattcttaacaagatatttatatgttattaaacaggtggttctttttattttaaccagttatttttattattgagtctgtccagataagttatttataatgggcattactgaatttttaaaatgccgattacacccaaatattgtgcacatttaataatcagacaccagatttttagctctgtactcctaattaagggacatgtatgtggccttgcctagccctttggtgataagtacttcctctaggaaatgtacgataggtagaattgtggttccctaaagacaagtacataaaggtgaccctgatgaaaccttgaagttctgaaatttaactgcctaaaatgttctccttagatgtgagagaaagagaaatcagaaaaattaattctcttgggggaagggcttgaattgaagctttactttagaatttagccctggtttgaaattttccattacatgatcttggtttatcatcgatgggaagggtagaaaacttcaaggaaaataagtgaaattttaaaagtcagcattttcttagacctcttcagctgattgtttatttttctatgaattcctacacatggttattcccccctacttgagataatctaaatataaaccagctacttgatgtaactgagaatttgtgtggatatttatttaaacaaatgtgtaattttgagtacagaattcaacagttacctccaaaaaagaaacattgttaatataatttaacagaagttgtgaaactaaaattttctaagattaactggtagttcattgtaaatgaacataatgaacagaatttatgactccactgtggaaaatgctatcaaataactaaggaatatatatggaataagtgtacatatgtaaaatattgttactagagttagatatgtgccaaagtccatttatcccaaatcctgtctgaaaaggaggggtacattggtaaacattttggagtgcttaaaaatgccaaaaacaaaatggtaatttctactttgataaagtaaaaaagttaaatgtgtgtaaaaaagtgttctgtgtccttctactccagcatcgtctcatgtaaaataagaaagccctaaaatactattggagagaaaaaattaactaggttgctactttatttgcctaaatacttttttctattttgttagattttgcctttcttttggaaggaaggaggcgatattctggattataaaaatgaattgggaacattatcacaattccagactttctattaatatttatgtgttttaataaacgtttgaaattatttatgactacttaaaatgaatctgaccagtgcttcctggtatatgtaatatgtggagttagcccctgaaatttgctttaagtgtttcagtgttgaatctgtttctaaatattcattattacatggtacacaagtgacactccatatattccacacagacttttaccttgctgtattattatgaaaacaatacattaatttgatttttcagtaattagtaattttaggttgaagattatccaaaagaaacaagcttatcacaagggaccatcatcaatatgatccaaatctggttcaaacattcaaaacttcaaagataattcatctttcgctaatgcttgtggttctgttgttcccttgaaaaaaaataaaaacagttgccttctaataaacattgttgagttaaaaattaatctgagctataatctaaatcgattcagtctcttaccagaactgaaagaaaaaagttagaaatagtgtttttggttcatatgattatttaaaaattaaagtataaatcttcaa

SEQ ID NO: 126827 - DNA, 3517 bp, Homo sapiens
  Payload ID: 4865
  Gene Symbol: DLAT
  Gene Name: dihydrolipoamide S-acetyltransferase
  ENST ID: ENST00000393051
  CDS Start-End: 34-1662
gttggttttggggtgtggggggttggtggcactatgtggcgcgtctgtgcgcgacgggctcagaatgtagccccatgggcgggactcgaggctcggtggacggccttgcaggaggtacccggaactccacgagtgacctcgcgatctggcccggctcccgctcgtcgcaacagcgtgactacagggtatggcggggtccgggcactgtgcggctggacccccagttctggggccacgccgcggaaccgcttactgctgcagcttttggggtcgcccggccgccgctattacagtcttcccccgcatcagaaggttccattgccttctctttcccccacaatgcaggcaggcaccatagcccgttgggaaaaaaaagagggggacaaaatcaatgaaggtgacctaattgcagaggttgaaactgataaagccactgttggatttgagagcctggaggagtgttatatggcaaagatacttgttgctgaaggtaccagggatgttcccatcggagcgatcatctgtatcacagttggcaagcctgaggatattgaggcctttaaaaattatacactggattcctcagcagcacctaccccacaagcggccccagcaccaacccctgctgccactgcttcgccacctacaccttctgctcaggctcctggtagctcatatccccctcacatgcaggtggccgctgttcctccaactccccagcctttagctcctacaccttcagcaccctgcccagctactcctgctggaccaaagggaagggtgtttgttagccctcttgcaaagaagttggcagtagagaaagggattgatcttacacaagtaaaagggacaggaccagatggtagaatcaccaagaaggatatcgactcttttgtgcctagtaaagttgctcctgctccggcagctgttgtgcctcccacaggtcctggaatggcaccagttcctacaggtgtcttcacagatatcccaatcagcaacattcgtcgggttattgcacagcgattaatgcaatcaaagcaaaccatacctcattattacctttctatcgatgtaaatatgggagaagttttgttggtacggaaagaacttaataagatattagaagggagaagcaaaatttctgtcaatgacttcatcataaaagcttcagctttggcatgtttaaaagttcccgaagcaaattcttcttggatggacacagttataagacaaaatcatgttgttgatgtcagtgttgcggtcagtactcctgcaggactcatcacacctattgtgtttaatgcacatataaaaggagtggaaaccattgctaatgatgttgtttctttagcaaccaaagcaagagagggtaaactacagccacatgaattccagggtggcacttttacgatctccaatttaggaatgtttggaattaagaatttctctgctattattaacccacctcaagcatgtattttggcaattggtgcttcagaggataaactggtccctgcagataatgaaaaagggtttgatgtggctagcatgatgtctgttacactcagttgtgatcaccgggtggtggatggagcagttggagcccagtggcttgctgagtttagaaagtaccttgaaaaacctatcactatgttgttgtaactaactcaagaatttctaaactctcccaggtcacactgattcattcttaacaagatatttatatgttattaaacaggtggttctttttattttaaccagttatttttattattgagtctgtccagataagttatttataatgggcattactgaatttttaaaatgccgattacacccaaatattgtgcacatttaataatcagacaccagatttttagctctgtactcctaattaagggacatgtatgtggccttgcctagccctttggtgataagtacttcctctaggaaatgtacgataggtagaattgtggttccctaaagacaagtacataaaggtgaccctgatgaaaccttgaagttctgaaatttaactgcctaaaatgttctccttagatgtgagagaaagagaaatcagaaaaattaattctcttgggggaagggcttgaattgaagctttactttagaatttagccctggtttgaaattttccattacatgatcttggtttatcatcgatgggaagggtagaaaacttcaaggaaaataagtgaaattttaaaagtcagcattttcttagacctcttcagctgattgtttatttttctatgaattcctacacatggttattcccccctacttgagataatctaaatataaaccagctacttgatgtaactgagaatttgtgtggatatttatttaaacaaatgtgtaattttgagtacagaattcaacagttacctccaaaaaagaaacattgttaatataatttaacagaagttgtgaaactaaaattttctaagattaactggtagttcattgtaaatgaacataatgaacagaatttatgactccactgtggaaaatgctatcaaataactaaggaatatatatggaataagtgtacatatgtaaaatattgttactagagttagatatgtgccaaagtccatttatcccaaatcctgtctgaaaaggaggggtacattggtaaacattttggagtgcttaaaaatgccaaaaacaaaatggtaatttctactttgataaagtaaaaaagttaaatgtgtgtaaaaaagtgttctgtgtccttctactccagcatcgtctcatgtaaaataagaaagccctaaaatactattggagagaaaaaattaactaggttgctactttatttgcctaaatacttttttctattttgttagattttgcctttcttttggaaggaaggaggcgatattctggattataaaaatgaattgggaacattatcacaattccagactttctattaatatttatgtgttttaataaacgtttgaaattatttatgactacttaaaatgaatctgaccagtgcttcctggtatatgtaatatgtggagttagcccctgaaatttgctttaagtgtttcagtgttgaatctgtttctaaatattcattattacatggtacacaagtgacactccatatattccacacagacttttaccttgctgtattattatgaaaacaatacattaatttgatttttcagtaattagtaattttaggttgaagattatccaaaagaaacaagcttatcacaagggaccatcatcaatatgatccaaatctggttcaaacattcaaaacttcaaagataattcatctttcgctaatgcttgtggttctgttgttcccttgaaaaaaaataaaaacagttgccttctaataaacattgttgagttaaaaattaatctgagctataatctaaatcgattcagtctcttaccagaactgaaagaaaaaagttagaaatagtgtttttggttcatatgattatttaaaaattaaagtataaatcttcaa

SEQ ID NO: 126828 - DNA, 1766 bp, Homo sapiens
  Payload ID: 4865
  Gene Symbol: DLAT
  Gene Name: dihydrolipoamide S-acetyltransferase
  ENST ID: ENST00000531306
  CDS Start-End: 1-1440
cccgctcgtcgcaacagcgtgactacagggtatggcggggtccgggcactgtgcggctggacccccagttctggggccacgccgcggaaccgcttactgctgcagcttttggggtcgcccggccgccgctattacagtcttcccccgcatcagaaggttccattgccttctctttcccccacaatgcaggcaggcaccatagcccgttgggaaaaaaaagagggggacaaaatcaatgaaggagacttactggcagagatagaaactgacaaagccactataggttttgaagtacaggaagaaggttatctggcaaaaatcctggtccctgaaggcacaagagatgtccctctaggaaccccactctgtatcattgtagaaaaagaggcagatatatcagcatttgctgactataggccaaccgaagtaacagatttaaaaccacaagtgccaccacctaccccacccccggtggccgctgttcctccaactccccagcctttagctcctacaccttcagcaccctgcccagctactcctgctggaccaaagggaagggtgtttgttagccctcttgcaaagaagttggcagtagagaaagggattgatcttacacaagtaaaagggacaggaccagatggtagaatcaccaagaaggatatcgactcttttgtgcctagtaaagttgctcctgctccggcagctgttgtgcctcccacaggtcctggaatggcaccagttcctacaggtgtcttcacagatatcccaatcagcaacattcgtcgggttattgcacagcgattaatgcaatcaaagcaaaccatacctcattattacctttctatcgatgtaaatatgggagaagttttgttggtacggaaagaacttaataagatattagaagggagaagcaaaatttctgtcaatgacttcatcataaaagcttcagctttggcatgtttaaaagttcccgaagcaaattcttcttggatggacacagttataagacaaaatcatgttgttgatgtcagtgttgcggtcagtactcctgcaggactcatcacacctattgtgtttaatgcacatataaaaggagtggaaaccattgctaatgatgttgtttctttagcaaccaaagcaagagagggtaaactacagccacatgaattccagggtggcacttttacgatctccaatttaggaatgtttggaattaagaatttctctgctattattaacccacctcaagcatgtattttggcaattggtgcttcagaggataaactggtccctgcagataatgaaaaagggtttgatgtggctagcatgatgtctgttacactcagttgtgatcaccgggtggtggatggagcagttggagcccagtggcttgctgagtttagaaagtaccttgaaaaacctatcactatgttgttgtaactaactcaagaatttctaaactctcccaggtcacactgattcattcttaacaagatatttatatgttattaaacaggtggttctttttattttaaccagttatttttattattgagtctgtccagataagttatttataatgggcattactgaatttttaaaatgccgattacacccaaatattgtgcacatttaataatcagacaccagatttttagctctgtactcctaattaagggacatgtatgtggccttgcctagccctttggtgataagtacttcctctaggaaatgtacgataggtagaattgtggttccctaaagac

SEQ ID NO: 126829 - DNA, 2118 bp, Homo sapiens
  Payload ID: 4865
  Gene Symbol: DLAT
  Gene Name: dihydrolipoamide S-acetyltransferase
  ENST ID: ENST00000533297
  CDS Start-End: 66-263
gctgctcttggagaggtcactccggagacggcgttggttttggggtgtggggggttggtggcactatgtggcgcgtctgtgcgcgacgggctcagaatgtagccccatgggcgggactcgaggctcggtggacggccttgcaggaggtacccggaactccacgagtgacctcgcgatctggcccggctcccgctcgtcgcaacagcgtgactacagggttccattgccttctctttcccccacaatgcaggcaggcaccatagcccgttgggaaaaaaaagagggggacaaaatcaatgaaggtgacctaattgcagaggttgaaactgataaagccactgttggatttgagagcctggaggagtgttatatggcaaagatacttgttgctgaaggtaccagggatgttcccatcggagcgatcatctgtatcacagttggcaagcctgaggatattgaggcctttaaaaattatacactggattcctcagcagcacctaccccacaagcggccccagcaccaacccctgctgccactgcttcgccacctacaccttctgctcaggctcctggtagctcatatccccctcacatgcaggtacttcttcctgccctctctcccaccatgaccatgggcacagttcagagatgggaaaaaaaagtgggtgagaagctaagtgaaggagacttactggcagagatagaaactgacaaagccactataggttttgaagtacaggaagaaggttatctggcaaaaatcctggtccctgaaggcacaagagatgtccctctaggaaccccactctgtatcattgtagaaaaagaggcagatatatcagcatttgctgactataggccaaccgaagtaacagatttaaaaccacaagtgccaccacctaccccacccccggtggccgctgttcctccaactccccagcctttagctcctacaccttcagcaccctgcccagctactcctgctggaccaaagggaagggtgtttgttagccctcttgcaaagaagttggcagtagagaaagggattgatcttacacaagtaaaagggacaggaccagatggtagaatcaccaagaaggatatcgactcttttgtgcctagtaaagttgctcctgctccggcagctgttgtgcctcccacaggtcctggaatggcaccagttcctacaggtgtcttcacagatatcccaatcagcaacattcgtcgggttattgcacagcgattaatgcaatcaaagcaaaccatacctcattattacctttctatcgatgtaaatatgggagaagttttgttggtacggaaagaacttaataagatattagaagggagaagcaaaatttctgtcaatgacttcatcataaaagcttcagctttggcatgtttaaaagttcccgaagcaaattcttcttggatggacacagttataagacaaaatcatgttgttgatgtcagtgttgcggtcagtactcctgcaggactcatcacacctattgtgtttaatgcacatataaaaggagtggaaaccattgctaatgatgttgtttctttagcaaccaaagcaagagagggtaaactacagccacatgaattccagggtggcacttttacgatctccaatttaggaatgtttggaattaagaatttctctgctattattaacccacctcaagcatgtattttggcaattggtgcttcagaggataaactggtccctgcagataatgaaaaagggtttgatgtggctagcatgatgtctgttacactcagttgtgatcaccgggtggtggatggagcagttggagcccagtggcttgctgagtttagaaagtaccttgaaaaacctatcactatgttgttgtaactaactcaagaatttctaaactctcccaggtcacactgattcattcttaacaagatatttatatgttattaaacaggtggttctttttattttaaccagttatttttattattgagtctgtccagataagttatttataatgggcattactgaatttttaaaatgccgattacacccaaatattgtgcacatttaataatcagacaccagatttttagctctgtactcctaattaa

SEQ ID NO: 126830 - DNA, 1464 bp, Homo sapiens
  Payload ID: 4866
  Gene Symbol: DLST
  Gene Name: dihydrolipoamide S-succinyltransferase (E2 component of 2-oxo-glutarate complex)
  ENST ID: ENST00000238671
  CDS Start-End: 39-242
atatccggtgtccgcccgccctcggctcctccgccgtgatgctgtcccgatcccgctgtgtgtctcgggcgttcagccgctcgctctccgccttccagaaggggaactgccctctagggagacgttccctgcctggggtctccttatgccagggaccaggttaccctaacagcaggaaggttgtcattaacaacagtgtcttcagtgttcgctttttcagaactacagctgtatgcagatgacttggttacagtcaaaaccccagcgtttgcagaatctgtcacagagggagatgtcaggtgggagaaagacatctgtgcaggttccatcaccagcaaatggcgtgattgaagctcttttggtacctgatgggggaaaagtcgaaggaggcactccacttttcacactcaggaaaactggtgctgctcctgctaaggccaagccggctgaagctcctgctgctgcagccccaaaagcagaacctacagcagcggcagttcctccccctgcagcacccatacccactcagatgccaccggtgccctcgccctcacagcctccttctggcaaacctgtgtctgcagtaaaacccactgttgccccaccactagctgagccaggagctggcaaaggtctgcgttcagaacatcgggagaaaatgaacaggatgcggcagcgcattgctcagcgtctgaaggaggcccagaatacatgtgcaatgctgacaacttttaatgagattgacatgagtaacatccaggagatgagggctcggcacaaagaggcttttttgaagaaacataacctcaaactaggcttcatgtcggcatttgtgaaggcctcagcctttgccttgcaggaacagcctgttgtaaatgcagtgattgacgacacaaccaaagaggtggtgtatagggattatattgacatcagtgttgcagtggccaccccacggggtctggtggttccagtcatcaggaatgtggaagctatgaattttgcagatattgaacggaccatcactgaactgggagagaaggcccgaaagaatgaacttgccattgaagatatggatggcggtaccttcaccattagcaatggaggcgtttttggctcgctctttggaacacccattatcaacccccctcagtctgccatcctggggatgcatggcatctttgacaggccagtggctataggaggcaaggtagaggtgcggcccatgatgtacgtggcactgacctatgatcaccggctgattgatggcagagaggctgtgactttcctccgcaaaatcaaggcagcggtagaggatcccagagtcctcctcctggatctttaggaggaacccacacaccctacaagttgatcatgcaggaactgaaaaccagtcttctccctgtcccctcatgggtcccgggttagcctggtgacaggcagacacatgctgttggcctcaagcaa

SEQ ID NO: 126831 - DNA, 2838 bp, Homo sapiens
  Payload ID: 4866
  Gene Symbol: DLST
  Gene Name: dihydrolipoamide S-succinyltransferase (E2 component of 2-oxo-glutarate complex)
  Uniprot ID: P36957
  ENST ID: ENST00000334220
  CDS Start-End: 62-1423
acttccggttgttgtccggccctatatccggtgtccgcccgccctcggctcctccgccgtgatgctgtcccgatcccgctgtgtgtctcgggcgttcagccgctcgctctccgccttccagaaggggaactgccctctagggagacgttccctgcctggggtctccttatgccagggaccaggttaccctaacagcaggaaggttgtcattaacaacagtgtcttcagtgttcgctttttcagaactacagctgtatgcaaggatgacttggttacagtcaaaaccccagcgtttgcagaatctgtcacagagggagatgtcaggtgggagaaagctgttggagacacagttgcagaagatgaagtggtttgtgagattgaaactgacaagacatctgtgcaggttccatcaccagcaaatggcgtgattgaagctcttttggtacctgatgggggaaaagtcgaaggaggcactccacttttcacactcaggaaaactggtgctgctcctgctaaggccaagccggctgaagctcctgctgctgcagccccaaaagcagaacctacagcagcggcagttcctccccctgcagcacccatacccactcagatgccaccggtgccctcgccctcacagcctccttctggcaaacctgtgtctgcagtaaaacccactgttgccccaccactagctgagccaggagctggcaaaggtctgcgttcagaacatcgggagaaaatgaacaggatgcggcagcgcattgctcagcgtctgaaggaggcccagaatacatgtgcaatgctgacaacttttaatgagattgacatgagtaacatccaggagatgagggctcggcacaaagaggcttttttgaagaaacataacctcaaactaggcttcatgtcggcatttgtgaaggcctcagcctttgccttgcaggaacagcctgttgtaaatgcagtgattgacgacacaaccaaagaggtggtgtatagggattatattgacatcagtgttgcagtggccaccccacggggtctggtggttccagtcatcaggaatgtggaagctatgaattttgcagatattgaacggaccatcactgaactgggagagaaggcccgaaagaatgaacttgccattgaagatatggatggcggtaccttcaccattagcaatggaggcgtttttggctcgctctttggaacacccattatcaacccccctcagtctgccatcctggggatgcatggcatctttgacaggccagtggctataggaggcaaggtagaggtgcggcccatgatgtacgtggcactgacctatgatcaccggctgattgatggcagagaggctgtgactttcctccgcaaaatcaaggcagcggtagaggatcccagagtcctcctcctggatctttaggaggaacccacacaccctacaagttgatcatgcaggaactgaaaaccagtcttctccctgtcccctcatgggtcccgggttagcctggtgacaggcagacacatgctgttggcctcaagcaaggaagcagagcactgtgtaaccagcagtcacaggtcttttcttggcgttcctgccaggctctccctctctgcacctgtctcatagcctcgaatatcttaattccttaggcttaagagagagagccttaatggatgctcattcatattcctgcctttcttccatcagctctctgcaaagatgattttgcttttccctagtgctggtatactatagagaaacccctggggaccatgtgattaagttcctatcttttgaaagtttgttctgcagagacttctaggaggatgctgtgcctcccaagctcagagcagcctctgtcctggctgtgcacattctcccttgattccacttgtgtggagggattgaacacaggcaaagaggtgctgctttgcttcttcaatggcaccttcattctccgttgtcattgacttcaagatgcctcttctacctcttccaggaagcacaggccaggggatctgggtgtgtgagtgggaggagagggcagaggtcccctgaggtcatgcattgtaatcatcatagaaggagagcccaggcctgccctcacgctctccatcataggctgacaccaagaagactcgtcttggcacaatctcacacagctggggctgtagcaaccctttccaacccctttgctggttgctgggcctcattctagcaccttgttcttagagcagattctagcacatcatggcagtgggaccaagcgtggtcccgaggaagggccagagcctggtagagactagggaagggaggtctcctctagactgactcacattgccttgagcttttcagttaagttgctgtaagcacctgggctgaggaggcagtttttgttccttcctgcgttatagcggggccttgtctcttcctctgcaggacacagatctggaggacgtggactggggtaggaaaccaccctgagggtgttagtacctagtggtgaaacggatgaggtcatttctaaggtgtgttgcccgtggatctgggcacaatcattggaattccttggagccactgggattcatggctttgtatccaactgcatccaggcctgaggctgctgacgtttgacaccagggccagtagagagtgcccttttgtatcttaagccaagaagtgaggcctgggggtgggggaggggggaaggggtgggagccaatactgagtgcctgcagcatctactactctgtcttcactattcagaacttgtaactaaagtatttaaagaaactgattttaaatgcaaattaaagggcagatattctcaaaca

SEQ ID NO: 126832 - DNA, 563 bp, Homo sapiens
  Payload ID: 4866
  Gene Symbol: DLST
  Gene Name: dihydrolipoamide S-succinyltransferase (E2 component of 2-oxo-glutarate complex)
  ENST ID: ENST00000556460
  CDS Start-End: 64-378
ccacttccggttgttgtccggccctatatccggtgtccgcccgccctcggctcctccgccgtgatgctgtcccgatcccgctgtgtgtctcgggcgttcagccgctcgctctccgccttccagaaggggaactgccctctagggagacgttccctgcctggggtctccttatgccagggaccaggttaccctaacagcaggaaggttgtcattaacaacagtgtcttcagtgttcgctttttcagaactacagctgtatgcaaggatgacttggttacagtcaaaaccccagcgtttgcagaatctgtcacagagggagatgtcaggtgggagaaagacatctgtgcaggttccatcaccagcaaatggcgtgattgaagctcttttggtacctgatgggggaaaagtcgaaggaggcactccacttttcacactcaggaaaactggtgctgctcctgctaaggccaagccggctgaagctcctgctgctgcagccccaaaagcagaacctacagcagcggcagttcctccccctgcagcacccatacccactcagatgccac

SEQ ID NO: 126833 - DNA, 718 bp, Homo sapiens
  Payload ID: 4866
  Gene Symbol: DLST
  Gene Name: dihydrolipoamide S-succinyltransferase (E2 component of 2-oxo-glutarate complex)
  ENST ID: ENST00000555988
  CDS Start-End: 1-224
gggtctccttatgccagggaccaggttaccctaacagcaggaaggttgtcattaacaacagtgtcttcagtgttcgctttttcagaactacagctgtatgcaaggatgacttggttacagtcaaaaccccagcgtttgcagaatctgtcacagagggagatgtcaggtgggagaaagcctttgattgtcttttcagctgttggagacacagttgcagaagatgaagtggtttgtgagattgaaactgacaagacatctgtgcaggttccatcaccagcaaatggcgtgattgaagctcttttggtacctgatgggggaaaagtcgaaggaggcactccacttttcacactcaggaaaactggtggtaaagaagttctcctggtggtcaagctgctcctgctaaggccaagccggctgaagctcctgctgctgcagccccaaaagcagaacctacagcagcggcagttcctccccctgcagcacccatacccactcagatgccaccggtgccctcgccctcacagcctccttctggcaaacctgtgtctgcagtaaaacccactgttgccccaccactagctgagccaggagctggcaaaggtctgcgttcagaacatcgggagaaaatgaacaggatgcggcagcgcattgctcagcgtctgaaggaggcccagaatacatgtgcaatgctgacaacttttaatgagattgacatgag

SEQ ID NO: 126834 - DNA, 1479 bp, Homo sapiens
  Payload ID: 4866
  Gene Symbol: DLST
  Gene Name: dihydrolipoamide S-succinyltransferase (E2 component of 2-oxo-glutarate complex)
  ENST ID: ENST00000554612
  CDS Start-End: 40-153
tatatccggtgtccgcccgccctcggctcctccgccgtgatgctgtcccgatcccgctgtgtgtctcgggcgttcagccgctcgctctccgccttccagaaggggtctccttatgccagggaccaggttaccctaacagcaggaaggttgtaggatgacttggttacagtcaaaaccccagcgtttgcagaatctgtcacagagggagatgtcaggtgggagaaagacatctgtgcaggttccatcaccagcaaatggcgtgattgaagctcttttggtacctgatgggggaaaagtcgaaggaggcactccacttttcacactcaggaaaactggtgctgctcctgctaaggccaagccggctgaagctcctgctgctgcagccccaaaagcagaacctacagcagcggcagttcctccccctgcagcacccatacccactcagatgccaccggtgccctcgccctcacagcctccttctggcaaacctgtgtctgcagtaaaacccactgttgccccaccactagctgagccaggagctggcaaaggtctgcgttcagaacatcgggagaaaatgaacaggatgcggcagcgcattgctcagcgtctgaaggaggcccagaatacatgtgcaatgctgacaacttttaatgagattgacatgagtaacatccaggagatgagggctcggcacaaagaggcttttttgaagaaacataacctcaaactaggcttcatgtcggcatttgtgaaggcctcagcctttgccttgcaggaacagcctgttgtaaatgcagtgattgacgacacaaccaaagaggtggtgtatagggattatattgacatcagtgttgcagtggccaccccacggggtctggtggttccagtcatcaggaatgtggaagctatgaattttgcagatattgaacggaccatcactgaactgggagagaaggcccgaaagaatgaacttgccattgaagatatggatggcggtaccttcaccattagcaatggaggcgtttttggctcgctctttggaacacccattatcaacccccctcagtctgccatcctggggatgcatggcatctttgacaggccagtggctataggaggcaaggtagaggtgcggcccatgatgtacgtggcactgacctatgatcaccggctgattgatggcagagaggctgtgactttcctccgcaaaatcaaggcagcggtagaggatcccagagtcctcctcctggatctttaggaggaacccacacaccctacaagttgatcatgcaggaactgaaaaccagtcttctccctgtcccctcatgggtcccgggttagcctggtgacaggcagacacatgctgttggcctcaagcaaggaagcagagcactgtgtaaccagcagtcacaggtcttttcttggcgttcctgccaggctctccctctctgcacctgtctcatagcctcgaatatctta

SEQ ID NO: 126835 - DNA, 837 bp, Homo sapiens
  Payload ID: 4866
  Gene Symbol: DLST
  Gene Name: dihydrolipoamide S-succinyltransferase (E2 component of 2-oxo-glutarate complex)
  ENST ID: ENST00000554806
  CDS Start-End: 1-837
gctgtcccgatcccgctgtgtgtctcgggcgttcagccgctcgctctccgccttccagaaggggaactgccctctagggagacgttccctgcctgcattaacaacagtgtcttcagtgttcgctttttcagaactacagctgtatgcaaggatgacttggttacagtcaaaaccccagcgtttgcagaatctgtcacagagggagatgtcaggtgggagaaagctgttggagacacagttgcagaagatgaagtggtttgtgagattgaaactgacaagacatctgtgcaggttccatcaccagcaaatggcgtgattgaagctcttttggtacctgatgggggaaaagtcgaaggaggcactccacttttcacactcaggaaaactggtgctgctcctgctaaggccaagccggctgaagctcctgctgctgcagccccaaaagcagaacctacagcagcggcagttcctccccctgcagcacccatacccactcagatgccaccggtgccctcgccctcacagcctccttctggcaaacctgtgtctgcagtaaaacccactgttgccccaccactagctgagccaggagctggcaaaggtctgcgttcagaacatcgggagaaaatgaacaggatgcggcagcgcattgctcagcgtctgaaggaggcccagaatacatgtgcaatgctgacaacttttaatgagattgacatgagtaacatccaggagatgagggctcggcacaaagaggcttttttgaagaaacataacctcaaactaggcttcatgtcggcatttgtgaaggcctcagcctttgccttgcaggaacagcct

SEQ ID NO: 126836 - DNA, 569 bp, Homo sapiens
  Payload ID: 4866
  Gene Symbol: DLST
  Gene Name: dihydrolipoamide S-succinyltransferase (E2 component of 2-oxo-glutarate complex)
  ENST ID: ENST00000555492
  CDS Start-End: 52-384
gttgtccggccctatatccggtgtccgcccgccctcggctcctccgccgtgatgctgtcccgatcccgctgtgtgtctcgggcgttcagccgctcgctctccgccttccagaaggggtctccttatgccagggaccaggttaccctaacagcaggaaggttgtcattaacaacagtgtcttcagtgttcgctttttcagaactacagctgtatgcaaggatgacttggttacagtcaaaaccccagcgtttgcagaatctgtcacagagggagatgtcaggtgggagaaagctgttggagacacagttgcagaagatgaagtggtttgtgagattgaaactgacaagacatctgtgcaggttccatcaccagcaaatggcgtgattgaagctcttttggtacctgatgggggaaaagtcgaaggaggcactccacttttcacactcaggaaaactggtgctgctcctgctaaggccaagccggctgaagctcctgctgctgcagccccaaaagcagaacctacagcagcggcagttcctccccctgcagcacccatacccactcagatg

SEQ ID NO: 126837 - DNA, 1078 bp, Homo sapiens
  Payload ID: 4866
  Gene Symbol: DLST
  Gene Name: dihydrolipoamide S-succinyltransferase (E2 component of 2-oxo-glutarate complex)
  ENST ID: ENST00000555089
  CDS Start-End: 14-265
ctcctccgccgtgatgctgtcccgatcccgctgtgtgtctcgggcgttcagccgctcgctctccgccttccagaaggggaactgccctctagggagacgttccctgcctgcattaacaacagtgtcttcagtgttcgctttttcagaactacagctgtatgcagatgacttggttacagtcaaaaccccagcgtttgcagaatctgtcacagagggagatgtcaggtgggagaaaggttccatcaccagcaaatggcgtgattgaagctcttttggtacctgatgggggaaaagtcgaaggaggcactccacttttcacactcaggaaaactggtgctgctcctgctaaggccaagccggctgaagctcctgctgctgcagccccaaaagcagaacctacagcagcggcagttcctccccctgcagcacccatacccactcagatgccaccggtgccctcgccctcacagcctccttctggcaaacctgtgtctgcagtaaaacccactgttgccccaccactagctgagccaggagctggcaaaggtctgcgttcagaacatcgggagaaaatgaacaggatgcggcagcgcattgctcagcgtctgaaggaggcccagaatacatgtgcaatgctgacaacttttaatgagattgacatgagtaacatccaggagatgagggctcggcacaaagaggcttttttgaagaaacataacctcaaactaggcttcatgtcggcatttgtgaaggcctcagcctttgccttgcaggaacagcctgttgtaaatgcagtgattgacgacacaaccaaagaggtggtgtatagggattatattgacatcagtgttgcagtggccaccccacggggtctggtggttccagtcatcaggaatgtggaagctatgaattttgcagatattgaacggaccatcactgaactgggagagaaggcccgaaagaatgaacttgccattgaagatatggatggcggtaccttcaccattagcaatggaggcgtttttggctcgctctttggaacacccattatcaacccccctcagtctgccatcctggg

SEQ ID NO: 126838 - DNA, 252 bp, Homo sapiens
  Payload ID: 4866
  Gene Symbol: DLST
  Gene Name: dihydrolipoamide S-succinyltransferase (E2 component of 2-oxo-glutarate complex)
  ENST ID: ENST00000626051
  CDS Start-End: 1-252
atgctgtcccgatcccgctgtgtgtctcgggcgttcagccgctcgctctccgccttccagaaggggaactgccctctagggagacgttccctgcctgcattaacaacagtgtcttcagtgttcgctttttcagaactacagctgtatgcagatgacttggttacagtcaaaaccccagcgtttgcagaatctgtcacagagggagatgtcaggtgggagaaaggttccatcaccagcaaatggcgtgattga

SEQ ID NO: 126839 - DNA, 2426 bp, Homo sapiens
  Payload ID: 4867
  Gene Symbol: DHODH
  Gene Name: dihydroorotate dehydrogenase (quinone)
  Uniprot ID: Q02127
  ENST ID: ENST00000219240
  CDS Start-End: 22-1209
gggcttaatgacggaaggagcatggcgtggagacacctgaaaaagcgggcccaggatgctgtgatcatcctggggggaggaggacttctcttcgcctcctacctgatggccacgggagatgagcgtttctatgctgaacacctgatgccgactctgcaggggctgctggacccggagtcagcccacagactggctgttcgcttcacctccctggggctccttccacgggccagatttcaagactctgacatgctggaagtgagagttctgggccataaattccgaaatccagtaggaattgctgcaggatttgacaagcatggggaagccgtggacggactttataagatgggctttggttttgttgagataggaagtgtgactccaaaacctcaggaaggaaaccctagacccagagtcttccgcctccctgaggaccaagctgtcattaacaggtatggatttaacagtcacgggctttcagtggtggaacacaggttacgggccagacagcagaagcaggccaagctcacagaagatggactgcctctgggggtcaacttggggaagaacaagacctcagtggacgccgcggaggactacgcagaaggggtgcgcgtactgggccccctggccgactacctggtggtgaatgtgtccagccccaacactgccgggctgcggagccttcagggaaaggccgagctgcgccgcctgctgaccaaggtgctgcaggagagggatggcttgcggagagtgcacaggccggcagtcctggtgaagatcgctcctgacctcaccagccaggataaggaggacattgccagtgtggtcaaagagttgggcatcgatgggctgattgttacgaacaccaccgtgagtcgccctgcgggcctccagggtgccctgcgctctgaaacaggagggctgagtgggaagcccctccgggatttatcaactcaaaccattcgggagatgtatgcactcacccaaggccgagttcccataattggggttggtggtgtgagcagcgggcaggacgcgctggagaagatccgggcaggggcctccctggtgcagctgtacacggccctcaccttctgggggccacccgttgtgggcaaagtcaagcgggaactggaggcccttctgaaagagcagggctttggcggagtcacagatgccattggagcagatcatcggaggtgaggacagcgtctgacgggaagcctgatctggaaccttcccaaggactcaggcaagcctttgtggctggatcatgagaggagggactccatcttgagccatgtcccccagccatggcatggctgcactgtaaacgccaatcggggggtcaccaggatcaaccgcaggctttcttcagtcccttggtcagaccataaactgcatttttgattctttgtggattcaaaccctaggatccatcagtcttgcaaggacattgaatattaggaggaaaaagtcatggaaaaaataaagccatttagaacctgggtttcaacgctagccctttctggtttgccataggccctgccaagatactgcaggtccatccaggcctctgctatctgcatctgcagtgggcttcccaggaacttgactgtctttcatttgatctttatttttgtttatttaatattttaaactttattttaaaaatatttcaaacataagggcggggtgtggtggctcatgcctgtaatcccagcactttgggaggccgaggcgggcggatcacctgaggccaggagttggagaccagccaggccaccatggtgaaaccctgtctctaccaaaaatacaaaaaattagccagatattgtggcaggcacttttaatcccagctactcgggaggctgaggcaggagaattgcttgaacctgggaggcggaggttgcagtgagccaagattgcaccagtgcactccagcttgggcgacagatcaagactctgtcacacacaaaacaaacaaacaaattttcccgtttctctctgtccctttctctataacatggataaaatattcacgtcttatgtatttattattgctgagtcattggtgccttattcttcagtgtttcagtctgtatctcctaagcatcctgatgttagttttttgactataaaattgacctgcattctttactagcaattcaaacggtacagcactcttgaagtgtaaacattcctgttcctcctcaccccactctgcagacatgcctttctgtctgtcctcccagacttttcccctgcataaagatgttcattttgtacatacactcagacatacatgtggctgtattttttgtataccgatttctggatggaatgcacactgttatctgtttagttactttatgttttcatacaaatgacatcatcccacaaatagaattctgccattt

SEQ ID NO: 126840 - DNA, 607 bp, Homo sapiens
  Payload ID: 4867
  Gene Symbol: DHODH
  Gene Name: dihydroorotate dehydrogenase (quinone)
  ENST ID: ENST00000574309
  CDS Start-End: 1-581
cgtggagacacctgaaaaagcgggcccaggatgctgtgatcatcctggggggaggaggacttctcttcgcctcctacctgatggccacgggagatgagcgtttctatgctgaacacctgatgccgactctgcaggggctgctggacccggagtcagcccacagactggctgttcgcttcacctccctggggctccttccacgggccagatttcaagactctgacatgctggaagtgagagttctgggccataaattccgaaatccagtaggaattgctgcaggatttgacaagcatggggaagccgtggacggactttataagatgggctttggttttgttgagataggaagtgtgactccaaaacctcaggaaggaaaccctagacccagagtcttccgcctccctgaggaccaagctgtcattaacaggtatggatttaacagtcacgggctttcagtggtggaacacaggttacgggccagacagcagaagcaggccaagctcacagaagagagcagggctttggcggagtcacagatgccattggagcagatcatcggaggtgaggacagcgtctgacgggaagcctgatctggaaccttccc

SEQ ID NO: 126841 - DNA, 4824 bp, Homo sapiens
  Payload ID: 4867
  Gene Symbol: DHODH
  Gene Name: dihydroorotate dehydrogenase (quinone)
  ENST ID: ENST00000572887
  CDS Start-End: 178-1359
gtgcacccaaccagaacctgggggtggtgccgggccttccccgctgcgcggaggcgtcctctcaacccttctgcccggcgactggtgggttggcggctaaggggcggagacaagaggggccgccaccatctcctccaatggaagggagacaggggcgggcttaatgacggaaggagcatggcgtggagacacctgaaaaagcgggcccaggatgctgtgatcatcctggggggaggaggacttctcttcgcctcctacctgatggccacgggagatgagcgtttctatgctgaacacctgatgccgactctgcaggggctgctggacccggagtcagcccacagactggctgttcgcttcacctccctggggctccttccacgggccagatttcaagactctgacatgctggaagtgagagttctgggccataaattccgaaatccagtaggaattgctgcaggatttgacaagcatggggaagccgtggacggactttataagatgggctttggttttgttgagataggaagtgtgactccaaaacctcaggaaggaaaccctagacccagagtcttccgcctccctgaggaccaagctgtcattaacaggtatggatttaacagtcacgggctttcagtggtggaacacaggttacgggccagacagcagaagcaggccaagctcacagaagatggactgcctctgggggtcaacttggggaagaacaagacctcagtggacgccgcggaggactacgcagaaggggtgcgcgtactgggccccctggccgactacctggtggtgaatgtgtccagccccaacactgccgggctgcggagccttcagggaaaggccgagctgcgccgcctgctgaccaaggtgctgcaggagagggatggcttgcggagagtgcacaggccggcagtcctggtgaagatcgctcctgacctcaccagccaggataaggaggacattgccagtgtggtcaaagagttgggcatcgatgggctgattgttacgaacaccaccgtgagtcgccctgcgggcctccagggtgccctgcgctctgaaacaggagggctgagtgggaagcccctccgggatttatcaactcaaaccattcgggagatgtatgcactcacccaagttcccataattggggttggtggtgtgagcagcgggcaggacgcgctggagaagatccgggcaggggcctccctggtgcagctgtacacggccctcaccttctgggggccacccgttgtgggcaaagtcaagcgggaactggaggcccttctgaaagagcagggctttggcggagtcacagatgccattggagcagatcatcggaggtgaggacagcgtctgacgggaagcctgatctggaaccttcccaaggactcaggcaagcctttgtggctggatcatgagaggagggactccatcttgagccatgtcccccagccatggcatggctgcactgtaaacgccaatcggggggtcaccaggatcaaccgcaggctttcttcagtcccttggtcagaccataaactgcatttttgattctttgtggattcaaaccctaggatccatcagtcttgcaaggacattgaatattaggaggaaaaagtcatggaaaaaataaagccatttagaacctgggtttcaacgctagccctttctggtttgccataggccctgccaagatactgcaggtccatccaggcctctgctatctgcatctgcagtgggcttcccaggaacttgactgtctttcatttgatctttatttttgtttatttaatattttaaactttattttaaaaatatttcaaacataagggcggggtgtggtggctcatgcctgtaatcccagcactttgggaggccgaggcgggcggatcacctgaggccaggagttggagaccagccaggccaccatggtgaaaccctgtctctaccaaaaatacaaaaaattagccagatattgtggcaggcacttttaatcccagctactcgggaggctgaggcaggagaattgcttgaacctgggaggcggaggttgcagtgagccaagattgcaccagtgcactccagcttgggcgacagatcaagactctgtcacacacaaaacaaacaaacaaattttcccgtttctctctgtccctttctctataacatggataaaatattcacgtcttatgtatttattattgctgagtcattggtgccttattcttcagtgtttcagtctgtatctcctaagcatcctgatgttagttttttgactataaaattgacctgcattctttactagcaattcaaacggtacagcactcttgaagtgtaaacattcctgttcctcctcaccccactctgcagacatgcctttctgtctgtcctcccagacttttcccctgcataaagatgttcattttgtacatacactcagacatacatgtggctgtattttttgtataccgatttctggatggaatgcacactgttatctgtttagttactttatgttttcatacaaatgacatcatcccacaaatagaattctgccatttactttcttcactattcttatgtggcatggttcatgctgggcctcggtcttttgagtggggtctgtttacccagtcccctgttggtgatcacatcgctaacttccggcgttttcctatcaccatcggtgcctccgtgaacaccttgtgaatgtgcctgtgccttcgttctggtgtcggtgcagagcagggtccaaggggcgtgacagctgggctgaggggctggcatgtttcacattctgatagatagagccaagttgctcctatcaggttttcaagctgcccatttcccaccgtggagacagcaacagaggggacatccccagctcctctggctctgcctgttcaaagctaccctgtgaggcctgaagacagagctgccctgaaggcagctcatgtccactgaacactgactgtgggctggatgctgtgccaagggcttgacgtttcctctttaaggatgaggaaacgggcagagaagcggctgattgtccagtccccctgcgtggaggctgcttggctgggctcgagcccagcggtgtggtcatagagcatgttgtgctgaatggctctgccatggaccaagccttggctgctctaaaagccggctcattgccttctgcttctccggattcgttccttactccaggaagagcagtgcactgaaggagaaatgggaatgggcaaaaggaaccacatgctggccagacccctgcggggtcactttcctcagcctgggctccgacatgccacgtcaggtgccagcgcacatactctggacaccctcctcattctctctgggctttgatgctctctgtgagtcatctgccctccctttcccatgctacaggcatctaccttgctctgtcccacctaatagcttcaggactgaacaattcaggaaagggaagggaaggggtggaggagaagagggaagagtcggcccttggaaggttctccacggaagactgccttttttttttttgagatggagtctcgctgtgtcgcccagcctggagtgcagtggcatgatctcagctcactgcaaactccgcctcctgggttcaggggattcttcagcctcagcctccagagtagctgggactacaggtgcatgccactgtgccctgctaatttttgtatttttagtagagacggggtttcaccatattggccaggctggtctcgaactcctgacctcttggtccacccgcctcagcctcccaaagtgctgggattacaggtgcaagccaccgcgcctggctcgagagactgacattctgtctcagcacagctggaagaggctgcttgagcaccaggataaggagttgtcttgcattcaggggccatgtggtgtgcggatacctatttttctttcttttcttttttttttctgagacagagtctcgctctgtctcccaggctagagtgcagtggcatgatctcagctcactgcaacctctgtctcccgggttcaagcaattcttctgcctcagcctcccaagtagctgggattacaggtgcccactaccacacccagctaatttgtgtgtgtgtgtgtgtgtgtgtgtgtgtgtgtgtgtgtgtgtgtgtgtgtttttgagatggagtcctgctctgtcaccccggctggagtgcagtggtgcgatctcagctcactgcaagctccgcctcccgggttcacactattctcctgcctcagcctcccgagtagctgggactacaggcgcctgccaccatgcctggctagtttttttgtattttaagtagagacagggtttcaccgtgttagccaggatggttcgatctcctgacctcatgatctggccgcctcagtctcccaaagtgctgagattacaggcgtgagccagcgtgcctggctaatttttgtatttttagtagagacggggtttcaccatgttggccaggctggtctcgaacccctgacctcaagcaatccacccaccttggcctcccaaagagctgagattacaggtgtgagccaccgcacccggcccaaggatacctatttttcttaatgctggaagccacactcagacaccagagcagctctcaatgctgggaatcctgggagactgatgatgaccgcgtctccctctgggaccaaggatggtggaagggtgtgcagaattccaaatgttatttacatcactcactcttgtgtggagtgcataattgtctttgcttgccaatttcatatcagttaaatataagcagtaagctaatccta

SEQ ID NO: 126842 - DNA, 839 bp, Homo sapiens
  Payload ID: 4867
  Gene Symbol: DHODH
  Gene Name: dihydroorotate dehydrogenase (quinone)
  ENST ID: ENST00000571288
  CDS Start-End: 1-230
acctgaaaaagcgggcccaggatgctgtgatcatcctggggggaggaggacttctcttcgcctcctacctgatggccacgggagatgagcgtttctatgctgaacacctgatgccgactctgcaggggctgctggacccggagtcagcccacagactggctgttcgcttcacctccctggggctccttccacgggccagatttcaagactctgacatgctggcatgttagaatcccccgggggtgcacttggaatattcagatgccctggcctggtgccagaccagtttcaccgccacatctgagagcaggacctgaaagctgccaggggcctttgtggtgcagctggagctgagaaccacggtcctggaggaaggcccctacacatcttgcctaccagtctcctgaggaagtgagagttctgggccataaattccgaaatccagtaggaattgctgcaggatttgacaagcatggggaagccgtggacggactttataagatgggctttggttttgttgagataggaagtgtgactccaaaacctcaggaaggaaaccctagacccagagtcttccgcctccctgaggaccaagctgtcattaacaggtggggatcaatatcttcagaattggccaggcaaaatatatttgcttaacattcagctgctacagataactgcaggtgctgggatgatggtacttggtgaatcctataggtgagcaggggtgtgagatcctgctctgagccctgtgtgtgcggcctcctggttgtgtggcatgtggtatggatttaacagtcacgggctttcagtggtggaacacaggttacgggccagac

SEQ ID NO: 126843 - DNA, 843 bp, Homo sapiens
  Payload ID: 4867
  Gene Symbol: DHODH
  Gene Name: dihydroorotate dehydrogenase (quinone)
  ENST ID: ENST00000576145
  CDS Start-End: 411-843
gagcagtgtggatgggggaccagggaccggggagggcgagaacggagagtcaggccgggcgaggcatggaccgaaggcggctccgggagtgtgggcccccctgggacgtgtgcgtgtttccggggtctcctgcaaatgctcgtgcgtgtgcatttgcacgtggactcggtcaggcgtgtgcagacagcgcctgcaggtctgggtgggtgctgatctgagtgtctgcgcctgggccatgtttttgagcctggcacaggggtgcttagtgaacacatgaccgcctagcgttgtgtgccggatccaacggggaatgaaactagagtaggacatgctcccaacccttttagaagcgggcccaggatgctgtgatcatcctggggggaggaggacttctcttcgcctcctacctgatggccacgggagatgagcgtttctatgctgaacacctgatgccgactctgcaggggctgctggacccggagtcagcccacagactggctgttcgcttcacctccctggggctccttccacgggccagatttcaagactctgacatgctggaagtgagagttctgggccataaattccgaaatccagtaggaattgctgcaggatttgacaagcatggggaagccgtggacggactttataagatgggctttggttttgttgagataggaagtgtgactccaaaacctcaggaaggaaaccctagacccagagtcttccgcctccctgaggaccaagctgtcattaacaggtatggatttaacagtcacgggctttcagtggtggaacacaggttacgggccagacagcagaagcaggccaagctcacagaag

SEQ ID NO: 126844 - DNA, 2127 bp, Homo sapiens
  Payload ID: 4868
  Gene Symbol: DPYS
  Gene Name: dihydropyrimidinase
  Uniprot ID: Q14117
  ENST ID: ENST00000351513
  CDS Start-End: 134-1693
atttgcagcctgaggcagagctcgggggctgtcggtggggaccttgcaggagggcaccccaagcccgcccggcccgcccaacccagcccctgcgcgcagcccgggccgagtaggaccccgcgcgcccctcgctatggcggcgccctcgcggctcctgatccgcgggggtcgcgtggtcaacgatgacttctcggaggtggccgacgtgctggtggaggacggcgtggtgcgggcactcgggcacgacctgctgcctcccgggggcgctcctgcggggctgcgggtcctcgacgccgccggcaagctcgtcctgcccggaggcatcgacacacacacgcacatgcagttccccttcatgggctcgcggtccatcgacgacttccaccagggcaccaaggctgctctctcaggaggcaccaccatgattattgatttcgccattcctcagaaaggtggctccctcattgaggccttcgagacctggcgaagctgggctgatcccaaagtttgctgcgactacagccttcatgtggcagtgacgtggtggagtgaccaggttaaagaagaaatgaaaatccttgtgcaagataaaggtgttaactctttcaagatgtttatggcctataaagatctgtacatggtgacagacctggagctgtacgaagccttctctcggtgcaaggaaattggagcaattgcccaggtccatgcggaaaatggagacttaattgcagagggagcaaagaagatgttggctctggggataacaggccctgagggccacgagctgtgccgcccagaggcagtggaggcagaggccacgctgagagccatcaccatagccagcgctgtgaactgtcctctctacattgtgcatgtgatgagcaagtctgcagctaaggtgatagcggatgcaaggagagatgggaaggtggtctatggtgaacccatagcagccagtcttggcacagatggcactcactactggaataaagaatggcaccatgcagcccaccatgtcatgggtccacctttgcgaccagacccctcaacacccgacttcctcatgaatctgttggctaatgatgatctaaccacaacagggactgataactgcactttcaacacctgccagaaagctcttgggaaggatgattttaccaagatccccaatggggtgaatggtgttgaagatcggatgtccgtaatatgggaaaaaggcgtgcatagtggtaaaatggatgaaaacagatttgtggcagttaccagcacaaatgcagccaaaatttttaatctctatccaagaaaaggaagaatagctgtaggatcagatgctgacattgttatttgggacccaaaaggcacaaggactatctcagcaaaaactcatcatcaggctgttaacttcaacattttcgagggcatggtttgccacggggtgccccttgtgactatttcaagaggcaaagtggtatatgaagccggagtgttcagtgtcacggcaggagatgggaagtttattcctcgaaaaccatttgctgaatatatttacaaacgaataaagcagcgagaccggacttgcacacctacccctgtggagcgtgcaccctataagggagaagtcgccacactgaaatccagagtgacaaaagaagatgccacagcagggaccaggaaacaggcccacccctgaagtgtgtgccatcggtaaaaaaatcagaggaaaggaggctgccattcccttcacagccaaacattgtcaacccatggagaagcaggccttattcaactccctaggatcctttagaaaaaattcaccactataggcttctttgattttctttcagaagcaattgctgtctttctcactgtgtttttgttgctgcataagattgaaggtataaatttatattattgtgatggaaaggctgtgtggaaattcattgatgatactttaaaatgtcatctttgcttgtactagatttcttacttagaatttttaaaaatcattttcttgtttaaatagtttctttttttaaaaaaatggttacattagttttaaaatagctctgtgattttactttttattgtaattaataaacattgagatcttcattttatacctta

SEQ ID NO: 126845 - DNA, 576 bp, Homo sapiens
  Payload ID: 4868
  Gene Symbol: DPYS
  Gene Name: dihydropyrimidinase
  ENST ID: ENST00000521573
  CDS Start-End: 125-576
ctgaggcagagctcgggggctgtcggtggggaccttgcaggagggcaccccaagcccgcccggcccgcccaacccagcccctgcgcgcagcccgggccgagtaggaccccgcgcgcccctcgctatggcggcgccctcgcggctcctgatccgcgggggtcgcgtggtcaacgatgacttctcggaggtggccgacgtgctggtggaggacggcgtggtgcgggcactcgggcacgacctgctgcctcccgggggcgctcctgcggggctgcgggtcctcgacgccgccggcaagctcgtcctgcccggaggcatcgacacacacacgcacatgcagttccccttcatgggctcgcggtccatcgacgacttccaccagggcaccaaggttaaagaagaaatgaaaatccttgtgcaagataaaggtgttaactctttcaagatgtttatggcctataaagatctgtacatggtgacagacctggagctgtacgaagccttctctcggtgcaaggaaattggagcaattgcccaggtccatgcggaaaatggagacttaattgcagagggagcaaa

SEQ ID NO: 126846 - DNA, 426 bp, Homo sapiens
  Payload ID: 4868
  Gene Symbol: DPYS
  Gene Name: dihydropyrimidinase
  ENST ID: ENST00000533874
  CDS Start-End: 1-163
aggagatgggaagtttattcctcgaaaaccatttgctgaatatatttacaaacgaataaagcagcgagaccgggtaaaaaaatcagaggaaaggaggctgccattcccttcacagccaaacattgtcaacccatggagaagcaggccttattcaactccctaggatcctttagaaaaaattcaccactataggcttctttgattttctttcagaagcaattgctgtctttctcactgtgtttttgttgctgcataagattgaaggtataaatttatattattgtgatggaaaggctgtgtggaaattcattgatgatactttaaaatgtcatctttgcttgtactagatttcttacttagaatttttaaaaatcattttcttgtttaaatagtttctttttttaaaaaaatggttacattagtttt

SEQ ID NO: 126847 - DNA, 4603 bp, Homo sapiens
  Payload ID: 4869
  Gene Symbol: DPYSL2
  Gene Name: dihydropyrimidinase-like 2
  Uniprot ID: Q16555
  ENST ID: ENST00000311151
  CDS Start-End: 413-2131
aatcgctgctcgtctctctcgaagcggatggcttttgcctgagaggaaagggagtggctggcggcgcatgcgccacggtggccgacttgaaccgaggcttttattgctgtagtttatttccacccccttccctcctgtttctctctctccttctctctctctctctctctctctcttttttttccgccctagctggggctgtgttggaggagaggaagaaagagagacagaggattgcattcatccgttacgttcttgaaatttcctaatagcaagaccagcgaagcggttgcacccttttcaatcttgcaaaggaaaaaaacaaaacaaaacaaaaaaaacccaagtccccttcccggcagtttttgccttaaagctgccctcttgaaattaattttttcccaggagagagatgtcttatcaggggaagaaaaatattccacgcatcacgagcgatcgtcttctgatcaaaggaggtaaaattgttaatgatgaccagtcgttctatgcagacatatacatggaagatgggttgatcaagcaaataggagaaaatctgattgtgccaggaggagtgaagaccatcgaggcccactcccggatggtgatccccggaggaattgacgtccacactcgtttccagatgcctgatcagggaatgacgtctgctgatgatttcttccaaggaaccaaggcggccctggctgggggaaccactatgatcattgaccacgttgttcctgagcctgggacaagcctgctcgctgcctttgaccagtggagggaatgggccgacagcaagtcctgctgtgactactctctgcatgtggacatcagtgagtggcataagggcatccaggaggagatggaagcgcttgtgaaggatcacggggtaaattccttcctcgtgtacatggctttcaaagatcgcttccagctaacggattgccagatttatgaagtactgagtgtgatccgggatattggcgccatagcccaagtccacgcagaaaatggcgacatcattgcagaggagcagcagaggatcctggatctgggcatcacgggccccgagggacatgtgctgagccgacctgaggaggtcgaggccgaagccgtgaatcgtgccatcaccatcgccaaccagaccaactgcccgctgtatatcaccaaggtgatgagcaaaagctctgctgaggtcatcgcccaggcacggaagaagggaactgtggtgtatggcgagcccatcactgccagcttgggaacggacggctcccattactggagcaagaactgggccaaggctgctgcctttgtcacctccccacccttgagccctgatccaaccactccagactttctcaactccttgctgtcctgtggagacctccaggtcacgggcagtgcccattgcacgtttaacactgcccagaaggctgtaggaaaggacaacttcaccctgattccggagggcaccaatggcactgaggagcggatgtccgtcatctgggacaaggctgtggtcactgggaagatggatgagaaccagtttgtggctgtgaccagcaccaatgcagccaaagtcttcaacctttacccccggaaaggccgcattgctgtgggatccgatgccgacctggtcatctgggaccccgacagcgttaaaaccatctctgccaagacacacaacagctctctcgagtacaacatctttgaaggcatggagtgccgcggctccccactggtggtcatcagccaggggaagattgtcctggaggacggcaccctgcatgtcaccgaaggctctggacgctacattccccggaagcccttccctgattttgtttacaagcgtatcaaggcaaggagcaggctggctgagctgagaggggttcctcgtggcctgtatgacggacctgtgtgtgaagtgtctgtgacgcccaagacagtcactccagcctcctcggccaagacgtctcctgccaagcagcaggccccacctgtccggaacctgcaccagtctggattcagtttgtctggtgctcagattgatgacaacattccccgccgcaccacccagcgtatcgtggcgccccccggtggccgtgccaacatcaccagcctgggctagagctcctgggctgtgccgtccactggggactggggatgggacacctgaggacattctgagacttctttcttccttcctttttttttttttgtttttttttttaagagcctgtgatagttactgtggagcagccagttcatggggtcccccttggggccccacaccccgtctctcaccaagagttactgattttgctcatccacttccctacacatctatgggtatcacacccaagactacccaccaagctcatacagggaaccacacccaacacttagacatgcgaacaagcagcccccagcgagggtctccttcgccttcaacctcctagtgtctgttagcatcttccttttcatggggggagggaagataaagtgaattgcccagagctgcctttttcttttctttttaaaaattttaagaagttttctttgtggggctggggaggggccggggtcagggagagtcttttttttttttttttttaaatactaaattggaacatttaattccatattaatacaaggggtttgaactggacatcctaatgatgcaattacgtcatcacccagctgattccgggtggttggcaaactcatcgtgtctgtcctgagaggctccacaatgcccacccgcatcgccattctgtagtcttcagggtcagctgttgataaaggggcaggcttgcgttattggcctagattttgctgcagattaaatcctttgaggattctcttctcttttaccatttttctgcgtgctctcactctctctttctctctctagctttttaattcatgaatattttcgtgtctgtctctctctctctctgtgtttcctccagcccttgtctcggagacggtgttttcctcccttgccccattatcttttcacctcccaggtctaccatttcatggtggtcgttgggtccgcctaaaggatttgagcgtttgccattgcaagcatagtgctgtgtcatcctggtccatgtaggactggtgctaaccacctgccatcatgaggatgtgtgctagagtgtgggaccctggccaagtgcaggaatgggccatgccgtctcacccacagtatcacacgtggaaccgcagacagggcccagaagctttagaggtatgaggctgcagaaccggagagattttcctctgtgcagtgctctctggctaaagtcacggtcaaacctaaacaccgagcctcattaacccaagtgaaccaaccaaagtcaccagttcagaagtgctaagctaataggagtctgacccgagggcctgctgcttcctggttaagtatcttttgagattctagaacacatgggagctttttattttcggggaaaaaccgtatttttttcttgtccaattatttctaaagacacactacatagaaagaggccctataaactcaaaaagtcattgggaaacttaaagtctattctactttgcaagaggagaaatgtgttttatgaacgatagatcacatcagaactcctgtggggaggaaaccttataaattaaacacatggcccccttagagaccacaggtgatgtctgtctccatccttccctctccttttctgtcacctttccccctagctggctcctttggacctacccctgtccttgctgacttgtgttgcattgtattccaaacgtgtttacaggttctcttaagcaatgttgtatttgcaggcttttctgaataccaaatctgctttttgtaaagcgtaaaaacatcacaaagtaggtcattccatcaccacccttgtctctctacacattttgcctttggggatctggttggggttttgggttttttgttgttgttgtttatttgttattttaaaggtaaattgcacttttaaaaaaataattggttgacttaatatatttgctttttttctcacctgcacttagaggaaatttgaacaagttggaaaaaaacaatttttgtttcaattctaagaaacacttgcagctctagtattcacttgagtcttcctgtttttcctgtaccgggtcatggtaatttttggttgttttggttgttttcttaaaaaacaagttaaaacctgacgatttctgcaggctgtgtaagcatgtttacctgttggcttgctttgtgtgtctgttaaatgaatgtcatatgtaaatgctaaaataaatcgacagtgtctcagaactgaataactgcagtgacttgatgctctaaaacagtgtaggatttaagaatagatggtttttaatcctggaaattgtgattgtgacccatgagtggaggaactttcagttctaaagctgataaagtgtgtagccagaagagtacttttttttttgtaaccactgtcttgatggcaaaataattatggtaaaaaacaagtctcgtgtttattattccttaagaactctgtgttatattaccatggaacgcctaataaagcaaaatgtggttgtttcaggg

SEQ ID NO: 126848 - DNA, 562 bp, Homo sapiens
  Payload ID: 4869
  Gene Symbol: DPYSL2
  Gene Name: dihydropyrimidinase-like 2
  ENST ID: ENST00000493789
  CDS Start-End: 52-562
acaaaaggatgtttcagggcggggtttcccataccccgcagccttccccggatgcctccttcccggctcggagttggaagggtttcctcagggctctcatttcctgcagcccggcgcctccacgcgggccagatcccgtctctgcagcctccccccggcccgcgcccattccccgcccccaggagccgggcccggacgctcccgggaagcagccgccctctccggggccgggcgtggccgggccctccccgccgggttcccgcccgccgccgttccagtcctcagccgcgccagggcgggggccagagcgatcgtcttctgatcaaaggaggtaaaattgttaatgatgaccagtcgttctatgcagacatatacatggaagatgggttgatcaagcaaataggagaaaatctgattgtgccaggaggagtgaagaccatcgaggcccactcccggatggtgatccccggaggaattgacgtccacactcgtttccagatgcctgatcagggaatgacgtctgctgatgatttcttccaaggaaccaaggcggccctggctg

SEQ ID NO: 126849 - DNA, 4552 bp, Homo sapiens
  Payload ID: 4869
  Gene Symbol: DPYSL2
  Gene Name: dihydropyrimidinase-like 2
  Uniprot ID: Q16555
  ENST ID: ENST00000521913
  CDS Start-End: 475-2085
actggcagacggacggacggacggcgaggaccctacccgagcccccgagccatggccgagagaaagcaatccgggaaggcggcagaggacgaagaggtccctgctttttttaaaaacctgggctccggcagccccaagccccggcagaaattctgtggcatgttctgcccggtggaagggtcctcggagaacaagaccatcgacttcgactcgctgtcggtgggccggggctcggggcaggtggtggctcagcagcgggacgtcgcccacttgggcccggacccgcagccgccgtactcgcggcagggccggcgcgccggcggagagccatctgttgaatcgggccggaaggtggagatccggagggcctcgggcaaagaagccctgcagaacatcaacgaccagagcgatcgtcttctgatcaaaggaggtaaaattgttaatgatgaccagtcgttctatgcagacatatacatggaagatgggttgatcaagcaaataggagaaaatctgattgtgccaggaggagtgaagaccatcgaggcccactcccggatggtgatccccggaggaattgacgtccacactcgtttccagatgcctgatcagggaatgacgtctgctgatgatttcttccaaggaaccaaggcggccctggctgggggaaccactatgatcattgaccacgttgttcctgagcctgggacaagcctgctcgctgcctttgaccagtggagggaatgggccgacagcaagtcctgctgtgactactctctgcatgtggacatcagtgagtggcataagggcatccaggaggagatggaagcgcttgtgaaggatcacggggtaaattccttcctcgtgtacatggctttcaaagatcgcttccagctaacggattgccagatttatgaagtactgagtgtgatccgggatattggcgccatagcccaagtccacgcagaaaatggcgacatcattgcagaggagcagcagaggatcctggatctgggcatcacgggccccgagggacatgtgctgagccgacctgaggaggtcgaggccgaagccgtgaatcgtgccatcaccatcgccaaccagaccaactgcccgctgtatatcaccaaggtgatgagcaaaagctctgctgaggtcatcgcccaggcacggaagaagggaactgtggtgtatggcgagcccatcactgccagcttgggaacggacggctcccattactggagcaagaactgggccaaggctgctgcctttgtcacctccccacccttgagccctgatccaaccactccagactttctcaactccttgctgtcctgtggagacctccaggtcacgggcagtgcccattgcacgtttaacactgcccagaaggctgtaggaaaggacaacttcaccctgattccggagggcaccaatggcactgaggagcggatgtccgtcatctgggacaaggctgtggtcactgggaagatggatgagaaccagtttgtggctgtgaccagcaccaatgcagccaaagtcttcaacctttacccccggaaaggccgcattgctgtgggatccgatgccgacctggtcatctgggaccccgacagcgttaaaaccatctctgccaagacacacaacagctctctcgagtacaacatctttgaaggcatggagtgccgcggctccccactggtggtcatcagccaggggaagattgtcctggaggacggcaccctgcatgtcaccgaaggctctggacgctacattccccggaagcccttccctgattttgtttacaagcgtatcaaggcaaggagcaggctggctgagctgagaggggttcctcgtggcctgtatgacggacctgtgtgtgaagtgtctgtgacgcccaagacagtcactccagcctcctcggccaagacgtctcctgccaagcagcaggccccacctgtccggaacctgcaccagtctggattcagtttgtctggtgctcagattgatgacaacattccccgccgcaccacccagcgtatcgtggcgccccccggtggccgtgccaacatcaccagcctgggctagagctcctgggctgtgccgtccactggggactggggatgggacacctgaggacattctgagacttctttcttccttcctttttttttttttgtttttttttttaagagcctgtgatagttactgtggagcagccagttcatggggtcccccttggggccccacaccccgtctctcaccaagagttactgattttgctcatccacttccctacacatctatgggtatcacacccaagactacccaccaagctcatacagggaaccacacccaacacttagacatgcgaacaagcagcccccagcgagggtctccttcgccttcaacctcctagtgtctgttagcatcttccttttcatggggggagggaagataaagtgaattgcccagagctgcctttttcttttctttttaaaaattttaagaagttttctttgtggggctggggaggggccggggtcagggagagtcttttttttttttttttttaaatactaaattggaacatttaattccatattaatacaaggggtttgaactggacatcctaatgatgcaattacgtcatcacccagctgattccgggtggttggcaaactcatcgtgtctgtcctgagaggctccacaatgcccacccgcatcgccattctgtagtcttcagggtcagctgttgataaaggggcaggcttgcgttattggcctagattttgctgcagattaaatcctttgaggattctcttctcttttaccatttttctgcgtgctctcactctctctttctctctctagctttttaattcatgaatattttcgtgtctgtctctctctctctctgtgtttcctccagcccttgtctcggagacggtgttttcctcccttgccccattatcttttcacctcccaggtctaccatttcatggtggtcgttgggtccgcctaaaggatttgagcgtttgccattgcaagcatagtgctgtgtcatcctggtccatgtaggactggtgctaaccacctgccatcatgaggatgtgtgctagagtgtgggaccctggccaagtgcaggaatgggccatgccgtctcacccacagtatcacacgtggaaccgcagacagggcccagaagctttagaggtatgaggctgcagaaccggagagattttcctctgtgcagtgctctctggctaaagtcacggtcaaacctaaacaccgagcctcattaacccaagtgaaccaaccaaagtcaccagttcagaagtgctaagctaataggagtctgacccgagggcctgctgcttcctggttaagtatcttttgagattctagaacacatgggagctttttattttcggggaaaaaccgtatttttttcttgtccaattatttctaaagacacactacatagaaagaggccctataaactcaaaaagtcattgggaaacttaaagtctattctactttgcaagaggagaaatgtgttttatgaacgatagatcacatcagaactcctgtggggaggaaaccttataaattaaacacatggcccccttagagaccacaggtgatgtctgtctccatccttccctctccttttctgtcacctttccccctagctggctcctttggacctacccctgtccttgctgacttgtgttgcattgtattccaaacgtgtttacaggttctcttaagcaatgttgtatttgcaggcttttctgaataccaaatctgctttttgtaaagcgtaaaaacatcacaaagtaggtcattccatcaccacccttgtctctctacacattttgcctttggggatctggttggggttttgggttttttgttgttgttgtttatttgttattttaaaggtaaattgcacttttaaaaaaataattggttgacttaatatatttgctttttttctcacctgcacttagaggaaatttgaacaagttggaaaaaaacaatttttgtttcaattctaagaaacacttgcagctctagtattcacttgagtcttcctgtttttcctgtaccgggtcatggtaatttttggttgttttggttgttttcttaaaaaacaagttaaaacctgacgatttctgcaggctgtgtaagcatgtttacctgttggcttgctttgtgtgtctgttaaatgaatgtcatatgtaaatgctaaaataaatcgacagtgtctcagaactgaataactgcagtgacttgatgctctaaaacagtgtaggatttaagaatagatggtttttaatcctggaaattgtgattgtgacccatgagtggaggaactttcagttctaaagctgataaagtgtgtagccagaagagtacttttttttttgtaaccactgtcttgatggcaaaataattatggtaaaaaacaagtctcgtgtttattattccttaagaactctgtgttatattaccatggaacgcctaataaagcaaaatgtggttgttt

SEQ ID NO: 126850 - DNA, 2130 bp, Homo sapiens
  Payload ID: 4869
  Gene Symbol: DPYSL2
  Gene Name: dihydropyrimidinase-like 2
  Uniprot ID: Q16555
  ENST ID: ENST00000523027
  CDS Start-End: 199-1809
cctttctgttgctaacggaggcgatggtgatggtggtggtggttgtgggagatgcagtgatccaggattagaagtcgcatcgtttgcaaggcattaaacaggagcgcgagtgcacgaaggtagccttagagcgatcgtcttctgatcaaaggaggtaaaattgttaatgatgaccagtcgttctatgcagacatatacatggaagatgggttgatcaagcaaataggagaaaatctgattgtgccaggaggagtgaagaccatcgaggcccactcccggatggtgatccccggaggaattgacgtccacactcgtttccagatgcctgatcagggaatgacgtctgctgatgatttcttccaaggaaccaaggcggccctggctgggggaaccactatgatcattgaccacgttgttcctgagcctgggacaagcctgctcgctgcctttgaccagtggagggaatgggccgacagcaagtcctgctgtgactactctctgcatgtggacatcagtgagtggcataagggcatccaggaggagatggaagcgcttgtgaaggatcacggggtaaattccttcctcgtgtacatggctttcaaagatcgcttccagctaacggattgccagatttatgaagtactgagtgtgatccgggatattggcgccatagcccaagtccacgcagaaaatggcgacatcattgcagaggagcagcagaggatcctggatctgggcatcacgggccccgagggacatgtgctgagccgacctgaggaggtcgaggccgaagccgtgaatcgtgccatcaccatcgccaaccagaccaactgcccgctgtatatcaccaaggtgatgagcaaaagctctgctgaggtcatcgcccaggcacggaagaagggaactgtggtgtatggcgagcccatcactgccagcttgggaacggacggctcccattactggagcaagaactgggccaaggctgctgcctttgtcacctccccacccttgagccctgatccaaccactccagactttctcaactccttgctgtcctgtggagacctccaggtcacgggcagtgcccattgcacgtttaacactgcccagaaggctgtaggaaaggacaacttcaccctgattccggagggcaccaatggcactgaggagcggatgtccgtcatctgggacaaggctgtggtcactgggaagatggatgagaaccagtttgtggctgtgaccagcaccaatgcagccaaagtcttcaacctttacccccggaaaggccgcattgctgtgggatccgatgccgacctggtcatctgggaccccgacagcgttaaaaccatctctgccaagacacacaacagctctctcgagtacaacatctttgaaggcatggagtgccgcggctccccactggtggtcatcagccaggggaagattgtcctggaggacggcaccctgcatgtcaccgaaggctctggacgctacattccccggaagcccttccctgattttgtttacaagcgtatcaaggcaaggagcaggctggctgagctgagaggggttcctcgtggcctgtatgacggacctgtgtgtgaagtgtctgtgacgcccaagacagtcactccagcctcctcggccaagacgtctcctgccaagcagcaggccccacctgtccggaacctgcaccagtctggattcagtttgtctggtgctcagattgatgacaacattccccgccgcaccacccagcgtatcgtggcgccccccggtggccgtgccaacatcaccagcctgggctagagctcctgggctgtgccgtccactggggactggggatgggacacctgaggacattctgagacttctttcttccttcctttttttttttttgtttttttttttaagagcctgtgatagttactgtggagcagccagttcatggggtcccccttggggccccacaccccgtctctcaccaagagttactgattttgctcatccacttccctacacatctatgggtatcacacccaagactacccaccaagctcatacagggaaccacacccaacacttagacatgcgaacaagcagcccccagcgagggtctccttcgccttc

SEQ ID NO: 126851 - DNA, 5476 bp, Homo sapiens
  Payload ID: 4870
  Gene Symbol: DPYSL3
  Gene Name: dihydropyrimidinase-like 3
  Uniprot ID: Q14195
  ENST ID: ENST00000343218
  CDS Start-End: 199-2253
tgctccgcgcgctagctggctgtgtggctcgctggctcgctagggacaagcaggaatcggagcagcactgccgcctctggcgcgaaggctcaggcgcctcctcccgccacagtcactgtggctcggcgcacgctgccggcggctgccctttccgcctctggggaagaaaaacccgcgggccgctttcgtgcttgaaccatggcctcgggccggaggggctgggacagctcccacgaagacgatctgcccgtgtacctggccaggccgggcaccacggaccaggtcccgcggcagaaatacggcggcatgttctgcaacgtggagggcgccttcgagagcaagacgctggatttcgatgccctcagcgtggggcagcggggcgcgaagactcctcggagcggccagggcagcgaccgaggatcggggagtcggcccgggatcgagggggacaccccgcgcaggggccaaggccgggaagagagcagggagcccgcgcccgcctcccccgcccccgccggggtagagatccggagcgccaccggcaaagaggtgttgcagaacctcggccccaaggacaagagtgaccgtctccttatcaagggaggcagaatcgtcaatgatgatcagtccttttatgctgatatttacatggaagatggcttaataaaacaaattggagacaatctgattgttcctggaggagtgaagaccattgaagccaatgggaagatggtgatccctggaggcatcgatgtccatactcacttccagatgccatataagggaatgaccacagtagatgacttcttccaagggacaaaggcggccttagcaggtggcaccaccatgatcattgaccatgtggtgcctgagcctgagtccagcctgactgaggcctatgagaaatggagagagtgggctgatgggaagagttgctgtgactatgccctgcatgtggacatcacccactggaatgacagcgtcaagcaggaagtgcagaacctcatcaaggacaaaggggttaactccttcatggtttatatggcttataaggatttgtatcaagtatctaacacagagctctatgagatcttcacctgcctgggagagctgggggccattgctcaagttcatgctgagaatggggatatcattgcccaggagcaaacccgcatgttggaaatggggataactggcccagaaggccatgtactgagcaggccagaagagctggaagctgaggctgtgttccgtgccatcaccattgccagccaaaccaattgccctctctacgtcacaaaggtcatgagcaagagtgcagctgacctcatctcacaagccaggaaaaaaggaaatgtagtctttggtgagcccatcactgccagcctcggcatagatggaacccattattggagcaagaactgggccaaggcggctgcatttgtgacatccccacccctgagccctgacccaactactccggactacatcaactccttgctggccagcggggatctgcagctatctgggagtgcccactgcaccttcagcactgcccagaaagcaattgggaaggacaacttcacagccattcctgagggcaccaatggtgtggaggagcggatgtctgtcatctgggacaaggctgtggccacagggaaaatggacgaaaaccagttcgtggctgtgacaagcacaaacgctgccaagatcttcaacctgtatccccgcaagggaagaatatctgtgggttctgacagcgacctcgtcatctgggatccagatgctgtgaagatcgtctctgccaagaaccaccagtctgcggcagagtacaacatctttgaagggatggagctgcgcggggctcctctggttgtcatctgccagggcaagatcatgctggaagatggcaacctgcacgtgacccagggggctggccgcttcataccctgcagcccgttctccgactatgtctacaagcgcattaaagcacggaggaagatggcagacctgcatgccgtcccaaggggcatgtacgatgggcctgtgtttgacctgaccaccacccccaaaggtggcacccccgcaggctctgctcggggctctcctactcggccgaacccacctgtgaggaatcttcatcagtcgggatttagcctgtcaggcacccaagtggatgagggggttcgctcagccagcaagcgcatcgtggcgcccccaggcggccgttctaatatcacatctctgagttaagcaagccttcctcaaagagaggggcagaagcaagaagagattgttttgaagccaaaatggtacaccgatatttaagaaggaaagcgaatccaaacggttgtgatctaaagaatcaataagcctcaagccttatgtttctccaatgttacgctcgcttgcctagctttacgaatattgctttgttttctgtttatgcatagccttgatttgtttgactcccctccccccatttacatgcatgcaatcagacaggccactaaggtaaaagagtctgctctatcatagtgttgagagcgtgtgtagtgctgcatcttatgacaaggggacagacaagctgggacgtcagggaaatgaacaaaagggacgcaggttatttggggtgagtgggtggtgggagcctggagcaaggtggagggtgcagaggggctggggtagggcatgtaggagggaggtgggtgggtcaggtgagtggaaggggtgttgtatattgtgttgatgacgtacgttatttccatggaagatagccgctgtggcagctgtcacatcaccacagctccctagggtctgccgagaaggcaggcagtctttgggttctgttctttgtcacgtcccctacaagtaaattttgtttctttgaacgtttattaaaatgccaagacccaaccatttcttccacctgcttgattgtgccagtgtttgctcaggcctctttcttagtgttgctttcaaatccttctctttcctgggttgggaaggccaggcagggacagagcaaatgacacttctcttcctcttgccctccctgcctctttggtgctcttaaaagccagcagctgagaacatagcacaggcccacgtggtgagggcacccacagcttaaagacgcttccttctaaacacggcgaggtcacctctcactcttctgtctttgcaaaccgagaagagtggcatgcttctggcatcccaagtcaggattttagctcagatgaggcagaatgaagggcctctcttacaggcagtttgtgtttgattctctcgatcctggcacatccatgataaataggagtttttgaaagttggttttattaggtgttccctaatttttaccgtaataggtcatctcagcttatatgaaagtcaagtggggaactgggaaagccaaagtcagtcttgagcagagggagcacattttgtggacctggttccacctttccattccaaaccacctgtttccccttccattagcagaaactctgggggaactttgtgtctcagtcctagaatctccccaagtgagtggaagtgacatgatgcagtcttcctcatggggcacctgaaagaaattagtgtgggtgcttcgatctaccttgtctgtcagagttgaatatctctttccctatcatgctgcttctgaaaattcagttttggagcaagtcctgtgagcaagataagaatctatagaaccaagatgctcattttcagaagaaatatgttcaacctgggatcagacttccatgctctggggaatccaagtggtagcacctgtaaccctgtgtactaagtgctttgaagagaagagcaggcctcagacaccttttaattgcttaggagaaaccattgtctctgactgcaggtttgaataagttgaagaccagagaaaagtacacactgggctacaaaggaatttggagatagccaaggaacaggatttcccctagcaagctaccttctgttcaaatcatgaaaaaagactatttccccttagaatagggaagcttgctattttaaagctcttgtagtgcttttcttttaagggagatgtagtaaaagggaaaatgtagctcttagtttacacttcaaagatgtgggggtctttcagagaactaagaataacagttttatgtgcagagagagtttgccagatctgaagcatatacctcattgactaggctgttactttgggataggttgcagtaccagccacagccagcagatagaggaaaagacacacataaactcgcttctgagcgtccacttctgcactctctgctctgctgttactcagcccctgagtctgactcatctctgcacaacctctctgtgccatgaagataagtcttccatggccaaatcggtcatccgcactgcccttgggacttccgaagtgaaccattccaccagaacctttgattctgcacaagatttccttgctctgggaacaacccccaaatgcccttgggaggaacaacatgagctcaggaagcctctctttcttcacttaccattactaactctccaagcatagaaatccctgggaattgcgagaataactcccactattttaaaatttatattcagatttgtttcgtttcataagacacatcaaacaggcctatacaaaaggtttaggaaaagaaaacaatggtgagtcccggccctcttcgaattcactggcacctcatgcaagtgtaggaaggcacgctggatcgtctatctgattccaaagctgtcctttgccatctcatcccttggcctgccccccaaccctgaggatgcccctgccatccccccaacctcctcatattgcctctgaacccagatggcaatccatcccggttctctctgagggccacgggcttgggtagtggaaagggtgtttgggaaattgttaaatcagttacccgtagtagagctatttcttgtacttctaagttttctagaagtggaaggattgtagtcatcctgaaaatgggtttacttcaaaatccctcagccttgttcttcacgactgtctatactgagagtgtcatgtttccacaaagggctgacacctgagcctggattttcactcatccctgagaagccctttccagtagggtgggcaattcccaacttccttgccacaagcttcccaggctttctcccctggaaaactccagcttgagtcccagatacactcatgggctgccctgggcagccagcattcattgtaagttccctctttgaaaactggtgtgtgggtgttcagttctgtgtctggtgggtatggacagacagtaatctcctgtgatctgtgctagctgtgaggcagctctggaacgtgaagagctgtttggtttgaaccgtgaacaaaactgtgttttgagtttagctgacattaaagaaaaaagttcatcacgtgactgttaatgtaaacctggttattaaaataactatgaaatta

SEQ ID NO: 126852 - DNA, 5309 bp, Homo sapiens
  Payload ID: 4870
  Gene Symbol: DPYSL3
  Gene Name: dihydropyrimidinase-like 3
  Uniprot ID: Q14195
  ENST ID: ENST00000398514
  CDS Start-End: 373-2085
ggcagatgcaaagaggaaaatcaatagggataagagagaagagggaggagtcgcagatcagccattcttgtcttatggggtcccagctggcgcagcaaaagaaaaaaaaaaacaaaacccgggcgtgaacgcgggtggaggagggtgtgcgtgggggggcgggggtgaaagggggaccggggagatttactattgtctctggcagccgccgcgggagcccgggaggggggcggaggcgggcggaggcggcggcgcggccagcgcaccattcactccacctgatctcggggcgctgtgcgctgaggaaggcgcgggcgagccggagcagaagaaggagggagggagccagccgctgcagccaccaccgccaccatgtcctaccaaggcaagaagaacatcccgcggatcacgagtgaccgtctccttatcaagggaggcagaatcgtcaatgatgatcagtccttttatgctgatatttacatggaagatggcttaataaaacaaattggagacaatctgattgttcctggaggagtgaagaccattgaagccaatgggaagatggtgatccctggaggcatcgatgtccatactcacttccagatgccatataagggaatgaccacagtagatgacttcttccaagggacaaaggcggccttagcaggtggcaccaccatgatcattgaccatgtggtgcctgagcctgagtccagcctgactgaggcctatgagaaatggagagagtgggctgatgggaagagttgctgtgactatgccctgcatgtggacatcacccactggaatgacagcgtcaagcaggaagtgcagaacctcatcaaggacaaaggggttaactccttcatggtttatatggcttataaggatttgtatcaagtatctaacacagagctctatgagatcttcacctgcctgggagagctgggggccattgctcaagttcatgctgagaatggggatatcattgcccaggagcaaacccgcatgttggaaatggggataactggcccagaaggccatgtactgagcaggccagaagagctggaagctgaggctgtgttccgtgccatcaccattgccagccaaaccaattgccctctctacgtcacaaaggtcatgagcaagagtgcagctgacctcatctcacaagccaggaaaaaaggaaatgtagtctttggtgagcccatcactgccagcctcggcatagatggaacccattattggagcaagaactgggccaaggcggctgcatttgtgacatccccacccctgagccctgacccaactactccggactacatcaactccttgctggccagcggggatctgcagctatctgggagtgcccactgcaccttcagcactgcccagaaagcaattgggaaggacaacttcacagccattcctgagggcaccaatggtgtggaggagcggatgtctgtcatctgggacaaggctgtggccacagggaaaatggacgaaaaccagttcgtggctgtgacaagcacaaacgctgccaagatcttcaacctgtatccccgcaagggaagaatatctgtgggttctgacagcgacctcgtcatctgggatccagatgctgtgaagatcgtctctgccaagaaccaccagtctgcggcagagtacaacatctttgaagggatggagctgcgcggggctcctctggttgtcatctgccagggcaagatcatgctggaagatggcaacctgcacgtgacccagggggctggccgcttcataccctgcagcccgttctccgactatgtctacaagcgcattaaagcacggaggaagatggcagacctgcatgccgtcccaaggggcatgtacgatgggcctgtgtttgacctgaccaccacccccaaaggtggcacccccgcaggctctgctcggggctctcctactcggccgaacccacctgtgaggaatcttcatcagtcgggatttagcctgtcaggcacccaagtggatgagggggttcgctcagccagcaagcgcatcgtggcgcccccaggcggccgttctaatatcacatctctgagttaagcaagccttcctcaaagagaggggcagaagcaagaagagattgttttgaagccaaaatggtacaccgatatttaagaaggaaagcgaatccaaacggttgtgatctaaagaatcaataagcctcaagccttatgtttctccaatgttacgctcgcttgcctagctttacgaatattgctttgttttctgtttatgcatagccttgatttgtttgactcccctccccccatttacatgcatgcaatcagacaggccactaaggtaaaagagtctgctctatcatagtgttgagagcgtgtgtagtgctgcatcttatgacaaggggacagacaagctgggacgtcagggaaatgaacaaaagggacgcaggttatttggggtgagtgggtggtgggagcctggagcaaggtggagggtgcagaggggctggggtagggcatgtaggagggaggtgggtgggtcaggtgagtggaaggggtgttgtatattgtgttgatgacgtacgttatttccatggaagatagccgctgtggcagctgtcacatcaccacagctccctagggtctgccgagaaggcaggcagtctttgggttctgttctttgtcacgtcccctacaagtaaattttgtttctttgaacgtttattaaaatgccaagacccaaccatttcttccacctgcttgattgtgccagtgtttgctcaggcctctttcttagtgttgctttcaaatccttctctttcctgggttgggaaggccaggcagggacagagcaaatgacacttctcttcctcttgccctccctgcctctttggtgctcttaaaagccagcagctgagaacatagcacaggcccacgtggtgagggcacccacagcttaaagacgcttccttctaaacacggcgaggtcacctctcactcttctgtctttgcaaaccgagaagagtggcatgcttctggcatcccaagtcaggattttagctcagatgaggcagaatgaagggcctctcttacaggcagtttgtgtttgattctctcgatcctggcacatccatgataaataggagtttttgaaagttggttttattaggtgttccctaatttttaccgtaataggtcatctcagcttatatgaaagtcaagtggggaactgggaaagccaaagtcagtcttgagcagagggagcacattttgtggacctggttccacctttccattccaaaccacctgtttccccttccattagcagaaactctgggggaactttgtgtctcagtcctagaatctccccaagtgagtggaagtgacatgatgcagtcttcctcatggggcacctgaaagaaattagtgtgggtgcttcgatctaccttgtctgtcagagttgaatatctctttccctatcatgctgcttctgaaaattcagttttggagcaagtcctgtgagcaagataagaatctatagaaccaagatgctcattttcagaagaaatatgttcaacctgggatcagacttccatgctctggggaatccaagtggtagcacctgtaaccctgtgtactaagtgctttgaagagaagagcaggcctcagacaccttttaattgcttaggagaaaccattgtctctgactgcaggtttgaataagttgaagaccagagaaaagtacacactgggctacaaaggaatttggagatagccaaggaacaggatttcccctagcaagctaccttctgttcaaatcatgaaaaaagactatttccccttagaatagggaagcttgctattttaaagctcttgtagtgcttttcttttaagggagatgtagtaaaagggaaaatgtagctcttagtttacacttcaaagatgtgggggtctttcagagaactaagaataacagttttatgtgcagagagagtttgccagatctgaagcatatacctcattgactaggctgttactttgggataggttgcagtaccagccacagccagcagatagaggaaaagacacacataaactcgcttctgagcgtccacttctgcactctctgctctgctgttactcagcccctgagtctgactcatctctgcacaacctctctgtgccatgaagataagtcttccatggccaaatcggtcatccgcactgcccttgggacttccgaagtgaaccattccaccagaacctttgattctgcacaagatttccttgctctgggaacaacccccaaatgcccttgggaggaacaacatgagctcaggaagcctctctttcttcacttaccattactaactctccaagcatagaaatccctgggaattgcgagaataactcccactattttaaaatttatattcagatttgtttcgtttcataagacacatcaaacaggcctatacaaaaggtttaggaaaagaaaacaatggtgagtcccggccctcttcgaattcactggcacctcatgcaagtgtaggaaggcacgctggatcgtctatctgattccaaagctgtcctttgccatctcatcccttggcctgccccccaaccctgaggatgcccctgccatccccccaacctcctcatattgcctctgaacccagatggcaatccatcccggttctctctgagggccacgggcttgggtagtggaaagggtgtttgggaaattgttaaatcagttacccgtagtagagctatttcttgtacttctaagttttctagaagtggaaggattgtagtcatcctgaaaatgggtttacttcaaaatccctcagccttgttcttcacgactgtctatactgagagtgtcatgtttccacaaagggctgacacctgagcctggattttcactcatccctgagaagccctttccagtagggtgggcaattcccaacttccttgccacaagcttcccaggctttctcccctggaaaactccagcttgagtcccagatacactcatgggctgccctgggcagccagcattcattgtaagttccctctttgaaaactggtgtgtgggtgttcagttctgtgtctggtgggtatggacagacagtaatctcctgtgatctgtgctagctgtgaggcagctctggaacgtgaagagctgtttggtttgaaccgtgaacaaaactgtgttttgagtttagctgacattaaagaaaaaagttcatcacgtgactgttaatgtaaacctggttattaaaataactatgaaattac

SEQ ID NO: 126853 - DNA, 539 bp, Homo sapiens
  Payload ID: 4870
  Gene Symbol: DPYSL3
  Gene Name: dihydropyrimidinase-like 3
  ENST ID: ENST00000512722
  CDS Start-End: 263-539
gcggccgccgcattcgacccgcgccatggcagaggagagcgggtgccgggagggaagccgggaaccgtctccattctgaaactagggcggggaagccgccgcgggagcccgggaggggggcggaggcgggcggaggcggcggcgcggccagcgcaccattcactccacctgatctcggggcgctgtgcgctgaggaaggcgcgggcgagccggagcagaagaaggagggagggagccagccgctgcagccaccaccgccaccatgtcctaccaaggcaagaagaacatcccgcggatcacgagtgaccgtctccttatcaagggaggcagaatcgtcaatgatgatcagtccttttatgctgatatttacatggaagatggcttaataaaacaaattggagacaatctgattgttcctggaggagtgaagaccattgaagccaatgggaagatggtgatccctggaggcatcgatgtccatactcacttccagatgccatataagggaatgaccacagtagatgacttcttccaaggga

SEQ ID NO: 126854 - DNA, 584 bp, Homo sapiens
  Payload ID: 4870
  Gene Symbol: DPYSL3
  Gene Name: dihydropyrimidinase-like 3
  ENST ID: ENST00000523458
  CDS Start-End: 1-228
gctgacctcatctcacaagccaggaaaaaaggaaatgtagtctttggtgagcccatcactgccagcctcggcatagatggaacccattattggagcaagaactgggccaaggcggctgcatttgtgacatccccacccctgagccctgacccaactactccggactacatcaactccttgctggccaggccacagggaaaatggacgaaaaccagttcgtggctgtgacaagcacaaacgctgccaagatcttcaacctgtatccccgcaagggaagaatatctgtgggttctgacagcgacctcgtcatctgggatccagatgctgtgaagatcgtctctgccaagaaccaccagtctgcggcagagtacaacatctttgaagggatggagctgcgcggggctcctctggttgtcatctgccagggcaagatcatgctggaagatggcaacctgcacgtgacccagggggctggccgcttcataccctgcagcccgttctccgactatgtctacaagcgcattaaagcacggaggaagatggcagacctgcatgccgtcccaaggggcatgtacgatgggcct

SEQ ID NO: 126855 - DNA, 838 bp, Homo sapiens
  Payload ID: 4870
  Gene Symbol: DPYSL3
  Gene Name: dihydropyrimidinase-like 3
  ENST ID: ENST00000520473
  CDS Start-End: 1-628
gacatccccacccctgagccctgacccaactactccggactacatcaactccttgctggccagcggggatctgcagctatctgggagtgcccactgcaccttcagcactgcccagaaagcaattgggaaggacaacttcacagccattcctgagggcaccaatggtgtggaggagcggatgtctgtcatctgggacaaggctgtggccacagggaaaatggacgaaaaccagttcgtggctgtgacaagcacaaacgctgccaagatcttcaacctgtatccccgcaagggaagaatatctgtgggttctgacagcgacctcgtcatctgggatccagatgctgtgaagatcgtctctgccaagaaccaccagtctatggcagacctgcatgccgtcccaaggggcatgtacgatgggcctgtgtttgacctgaccaccacccccaaaggtggcacccccgcaggctctgctcggggctctcctactcggccgaacccacctgtgaggaatcttcatcagtcgggatttagcctgtcaggcacccaagtggatgagggggttcgctcagccagcaagcgcatcgtggcgcccccaggcggccgttctaatatcacatctctgagttaagcaagccttcctcaaagagaggggcagaagcaagaagagattgttttgaagccaaaatggtacaccgatatttaagaaggaaagcgaatccaaacggttgtgatctaaagaatcaataagcctcaagccttatgtttctccaatgttacgctcgcttgcctagctttacgaatattgctttgttttctgtttatgcatagccttgatttg

SEQ ID NO: 126856 - DNA, 2729 bp, Homo sapiens
  Payload ID: 4871
  Gene Symbol: DPYSL4
  Gene Name: dihydropyrimidinase-like 4
  Uniprot ID: O14531
  ENST ID: ENST00000338492
  CDS Start-End: 165-1883
gcccagcgggggcgggaccggaacggagccgtgcggccccgcgcgctcgcagtctgtctcccgccgtccccacgcacgcgtcccggctcacgcgtccccccgcccgcccgcccgcccgcccgcccccgcttgtgccgcccctaccagagacccccaggagcaggatgtccttccagggcaagaaaagcatcccccggatcacgagtgaccgccttctgatcagaggtgggaggatcgtgaatgacgaccagtccttttacgctgatgtgcacgtggaagatggcttgataaaacaaatcggagaaaacctcatcgtccctgggggcatcaagaccattgacgcccacggcctgatggtccttcctggtggcgttgacgtccacacaaggctgcagatgcctgtcctgggcatgacaccggctgacgacttctgtcagggcaccaaggcagcgctagcaggaggaaccaccatgatcttggaccacgtcttccccgacacgggtgtgagcctgctggcggcctacgagcagtggcgggagcgggcggacagcgcggcctgctgcgactactccctgcacgtggacatcacccgatggcatgagagcatcaaggaggagctggaggccctggtcaaggagaagggtgtgaactccttcctggtcttcatggcatacaaggaccggtgccagtgcagcgacagccagatgtacgagatcttcagcatcatccgggacctgggggccttggcccaggtgcacgctgagaacggggacatcgtggaggaggagcagaagcggttgctggagctcggcatcactggccccgagggccacgtgctcagccaccccgaggaggtggaggctgaggcggtgtaccgagctgtcaccatcgccaagcaggcaaactgcccgctgtacgtcaccaaggtgatgagcaagggggcggccgacgccatcgctcaggccaagcgcagaggggtggtcgtgtttggggagcccatcaccgccagcctgggcaccgacggttcacactactggagcaagaactgggccaaggccgcagccttcgtcacatcaccccctgtcaacccagaccccaccacggcggaccacctcacctgcttgctgtccagcggggacctccaggtgacaggcagcgcccactgcaccttcaccactgcccagaaggctgtgggcaaggacaacttcgcgctgatccccgagggcaccaacggcattgaggagcgcatgtcgatggtctgggagaaatgtgtggcctctgggaagatggacgagaatgagttcgtcgcggtgaccagtacaaatgctgccaaaatcttcaatttttacccaaggaaggggcgagtggctgtgggctctgacgctgacctggtcatatggaaccccaaggccaccaagatcatctctgccaagacccacaatctgaacgtggagtacaacatcttcgagggagtggagtgccggggagcgcctgccgtggtcataagtcagggccgagtggcgctggaggacgggaagatgtttgtcaccccgggggcgggccgcttcgtccctcggaaaacattcccggactttgtctacaagaggatcaaagctcgcaacaggctggcggagatccacggtgtgccccgtggactgtatgacgggcccgtccacgaggtgatggtgcctgccaagccagggagtggcgctccggcccgcgcgtcctgcccaggcaagatctccgtccctcctgtgcgcaacctacatcagtcggggttcagcctatctgggtctcaggctgatgaccacatcgcccgacgcacagcacagaagatcatggcaccacctggcggccgctccaacatcacctctctctcctagacgcccaggaccggccctgtgagccgtgctggccccacccgaggccgcgggggccccagggcactcgcccccctccttagcattttcttttgtagaagtttctcgaaggtgcttggcggtcttgccttccccctccccacaggctctccttgtggggtcccaggtcctgctgccaagagcccctcaagagaagggctgaacctggggagatgtcactgccagggtgaggtggagccacatggcagggacaatgccggcagcctgagcccaggcaccccagtgcccgctgggcccagcctggggacagggaacctgccgggctcacagtgtgggagcagctggacaccaggcttcttggtgaaccggcgaggggccgagtcccgcctggtgggcatttgccgccgcctccccaccaccagtcactgcctcgcagagccctacactcccgcagccgctcctcagaggcctgtgcccatcgcaggcctgggaggaaagtgggcgcagagccctcctgctcacacagctgctgagacttcagggacccatcagaacttggtgcagcacagccccgcccgtggagggtcccttttacgcaccccaaggcccacacctaagcttccatgtagccctcatccagggaagttttgcgatcctttaggaagacactgtcctcttattacagattgtgtatttccgtaggcttcttagtagcagctttgtacactgaggacactgtagccaggaacctgtgcatgccacccaccgcctggacaggcagtcatcctgcctctgatgtgaatcaggcccattaaagacgtctgggtttgaagccgcctgtgcatggaa

SEQ ID NO: 126857 - DNA, 1545 bp, Homo sapiens
  Payload ID: 4871
  Gene Symbol: DPYSL4
  Gene Name: dihydropyrimidinase-like 4
  ENST ID: ENST00000368627
  CDS Start-End: 2-1240
gatgcctgtcctgggcatgacaccggctgacgacttctgtcagggcaccaaggcagcgctagcaggaggaaccaccatgatcttggaccacgtcttccccgacacgggtgtgagcctgctggcggcctacgagcagtggcgggagcgggcggacagcgcggcctgctgcgactactccctgcacgtggacatcacccgatggcatgagagcatcaaggaggagctggaggccctggtcaaggagaagggtgtgaactccttcctggtcttcatggcatacaaggaccggtgccagtgcagcgacagccagatgtacgagatcttcagcatcatccgggacctgggggccttggcccaggtgcacgctgagaacggggacatcgtggaggaggtggaggctgaggcggtgtaccgagctgtcaccatcgccaagcaggcaaactgcccgctgtacgtcaccaaggtgatgagcaagggggcggccgacgccatcgctcaggccaagcgcagaggggtggtcgtgtttggggagcccatcaccgccagcctgggcaccgacggttcacactactggagcaagaactgggccaaggccgcagccttcgtcacatcaccccctgtcaacccagaccccaccacggcggaccacctcacctgcttgctgtccagcggggacctccaggtgacaggcagcgcccactgcaccttcaccactgcccagaaggctgtgggcaaggacaacttcgcgctgatccccgagggcaccaacggcattgaggagcgcatgtcgatggtctgggagaaatgtgtggcctctgggaagatggacgagaatgagttcgtcgcggtgaccagtacaaatgctgccaaaatcttcaatttttacccaaggaaggggcgagtggctgtgggctctgacgctgacctggtcatatggaaccccaaggccaccaagatcatctctgccaagacccacaatctgctggcggagatccacggtgtgccccgtggactgtatgacgggcccgtccacgaggtgatggtgcctgccaagccagggagtggcgctccggcccgcgcgtcctgcccaggcaagatctccgtccctcctgtgcgcaacctacatcagtcggggttcagcctatctgggtctcaggctgatgaccacatcgcccgacgcacagcacagaagatcatggcaccacctggcggccgctccaacatcacctctctctcctagacgcccaggaccggccctgtgagccgtgctggccccacccgaggccgcgggggccccagggcactcgcccccctccttagcattttcttttgtagaagtttctcgaaggtgcttggcggtcttgccttccccctccccacaggctctccttgtggggtcccaggtcctgctgccaagagcccctcaagagaagggctgaacctggggagatgtcactgccagggtgaggtggagccacatggcagggacaatgccggcagcctgagcccaggcaccccagtgcccgctgggcccagcctggggac

SEQ ID NO: 126858 - DNA, 5209 bp, Homo sapiens
  Payload ID: 4872
  Gene Symbol: DPYSL5
  Gene Name: dihydropyrimidinase-like 5
  Uniprot ID: Q9BPU6
  ENST ID: ENST00000288699
  CDS Start-End: 159-1853
ccccactctggactcccgcgctgggcgcgctgaggcggcccccgagcgagcgcgcgtgcagccgccgccgccccgagcacccgcagctccggcgccgcggcgagacggagacggaccgagccacgggcccccgcggccgcagcatctcggaggagaacatgcttgccaactcagccagcgtgaggatcctcatcaagggaggcaaggtggtgaacgatgactgcacccacgaggctgacgtctacatcgagaatggcatcatccagcaggtgggccgcgagctcatgatccctggcggggccaaggtgattgatgccacaggaaaactggtgatccctggtggcatcgacaccagcacccacttccaccagaccttcatgaatgccacgtgcgtggacgacttctaccatgggaccaaggcagcactcgtcggaggcaccaccatgatcatcggccacgtcctgcccgacaaggagacctcccttgtggacgcttatgagaagtgccgaggtctggccgaccccaaggtctgctgtgattacgccctccacgtggggatcacctggtgggcacccaaggtgaaagcagaaatggagacactggtgagggagaagggtgtcaactcgttccagatgttcatgacctacaaggacctgtacatgcttcgagacagtgagctgtaccaagtgttgcacgcttgcaaggacattggggcaatcgcccgcgtccatgctgaaaatggggagcttgtggccgagggtgctaaggaggcactggatttggggatcacaggcccagaaggaatcgagatcagccgtccagaggagctggaagctgaagccactcatcgtgttatcaccattgcaaacaggactcactgtccaatctacctggtcaacgtgtccagtatctcggctggtgacgttatcgcagctgctaagatgcaagggaaggttgtgctggcggagaccaccactgcacatgccacgctgacaggcttacactactaccaccaggactggtcccacgcggctgcctatgtcacggtgcctcccctgagactggacaccaacacctcaacctacctcatgagcctgctggccaatgacactctgaacatcgtggcatcagatcaccggcctttcaccacaaagcagaaagctatgggcaaggaagacttcaccaagatcccacatggagtgagtggcgtgcaggaccgcatgagcgtcatctgggagagaggagtggttggaggaaagatggatgagaaccgttttgtggccgttaccagttccaacgcagctaagcttctgaacctgtatccccgcaagggccgcattattcccggagccgatgctgatgtggtggtgtgggacccagaagccacaaagaccatctcagccagcacgcaggtccagggaggagacttcaacctgtatgagaacatgcgctgccacggcgtgccactggtcaccatcagccgggggcgcgtcgtgtatgagaacggcgtcttcatgtgcgccgagggcaccggcaagttctgtcccctgaggtccttcccagacactgtctacaagaagctggtccagagagagaagactttaaaggttagaggagtggaccgcactccctacctgggggatgtcgctgttgtcgtgcaccctgggaaaaaagagatgggaaccccactcgcagacactcctacccggcccgtcacccggcatgggggcatgagggaccttcacgaatccagcttcagcctctctggctctcagatcgatgaccatgttccaaagcgagcttcagctcggatcctcgctcctcccggaggcaggtcgagtggcatttggtaaaggcattgccaagccccccgagtgaggacgcaccgccgccaccagcccgcaactctccagccgaagctgcaggggcaggagaggctgggctgggtggcacaccacccgaggggggccccgggacccacggagccctccctatgtctgcaaagtgattcactgtgcttcgagccaactctaacaggcactttgagatgtgttcctcctgctgtagtcctttctgccttggcctcggcgggcttttctggggcccaggaagcccacactatgcacagagcccaatgcatagagccctggccagcccttcctctcactcctgcctccgctggctttgggaaagcccagactttagtgccctgccccctggctgactggccagttgcccagagcactttagcagatgtggtttcaaagtaaaggcctcctcccccaccccttaggccccgtggtgacatttcccaagtcagacagatgtcagcttcccagccatgcccaggacgtcctatctcccccaacccacctctggccctgtgtaggggcagggatgggggtggctgggactcctggtgcccctcgccagcttctcctgcgccccgcccacaccctcggggggtcacaggcccagaagggtagctgggcggggctcgaggctggtgccaggcgcgtgtaaatggttttgttttgcacgtttggtttgcgcagtagtttggtttgacttgtttgtgcatcctgtgaaaaataacggtgcttgtgtcactagcatagaatagcgacaggaatagatgtggtccttaggagacgctgcacttgacaccaaccagacagcacagggcaggggtggtggagggggctgggctcacaggcctctcttttccccgcctgcagtcttctgggctgcgggaggccctggccctttccccttcccctcccctccttgtctagtttcccacattccaaaagggggcctgggatgctagccccagagatgccagcccttcaggaagcaggtgtcctttcccctctctgcccctgatcactcccagcactccccttgccttcccctgtcttcacctgccaccacacacacacacacacacacacacacacacacacacgcacggcttcctataacttcttcctgctggacagagactcagcgctcctcctgtgtgactggcaagaggcctcatgcctgctgagagaggaggagtgggagaggggcttgccagacaccagagagggagaccccaggcccacaggacctggctgtcgaacccgcattgctgctcaggtgccgtgatctcccgtggtcggcaccaggcccttgccagctcatggcctcatcttctcccctgtccatccaggtgggccctccctgcttctaaagccccacagaagttcccatggaaacactagaggccgggtgtctccttccacctccagtgatctgggaagtgacccagccgcctgcccttgttaagcctggtctgccccgtgggaagtgacttcatgttgcacatgtgatttcagcccccgaggcttgcgcgaggcttctggaccctcggttaaaggtcagcccctggccgggtgcggtggctcacgcctgtaatcccagcactttgggaggccaaggcgggtggatcatggagtcaggagatcgagaccatcctggctaacacggtgaaaccccgtctctactaaaaatacaaaaattacccaggcgtggtggcgggcgcctgtagtcccagctactgaggaggctgaggcaggagaatagcgtgaacccgggaggcggagcttgcagtgagccaagatcacgccactgcacttcagcctggacgacagagtgagactccatctcaaaaaacagacaaacaaaaaagtcagcccctgcacatctctgtagtgcttttcatgtattcaaaccacttccgtatatgacctctcacttagtcctcatgacaatggagcacttattattcttcccattttacagatgaggaaactaagacccagaaagttcaggtcctctgaccccagaagtgtctgtgatgaccctcccaaccttggctatctaccccacctgtggagaggaggtctggggtgacatctattgtagatcccacctgagagtttaaccaatgagaagacttactttcctggtaggcagcctgctttgttttgcacaggaagatagattttttttctcatctttcttataaacaacctcatgcacattctgtgtttgagccaagactagtcacccattgggggctaaccgtgcagtgtgagctgcgtccacaccctcacttctcccttcactccccctttcctcactcaggggctgagaggacagaggtggtcagccggggagcagaggtggcgaaggggctcatggcaagtggcagccattggaacaggggtgaggacccaggcctgggaaagccaccagggatgggggaaaccatgacgccgcctcctggtgcagtgcacaccatctctatccctgtcagccctcactgggtcatgggccttgggcagatgtcaaagagcccagcagcagcggtggtggccagctgggcagagcatccttgcttgggctaggaaagctttaccttctctgagtgcctccgcctgagagatgtgtgacccgtggcaccagggaaccacgtcttggagtggtccactgtaggccatgcgcttcatccacccccagtccctacataggccctacccttgcccgggagcttctagatagaaatcagaaagagattcaaggagccaaatgagcggtcagcccccaccatgcactccttgccccgtgcagagctccagccagcttcgtcaccagccccactggctcctggttggaacgaaagggtctctggttgcactgaatgcagctctcaaactggtcttgtacttgctgaataaatactgttgttcttgccttagctgctctctaggtttgtggggttaagttgccagaaaattgtgctactgtgtgtgcgtgtgcgtgcgtgtgtgtagtgctaggagtccacagtaggtctctgtcaagccgatgtcgtgatgagggcttttctgatactgacccagaagccacagaaccacaaggaaacccaaaccccctccagctgctgaggcgcaggcacagcctggggtcggatggagcctccagcaccccagcacccaggtgacttccccactcccctgtaaatgtcatggtgctaagactgtgtcaaccccaagacgacacatggtcctgtgctttggccaccgtttgaggcaaaaactaaacagcccgacacgttgtgttctggtgcaggtttgtattaaactgtagctacttctca

SEQ ID NO: 126859 - DNA, 1972 bp, Homo sapiens
  Payload ID: 4872
  Gene Symbol: DPYSL5
  Gene Name: dihydropyrimidinase-like 5
  Uniprot ID: Q9BPU6
  ENST ID: ENST00000401478
  CDS Start-End: 76-1770
ctcccgggctaggacatcctcctctcccccttctgtttctgcgtgaggcgcacaaaagggcggggagccgggaacatgcttgccaactcagccagcgtgaggatcctcatcaagggaggcaaggtggtgaacgatgactgcacccacgaggctgacgtctacatcgagaatggcatcatccagcaggtgggccgcgagctcatgatccctggcggggccaaggtgattgatgccacaggaaaactggtgatccctggtggcatcgacaccagcacccacttccaccagaccttcatgaatgccacgtgcgtggacgacttctaccatgggaccaaggcagcactcgtcggaggcaccaccatgatcatcggccacgtcctgcccgacaaggagacctcccttgtggacgcttatgagaagtgccgaggtctggccgaccccaaggtctgctgtgattacgccctccacgtggggatcacctggtgggcacccaaggtgaaagcagaaatggagacactggtgagggagaagggtgtcaactcgttccagatgttcatgacctacaaggacctgtacatgcttcgagacagtgagctgtaccaagtgttgcacgcttgcaaggacattggggcaatcgcccgcgtccatgctgaaaatggggagcttgtggccgagggtgctaaggaggcactggatttggggatcacaggcccagaaggaatcgagatcagccgtccagaggagctggaagctgaagccactcatcgtgttatcaccattgcaaacaggactcactgtccaatctacctggtcaacgtgtccagtatctcggctggtgacgttatcgcagctgctaagatgcaagggaaggttgtgctggcggagaccaccactgcacatgccacgctgacaggcttacactactaccaccaggactggtcccacgcggctgcctatgtcacggtgcctcccctgagactggacaccaacacctcaacctacctcatgagcctgctggccaatgacactctgaacatcgtggcatcagatcaccggcctttcaccacaaagcagaaagctatgggcaaggaagacttcaccaagatcccacatggagtgagtggcgtgcaggaccgcatgagcgtcatctgggagagaggagtggttggaggaaagatggatgagaaccgttttgtggccgttaccagttccaacgcagctaagcttctgaacctgtatccccgcaagggccgcattattcccggagccgatgctgatgtggtggtgtgggacccagaagccacaaagaccatctcagccagcacgcaggtccagggaggagacttcaacctgtatgagaacatgcgctgccacggcgtgccactggtcaccatcagccgggggcgcgtcgtgtatgagaacggcgtcttcatgtgcgccgagggcaccggcaagttctgtcccctgaggtccttcccagacactgtctacaagaagctggtccagagagagaagactttaaaggttagaggagtggaccgcactccctacctgggggatgtcgctgttgtcgtgcaccctgggaaaaaagagatgggaaccccactcgcagacactcctacccggcccgtcacccggcatgggggcatgagggaccttcacgaatccagcttcagcctctctggctctcagatcgatgaccatgttccaaagcgagcttcagctcggatcctcgctcctcccggaggcaggtcgagtggcatttggtaaaggcattgccaagccccccgagtgaggacgcaccgccgccaccagcccgcaactctccagccgaagctgcaggggcaggagaggctgggctgggtggcacaccacccgaggggggccccgggacccacggagccctccctatgtctgcaaagtgattcactgtgcttcgagccaactctaacaggcactttgagatgtgttc

SEQ ID NO: 126860 - DNA, 647 bp, Homo sapiens
  Payload ID: 4872
  Gene Symbol: DPYSL5
  Gene Name: dihydropyrimidinase-like 5
  ENST ID: ENST00000431402
  CDS Start-End: 79-647
atcggggctaagccggggcgctcttggggtcctctttgtacgcccgcgaagcgccgtgccgggccttgctcatagaacatgcttgccaactcagccagcgtgaggatcctcatcaagggaggcaaggtggtgaacgatgactgcacccacgaggctgacgtctacatcgagaatggcatcatccagcaggtgggccgcgagctcatgatccctggcggggccaaggtgattgatgccacaggaaaactggtgatccctggtggcatcgacaccagcacccacttccaccagaccttcatgaatgccacgtgcgtggacgacttctaccatgggaccaaggcagcactcgtcggaggcaccaccatgatcatcggccacgtcctgcccgacaaggagacctcccttgtggacgcttatgagaagtgccgaggtctggccgaccccaaggtctgctgtgattacgccctccacgtggggatcacctggtgggcacccaaggtgaaagcagaaatggagacactggtgagggagaagggtgtcaactcgttccagatgttcatgacctacaaggacctgtacatgcttcgagacagtgagctgtaccaagtgttgcacgcttgcaaggacattggggcaatcgcccgcgt

SEQ ID NO: 126861 - DNA, 621 bp, Homo sapiens
  Payload ID: 4872
  Gene Symbol: DPYSL5
  Gene Name: dihydropyrimidinase-like 5
  ENST ID: ENST00000450961
  CDS Start-End: 126-621
gtcctccggaaccgcccccggccctccctggggacccgtgcctcagcgcgtccaggctttgtggtgtcctgagtcgccatggaaacccgagggaacgcggagccgggtgctaggggggtcggaacatgcttgccaactcagccagcgtgaggatcctcatcaagggaggcaaggtggtgaacgatgactgcacccacgaggctgacgtctacatcgagaatggcatcatccagcaggtgggccgcgagctcatgatccctggcggggccaaggtgattgatgccacaggaaaactggtgatccctggtggcatcgacaccagcacccacttccaccagaccttcatgaatgccacgtgcgtggacgacttctaccatgggaccaaggcagcactcgtcggaggcaccaccatgatcatcggccacgtcctgcccgacaaggagacctcccttgtggacgcttatgagaagtgccgaggtctggccgaccccaaggtctgctgtgattacgccctccacgtggggatcacctggtgggcacccaaggtgaaagcagaaatggagacactggtgagggagaagggtgtcaactcgttccagatgttcatgacctacaaggacc

SEQ ID NO: 126862 - DNA, 560 bp, Homo sapiens
  Payload ID: 4872
  Gene Symbol: DPYSL5
  Gene Name: dihydropyrimidinase-like 5
  ENST ID: ENST00000434719
  CDS Start-End: 37-560
aatgcgtgctcgcggggttgcaaagccctggggaacatgcttgccaactcagccagcgtgaggatcctcatcaagggaggcaaggtggtgaacgatgactgcacccacgaggctgacgtctacatcgagaatggcatcatccagcaggtgggccgcgagctcatgatccctggcggggccaaggtgattgatgccacaggaaaactggtgatccctggtggcatcgacaccagcacccacttccaccagaccttcatgaatgccacgtgcgtggacgacttctaccatgggaccaaggcagcactcgtcggaggcaccaccatgatcatcggccacgtcctgcccgacaaggagacctcccttgtggacgcttatgagaagtgccgaggtctggccgaccccaaggtctgctgtgattacgccctccacgtggggatcacctggtgggcacccaaggtgaaagcagaaatggagacactggtgagggagaagggtgtcaactcgttccagatgttcatgacctacaaggacctgtacatgcttcgagacagtgagctgta

SEQ ID NO: 126863 - DNA, 5128 bp, Homo sapiens
  Payload ID: 4872
  Gene Symbol: DPYSL5
  Gene Name: dihydropyrimidinase-like 5
  Uniprot ID: Q9BPU6
  ENST ID: ENST00000614712
  CDS Start-End: 79-1773
atcggggctaagccggggcgctcttggggtcctctttgtacgcccgcgaagcgccgtgccgggccttgctcatagaacatgcttgccaactcagccagcgtgaggatcctcatcaagggaggcaaggtggtgaacgatgactgcacccacgaggctgacgtctacatcgagaatggcatcatccagcaggtgggccgcgagctcatgatccctggcggggccaaggtgattgatgccacaggaaaactggtgatccctggtggcatcgacaccagcacccacttccaccagaccttcatgaatgccacgtgcgtggacgacttctaccatgggaccaaggcagcactcgtcggaggcaccaccatgatcatcggccacgtcctgcccgacaaggagacctcccttgtggacgcttatgagaagtgccgaggtctggccgaccccaaggtctgctgtgattacgccctccacgtggggatcacctggtgggcacccaaggtgaaagcagaaatggagacactggtgagggagaagggtgtcaactcgttccagatgttcatgacctacaaggacctgtacatgcttcgagacagtgagctgtaccaagtgttgcacgcttgcaaggacattggggcaatcgcccgcgtccatgctgaaaatggggagcttgtggccgagggtgctaaggaggcactggatttggggatcacaggcccagaaggaatcgagatcagccgtccagaggagctggaagctgaagccactcatcgtgttatcaccattgcaaacaggactcactgtccaatctacctggtcaacgtgtccagtatctcggctggtgacgttatcgcagctgctaagatgcaagggaaggttgtgctggcggagaccaccactgcacatgccacgctgacaggcttacactactaccaccaggactggtcccacgcggctgcctatgtcacggtgcctcccctgagactggacaccaacacctcaacctacctcatgagcctgctggccaatgacactctgaacatcgtggcatcagatcaccggcctttcaccacaaagcagaaagctatgggcaaggaagacttcaccaagatcccacatggagtgagtggcgtgcaggaccgcatgagcgtcatctgggagagaggagtggttggaggaaagatggatgagaaccgttttgtggccgttaccagttccaacgcagctaagcttctgaacctgtatccccgcaagggccgcattattcccggagccgatgctgatgtggtggtgtgggacccagaagccacaaagaccatctcagccagcacgcaggtccagggaggagacttcaacctgtatgagaacatgcgctgccacggcgtgccactggtcaccatcagccgggggcgcgtcgtgtatgagaacggcgtcttcatgtgcgccgagggcaccggcaagttctgtcccctgaggtccttcccagacactgtctacaagaagctggtccagagagagaagactttaaaggttagaggagtggaccgcactccctacctgggggatgtcgctgttgtcgtgcaccctgggaaaaaagagatgggaaccccactcgcagacactcctacccggcccgtcacccggcatgggggcatgagggaccttcacgaatccagcttcagcctctctggctctcagatcgatgaccatgttccaaagcgagcttcagctcggatcctcgctcctcccggaggcaggtcgagtggcatttggtaaaggcattgccaagccccccgagtgaggacgcaccgccgccaccagcccgcaactctccagccgaagctgcaggggcaggagaggctgggctgggtggcacaccacccgaggggggccccgggacccacggagccctccctatgtctgcaaagtgattcactgtgcttcgagccaactctaacaggcactttgagatgtgttcctcctgctgtagtcctttctgccttggcctcggcgggcttttctggggcccaggaagcccacactatgcacagagcccaatgcatagagccctggccagcccttcctctcactcctgcctccgctggctttgggaaagcccagactttagtgccctgccccctggctgactggccagttgcccagagcactttagcagatgtggtttcaaagtaaaggcctcctcccccaccccttaggccccgtggtgacatttcccaagtcagacagatgtcagcttcccagccatgcccaggacgtcctatctcccccaacccacctctggccctgtgtaggggcagggatgggggtggctgggactcctggtgcccctcgccagcttctcctgcgccccgcccacaccctcggggggtcacaggcccagaagggtagctgggcggggctcgaggctggtgccaggcgcgtgtaaatggttttgttttgcacgtttggtttgcgcagtagtttggtttgacttgtttgtgcatcctgtgaaaaataacggtgcttgtgtcactagcatagaatagcgacaggaatagatgtggtccttaggagacgctgcacttgacaccaaccagacagcacagggcaggggtggtggagggggctgggctcacaggcctctcttttccccgcctgcagtcttctgggctgcgggaggccctggccctttccccttcccctcccctccttgtctagtttcccacattccaaaagggggcctgggatgctagccccagagatgccagcccttcaggaagcaggtgtcctttcccctctctgcccctgatcactcccagcactccccttgccttcccctgtcttcacctgccaccacacacacacacacacacacacacacacacacacacgcacggcttcctataacttcttcctgctggacagagactcagcgctcctcctgtgtgactggcaagaggcctcatgcctgctgagagaggaggagtgggagaggggcttgccagacaccagagagggagaccccaggcccacaggacctggctgtcgaacccgcattgctgctcaggtgccgtgatctcccgtggtcggcaccaggcccttgccagctcatggcctcatcttctcccctgtccatccaggtgggccctccctgcttctaaagccccacagaagttcccatggaaacactagaggccgggtgtctccttccacctccagtgatctgggaagtgacccagccgcctgcccttgttaagcctggtctgccccgtgggaagtgacttcatgttgcacatgtgatttcagcccccgaggcttgcgcgaggcttctggaccctcggttaaaggtcagcccctggccgggtgcggtggctcacgcctgtaatcccagcactttgggaggccaaggcgggtggatcatggagtcaggagatcgagaccatcctggctaacacggtgaaaccccgtctctactaaaaatacaaaaattacccaggcgtggtggcgggcgcctgtagtcccagctactgaggaggctgaggcaggagaatagcgtgaacccgggaggcggagcttgcagtgagccaagatcacgccactgcacttcagcctggacgacagagtgagactccatctcaaaaaacagacaaacaaaaaagtcagcccctgcacatctctgtagtgcttttcatgtattcaaaccacttccgtatatgacctctcacttagtcctcatgacaatggagcacttattattcttcccattttacagatgaggaaactaagacccagaaagttcaggtcctctgaccccagaagtgtctgtgatgaccctcccaaccttggctatctaccccacctgtggagaggaggtctggggtgacatctattgtagatcccacctgagagtttaaccaatgagaagacttactttcctggtaggcagcctgctttgttttgcacaggaagatagattttttttctcatctttcttataaacaacctcatgcacattctgtgtttgagccaagactagtcacccattgggggctaaccgtgcagtgtgagctgcgtccacaccctcacttctcccttcactccccctttcctcactcaggggctgagaggacagaggtggtcagccggggagcagaggtggcgaaggggctcatggcaagtggcagccattggaacaggggtgaggacccaggcctgggaaagccaccagggatgggggaaaccatgacgccgcctcctggtgcagtgcacaccatctctatccctgtcagccctcactgggtcatgggccttgggcagatgtcaaagagcccagcagcagcggtggtggccagctgggcagagcatccttgcttgggctaggaaagctttaccttctctgagtgcctccgcctgagagatgtgtgacccgtggcaccagggaaccacgtcttggagtggtccactgtaggccatgcgcttcatccacccccagtccctacataggccctacccttgcccgggagcttctagatagaaatcagaaagagattcaaggagccaaatgagcggtcagcccccaccatgcactccttgccccgtgcagagctccagccagcttcgtcaccagccccactggctcctggttggaacgaaagggtctctggttgcactgaatgcagctctcaaactggtcttgtacttgctgaataaatactgttgttcttgccttagctgctctctaggtttgtggggttaagttgccagaaaattgtgctactgtgtgtgcgtgtgcgtgcgtgtgtgtagtgctaggagtccacagtaggtctctgtcaagccgatgtcgtgatgagggcttttctgatactgacccagaagccacagaaccacaaggaaacccaaaccccctccagctgctgaggcgcaggcacagcctggggtcggatggagcctccagcaccccagcacccaggtgacttccccactcccctgtaaatgtcatggtgctaagactgtgtcaaccccaagacgacacatggtcctgtgctttggccaccgtttgaggcaaaaactaaacagcccgacacgttgtgttctggtgcaggtttgtattaaactgtagctacttctc

SEQ ID NO: 126864 - DNA, 1779 bp, Homo sapiens
  Payload ID: 4873
  Gene Symbol: DPYD
  Gene Name: dihydropyrimidine dehydrogenase
  Uniprot ID: Q12882
  ENST ID: ENST00000306031
  CDS Start-End: 128-649
cgcgccgccggccctagtctgcctgttttcgactcgcgctccggctgctgtcacttggctctctggctggagcttgaggacgcaaggagggtttgtcactggcagactcgagactgtaggcactgccatggcccctgtgctcagtaaggactcggcggacatcgagagtatcctggctttaaatcctcgaacacaaactcatgcaactctgtgttccacttcggccaagaaattagacaagaaacattggaaaagaaatcctgataagaactgctttaattgtgagaagctggagaataattttgatgacatcaagcacacgactcttggtgagcgaggagctctccgagaagcaatgagatgcctgaaatgtgcagatgccccgtgtcagaagagctgtccaactaatcttgatattaaatcattcatcacaagtattgcaaacaagaactattatggagctgctaagatgatattttctgacaacccacttggtctgacttgtggaatggtatgtccaacctctgatctttgtgtaggtggatgcaatttatatgccactgaagagggacccattaatattggtggattgcagcaatttgctactgagactttgatcctggctttctctttaatgaatcatttgtaaagactttgattcttcagacactcttgggctctctgacgtctcctatttggagtcaacaagcaggttaattcccatgtatcatttaaatgatcagcttatatgaagggtatagtaagattttataatctttggagactagttggctagaaggtcaaattaagtgcccgtcaacctagatttttagttaatgacttactgatctggttttgtcagcataaacacaatgtgttctttcattttgggacccttcccataatattcctcaagcttaagtctcactttgctcttagtaataaatcagggttattcccttcctgctttctgacaggttaattctaaagaagagctcctgggaataagaaaataaaaacaattcgaggttgtggattgttgcaataaattctgggatttaatttcttttcttaccaaattcaaaattgcattaggcttacctgaccactacgaagtatgatctttactacctgtgaaaatccttagttgatggagaagattcacttgaattcctcctcacttttctttggggacccattgcctcttcattaaaccagggcaagctttcacagatgcagtaagtgaaaggtcacatagtatgtatatcaactaacacagcattttaaaacaaaatgaattaaaatgatatcattagtaattgatctggtcatgagaggtgtgtgtgtttgtgtgtgtgtgtgtgtgtgtgtgagagagagagagagaaagagagagagagacagggaaatacattattcctctggaaactctcacatggttttaattcttttctctgggaacactgtccctctgggaactcttacttggttctaccactcattcccagagcagagtctatttaagacagagacatgtgccttcagaacagaatttattagaaacttactaaaatttgagagtggtcacacttaggtcttgccataagtatcacctaatgaagagttatgcatagattaggactgcagtagatgcattttaagtgaatcaaggaatttagaataggaatgtatctgcttatttcattccaattatagtttgtataattgtaatttcaatatcaaattataaattaaaaatgtcctcgtgggaactactga

SEQ ID NO: 126865 - DNA, 4412 bp, Homo sapiens
  Payload ID: 4873
  Gene Symbol: DPYD
  Gene Name: dihydropyrimidine dehydrogenase
  Uniprot ID: Q12882
  ENST ID: ENST00000370192
  CDS Start-End: 102-3179
tttcgactcgcgctccggctgctgtcacttggctctctggctggagcttgaggacgcaaggagggtttgtcactggcagactcgagactgtaggcactgccatggcccctgtgctcagtaaggactcggcggacatcgagagtatcctggctttaaatcctcgaacacaaactcatgcaactctgtgttccacttcggccaagaaattagacaagaaacattggaaaagaaatcctgataagaactgctttaattgtgagaagctggagaataattttgatgacatcaagcacacgactcttggtgagcgaggagctctccgagaagcaatgagatgcctgaaatgtgcagatgccccgtgtcagaagagctgtccaactaatcttgatattaaatcattcatcacaagtattgcaaacaagaactattatggagctgctaagatgatattttctgacaacccacttggtctgacttgtggaatggtatgtccaacctctgatctttgtgtaggtggatgcaatttatatgccactgaagagggacccattaatattggtggattgcagcaatttgctactgaggtattcaaagcaatgagtatcccacagatcagaaatccttcgctgcctcccccagaaaaaatgtctgaagcctattctgcaaagattgctctttttggtgctgggcctgcaagtataagttgtgcttcctttttggctcgattggggtactctgacatcactatatttgaaaaacaagaatatgttggtggtttaagtacttctgaaattcctcagttccggctgccgtatgatgtagtgaattttgagattgagctaatgaaggaccttggtgtaaagataatttgcggtaaaagcctttcagtgaatgaaatgactcttagcactttgaaagaaaaaggctacaaagctgctttcattggaataggtttgccagaacccaataaagatgccatcttccaaggcctgacgcaggaccaggggttttatacatccaaagactttttgccacttgtagccaaaggcagtaaagcaggaatgtgcgcctgtcactctccattgccatcgatacggggagtcgtgattgtacttggagctggagacactgcctttgactgtgcaacatctgctctacgttgtggagctcgccgtgtgttcatcgtcttcagaaaaggctttgttaatataagagctgtccctgaggagatggaacttgctaaggaagaaaagtgtgaatttctgccattcctgtccccacggaaggttatagtaaaaggtgggagaattgttgctatgcagtttgttcggacagagcaagatgaaactggaaaatggaatgaagatgaagatcagatggtccatctgaaagccgatgtggtcatcagtgcctttggttcagttctgagtgatcctaaagtaaaagaagccttgagccctataaaatttaacagatggggtctcccagaagtagatccagaaactatgcaaactagtgaagcatgggtatttgcaggtggtgatgtcgttggtttggctaacactacagtggaatcggtgaatgatggaaagcaagcttcttggtacattcacaaatacgtacagtcacaatatggagcttccgtttctgccaagcctgaactacccctcttttacactcctattgatctggtggacattagtgtagaaatggccggattgaagtttataaatccttttggtcttgctagcgcaactccagccaccagcacatcaatgattcgaagagcttttgaagctggatggggttttgccctcaccaaaactttctctcttgataaggacattgtgacaaatgtttcccccagaatcatccggggaaccacctctggccccatgtatggccctggacaaagctcctttctgaatattgagctcatcagtgagaaaacggctgcatattggtgtcaaagtgtcactgaactaaaggctgactttccagacaacattgtgattgctagcattatgtgcagttacaataaaaatgactggacggaacttgccaagaagtctgaggattctggagcagatgccctggagttaaatttatcatgtccacatggcatgggagaaagaggaatgggcctggcctgtgggcaggatccagagctggtgcggaacatctgccgctgggttaggcaagctgttcagattcctttttttgccaagctgaccccaaatgtcactgatattgtgagcatcgcaagagctgcaaaggaaggtggtgccaatggcgttacagccaccaacactgtctcaggtctgatgggattaaaatctgatggcacaccttggccagcagtggggattgcaaagcgaactacatatggaggagtgtctgggacagcaatcagacctattgctttgagagctgtgacctccattgctcgtgctctgcctggatttcccattttggctactggtggaattgactctgctgaaagtggtcttcagtttctccatagtggtgcttccgtcctccaggtatgcagtgccattcagaatcaggatttcactgtgatcgaagactactgcactggcctcaaagccctgctttatctgaaaagcattgaagaactacaagactgggatggacagagtccagctactgtgagtcaccagaaagggaaaccagttccacgtatagctgaactcatggacaagaaactgccaagttttggaccttatctggaacagcgcaagaaaatcatagcagaaaacaagattagactgaaagaacaaaatgtagctttttcaccacttaagagaaactgttttatccccaaaaggcctattcctaccatcaaggatgtaataggaaaagcactgcagtaccttggaacatttggtgaattgagcaacgtagagcaagttgtggctatgattgatgaagaaatgtgtatcaactgtggtaaatgctacatgacctgtaatgattctggctaccaggctatacagtttgatccagaaacccacctgcccaccataaccgacacttgtacaggctgtactctgtgtctcagtgtttgccctattgtcgactgcatcaaaatggtttccaggacaacaccttatgaaccaaagagaggcgtacccttatctgtgaatccggtgtgttaaggtgatttgtgaaacagttgctgtgaactttcatgtcacctacatatgctgatcttttaaaatcatgatccttgtgttcagctctttccaaattaaaacaaatatacattttctaaataaaaatatgtaatttcaaaatacatttgtaagtgtaaaaaatgtctcatgtcaatgaccattcaattagtggtcataaaatagaataattcttttctgaggatagtagttaaataactgtgtggcagttaattggatgttcactgccagttgtcttatgtgaaaaattaacttttttgtggcaattagtgtgacagtttccaaattgccctatgctgtgctccatatttgatttctaattgtaagtgaaattaagcattttgaaacaaagtactctttaacatacaagaaaatgtatccaaggaaacattttatcattaaaaattacctttaattttaatgctgtttctaagaaaatgtagttagctccataaagtacaaatgaagaaagtcaaaaaattatttgctatggcaggataagaaagcctaaaattgagtttgtagaactttattaagtaaaatccccttcgctgaaattgcttatttttggtgttggatagaggatagggagaatatttactaactaaataccattcactactcatgcgtgagatgggtgtacaaactcatcctcttttaatggcatttctctttaaactatgttcctaacaaaatgagatgataggatagatcctggttaccactcttttgctgtgcacatacgggctctgactggttttaatagtcaccttcatgattatagcaactaatgtttgaacaaagctcaaagtatgcaatgcttcattattcaagaatgaaaaatataatgttgataatatatattaagtgtgccaaatcagtttgactactctctgttttagtgtttatgtttaaaagaaatatattttttgttattattagataatatttttgtatttctctattttcataatcagtaaatagtgtcatataaactcatttatctcctcttcatggcatcttcaatatgaatctataagtagtaaatcagaaagtaacaatctatggcttatttctatgacaaattcaagagctagaaaaataaaatgtttcattatgcacttttagaaatgcatatttgccacaaaacctgtattactgaataatatcaaataaaatatcataaagcattttaaa

SEQ ID NO: 126866 - DNA, 2068 bp, Homo sapiens
  Payload ID: 4874
  Gene Symbol: DUS1L
  Gene Name: dihydrouridine synthase 1-like
  Uniprot ID: Q6P1R4
  ENST ID: ENST00000306796
  CDS Start-End: 38-1459
cggcggacacggcggggccctcgcgcgcctggagacgatgccaaagctgcagggcttcgagttctggagccgcaccctgcgaggggcccgccacgtcgtggcccccatggtggaccagagcgagctggcctggaggctgctgagccggcgccacggggcacagctctgctacacgcccatgctgcatgcccaggtctttgtccgcgacgccaactaccggaaggagaacctgtactgcgaggtgtgccccgaggaccggcccctcatcgtgcagttctgtgccaatgacccggaggtgtttgttcaggcggctctcctggctcaggattactgtgacgccattgacctgaacttgggctgcccacagatgatagccaagagaggtcactatggcgcctttctgcaggacgagtgggacctgctccaaagaatgattttgctggcccacgagaaactctctgttcctgtcacgtgcaaaatccgtgtcttcccggagattgacaagaccgtgaggtacgcccagatgctggagaaggccggctgccagttgctgacggtgcacggacgcaccaaggagcagaaggggcccctgtcgggtgcagcgtcctgggagcatatcaaggctgtgcggaaggctgtggccatccctgtgtttgctaacgggaacatccagtgcctgcaggacgtggagcgctgcctccgggacacgggtgtgcagggcgtcatgagcgcagagggcaacctgcacaaccccgccctgttcgagggccggagccctgccgtgtgggagctggccgaggagtatctggacatcgtgcgggagcacccctgccccctgtcctacgtccgggcccacctcttcaagctgtggcaccacacgctgcaggtgcaccaggagctgcgagaggagctggccaaggtgaagaccctggagggcatcgctgctgtgagccaggagctgaagctgcggtgtcaggaggagatatccaggcaggagggagcgaagcccaccggcgacttgcccttccactggatctgccagccctacatccggccggggcccagggaggggagcaaggagaaggcaggtgcgcgcagcaagcgggccctggaggaagaggagggtggcacggaggtcctgtccaagaacaagcaaaagaagcagctgaggaacccccacaagaccttcgacccctctctgaagccaaaatatgcaaagtgtgaccagtgtggaaacccaaagggcaacagatgtgtgttcagcctgtgccgcggctgctgcaagaagcgagcctccaaagagactgcagactgcccaggtcacggattgctttttaaaaccaaattggagaagtctctggcctggaaagaggcccagcctgagctgcaggagcctcagccagcagcacctggaacaccaggtggcttctccgaagtcatgggcagtgccctggcctgaaggcccacaacccccacccccaggactgctgctggagcctggacacgtcctacttaagaaaatgccttttactcagggaatctcctgctacttaatgtggaaagacacgcccatgtcccccttcggcccactctgggggcctggaaatgctgcagtggggagcaggccccaggctggacctgccctgtcctcagcacgcgtgtgcaaaagtgaacaataaatcatttcaaagatgcgagagcccacagcctgtgaccactgccctctcagacccagggaggcatgagccggggcaggtgcggttggggccagtgggggcttctgaacaacaggatacatctaaatgaaggcagcatctgggtagacaaaagtgggggcttaggtcccctccccacctcccctaggcgcctccataggcaagtggccaaagcctccgggagcttcgtgatgcctcacagccttggaagcaccgcctgcgaggccacagtggctgctgctgggggctgttgaatctgagggccaggcttctcatttctctcaccaggccctgcctccaagcctagtcccagggagacagccctcaggaacccaaggccacccaggggtgac

SEQ ID NO: 126867 - DNA, 2151 bp, Homo sapiens
  Payload ID: 4874
  Gene Symbol: DUS1L
  Gene Name: dihydrouridine synthase 1-like
  Uniprot ID: Q6P1R4
  ENST ID: ENST00000354321
  CDS Start-End: 487-1908
ggaggagtctcgcgaggggcgcccctgtggcgtttcgggccagccgggccgcctggccgggtgcggagaaggaagctctgcccttcccctggcccggcgcggagccgattctcccgggaaggggccgggggtcctaacttcaccgccgggcggcctgctcagggccaggcccgcggggacgctggcgtcaaggtttcttcccccttcacgccagtcccctaccaggccgacatcgagtcccgctccccagggagggtcaagtcccaggggtccagcggctcccccgaggtccgctaggaggtggcggcactggagtggccgttctccagcctgcaccgacccccgcctttagtgcccccgcgtgtgacccaacggtggtactggagcggccttagaagggtgaccgctgcctctgagttgagtcttaagcccctcgttgggcctggctgaaccccgggtctgcgcctttcccccagcctggagacgatgccaaagctgcagggcttcgagttctggagccgcaccctgcgaggggcccgccacgtcgtggcccccatggtggaccagagcgagctggcctggaggctgctgagccggcgccacggggcacagctctgctacacgcccatgctgcatgcccaggtctttgtccgcgacgccaactaccggaaggagaacctgtactgcgaggtgtgccccgaggaccggcccctcatcgtgcagttctgtgccaatgacccggaggtgtttgttcaggcggctctcctggctcaggattactgtgacgccattgacctgaacttgggctgcccacagatgatagccaagagaggtcactatggcgcctttctgcaggacgagtgggacctgctccaaagaatgattttgctggcccacgagaaactctctgttcctgtcacgtgcaaaatccgtgtcttcccggagattgacaagaccgtgaggtacgcccagatgctggagaaggccggctgccagttgctgacggtgcacggacgcaccaaggagcagaaggggcccctgtcgggtgcagcgtcctgggagcatatcaaggctgtgcggaaggctgtggccatccctgtgtttgctaacgggaacatccagtgcctgcaggacgtggagcgctgcctccgggacacgggtgtgcagggcgtcatgagcgcagagggcaacctgcacaaccccgccctgttcgagggccggagccctgccgtgtgggagctggccgaggagtatctggacatcgtgcgggagcacccctgccccctgtcctacgtccgggcccacctcttcaagctgtggcaccacacgctgcaggtgcaccaggagctgcgagaggagctggccaaggtgaagaccctggagggcatcgctgctgtgagccaggagctgaagctgcggtgtcaggaggagatatccaggcaggagggagcgaagcccaccggcgacttgcccttccactggatctgccagccctacatccggccggggcccagggaggggagcaaggagaaggcaggtgcgcgcagcaagcgggccctggaggaagaggagggtggcacggaggtcctgtccaagaacaagcaaaagaagcagctgaggaacccccacaagaccttcgacccctctctgaagccaaaatatgcaaagtgtgaccagtgtggaaacccaaagggcaacagatgtgtgttcagcctgtgccgcggctgctgcaagaagcgagcctccaaagagactgcagactgcccaggtcacggattgctttttaaaaccaaattggagaagtctctggcctggaaagaggcccagcctgagctgcaggagcctcagccagcagcacctggaacaccaggtggcttctccgaagtcatgggcagtgccctggcctgaaggcccacaacccccacccccaggactgctgctggagcctggacacgtcctacttaagaaaatgccttttactcagggaatctcctgctacttaatgtggaaagacacgcccatgtcccccttcggcccactctgggggcctggaaatgctgcagtggggagcaggccccaggctggacctgccctgtcctcagcacgcgtgtgcaaaagtgaacaataaatcatttcaaagatgcgagagcc

SEQ ID NO: 126868 - DNA, 1040 bp, Homo sapiens
  Payload ID: 4874
  Gene Symbol: DUS1L
  Gene Name: dihydrouridine synthase 1-like
  ENST ID: ENST00000542088
  CDS Start-End: 1-718
atccaggcaggagggagcgaagcccaccggcgacttgcccttccactggatctgccagccctacatccggccggggcccagggaggggagcaaggagaaggcaggtgcgcgcagcaagcgggccctggaggaagaggagggtggcacggaggtcctgtccaagaacaagcaaaagaagcagctgaggaacccccacaagaccttcgacccctctctgaagccaaaatatgcaaagtgtgaccagtgtggaaacccaaaggtgagtgggttccggctgcaagccaccaaggcttcagctttgggggtgggcagggtggtctctgcactgcttggggtggcaggtctggtgcccgcccagctgggtttgcaacgtggctcaaggtggcatggatgcctcaggacggccccttgcttccagccaagcccctgcccaggcctggaggggaagagagtctgggtgggtgggggtgagggagaggcatctggcttgggagcagttcccagggctgcatccaggccgtgggcatctggcagaggcttccccagtggggctgctcccctgctggccagcctggccccgggagtggtgctggccacaggctcccgagatttcctgtgcccagggcaacagatgtgtgttcagcctgtgccgcggctgctgcaagaagcgagcctccaaagagactgcagactgcccaggtcacggattgctttttaaaaccaaattggagaagtctctggcctggaaagaggcccagcctgagctgcaggagcctcagccagcagcacctggaacaccaggtggcttctccgaagtcatgggcagtgccctggcctgaaggcccacaacccccacccccaggactgctgctggagcctggacacgtcctacttaagaaaatgccttttactcagggaatctcctgctacttaatgtggaaagacacgcccatgtcccccttcggcccactctgggggcctggaaatgctgcagtggggagcaggccccaggctggacctgccctgtcctcagcacgcgt

SEQ ID NO: 126869 - DNA, 1250 bp, Homo sapiens
  Payload ID: 4874
  Gene Symbol: DUS1L
  Gene Name: dihydrouridine synthase 1-like
  ENST ID: ENST00000538833
  CDS Start-End: 1-896
ttttgctggcccacgagaaactctctgttcctgtcacgtgcaaaatccgtgtcttcccggagattgacaagaccgtgaggtacgcccagatgctggagaaggccggctgccagttgctgacggtgcacggacgcaccaaggagcagaaggggcccctgtcgggtgcagcgtcctgggagcatatcaaggctgtgcggaaggctgtggccatccctgtgtttgctaacgggaacatccagtgcctgcaggacgtggagcgctgcctccgggacacgggtgtgcagggcgtcatgagcgcagagggcaacctgcacaaccccgccctgttcgagggccggagccctgccgtgtgggagctggccgaggagtatctggacatcgtgcgggagcacccctgccccctgtcctacgtccgggcccacctcttcaagctgtggcaccacacgctgcaggtgcaccaggagctgcgagaggagctggccaaggtgaagaccctggagggcatcgctgctgtgagccaggagctgaagctgcggtgtcaggaggagatatccaggcaggagggagcgaagcccaccggcgacttgcccttccactggatctgccagccctacatccggccggggcccagggaggggagcaaggagaaggcaggtgcgcgcagcaagcgggccctggaggaagaggagggtggcacggaggtcctgtccaagaacaagcaaaagaagcagctgaggaacccccacaagaccttcgacccctctctgaagccaaaatatgcaaagtgtgaccagtgtggaaacccaaagatgtgtgttcagcctgtgccgcggctgctgcaagaagcgagcctccaaagagactgcagactgcccaggtcacggattgctttttaaaaccaaattggagaagtctctggcctggaaagaggcccagcctgagctgcaggagcctcagccagcagcacctggaacaccaggtggcttctccgaagtcatgggcagtgccctggcctgaaggcccacaacccccacccccaggactgctgctggagcctggacacgtcctacttaagaaaatgccttttactcagggaatctcctgctacttaatgtggaaagacacgcccatgtcccccttcggcccactctgggggcctggaaatgctgcagtggggagcaggccccaggctggacctgccctgtcctcagcacgcgtgtgcaaaagtgaacaataaatcatttcaaaga

SEQ ID NO: 126870 - DNA, 725 bp, Homo sapiens
  Payload ID: 4874
  Gene Symbol: DUS1L
  Gene Name: dihydrouridine synthase 1-like
  ENST ID: ENST00000580731
  CDS Start-End: 1-575
ctaacgggaacatccagtgcctgcaggacgtggagcgctgcctccgggacacgggtgtgcagggcgtcatgagcgcaggtgggcagggcccaggacagcagccagggccccatgcacacggcctgataccaccgcccagagggcaacctgcacaaccccgccctgttcgagggccggagccctgccgtgtgggagctggccgaggagtatctggacatcgtgcgggagcacccctgccccctgtcctacgtccgggcccacctcttcaagctgtggcaccacacgctgcaggtgcaccaggagctgcgagaggagctggccaaggtgaagaccctggagggcatcgctgctgtgagccaggagctgaagctgcggtgtcaggcaggagatatccaggcaggagggagcgaagcccaccggcgacttgcccttccactggatctgccagccctacatccggccggggcccagggaggggagcaaggagaaggcaggtgcgcgcagcaagcgggccctggaggaagaggagggtggcacggaggtcctgtccaagaacaagcaaaagaagcagctgaggaacccccacaagaccttcgacccctctctgaagccaaaatatgcaaagtgtgaccagtgtggaaacccaaagggcaacagatgtgtgttcagcctgtgccgcggctgctgcaagaagcgagcctccaaagagactgcagactgcccag

SEQ ID NO: 126871 - DNA, 473 bp, Homo sapiens
  Payload ID: 4874
  Gene Symbol: DUS1L
  Gene Name: dihydrouridine synthase 1-like
  ENST ID: ENST00000577574
  CDS Start-End: 1-458
ggcccagggaggggagcaaggagaaggcaggtgcgcgcagcaagcgggccctggaggaagaggagggtggcacggaggtcctgtccaagaacaagcaaaagaagcagctgaggaacccccacaagaccttcgacccctctctgaagccaaaatatgcaaagtgtgaccagtgtggaaacccaaagggcaacagatgtgtgttcagcctgtgccgcggctgctgcaagaagcgagcctccaaagagactgcagactgcccaggactgctgctggagcctggacacgtcctacttaagaaaatgccttttactcagggaatctcctgctacttaatgtggaaagacacgcccatgtcccccttcggcccactctgggggcctggaaatgctgcagtggggagcaggccccaggctggacctgccctgtcctcagcacgcgtgtgcaaaagtgaacaataaatcatttcaaagatg

SEQ ID NO: 126872 - DNA, 937 bp, Homo sapiens
  Payload ID: 4874
  Gene Symbol: DUS1L
  Gene Name: dihydrouridine synthase 1-like
  ENST ID: ENST00000578176
  CDS Start-End: 196-937
gcgcggagccttgggcccggctgcggcccggcggcggccccggcgcggtgcgggcgttcgcggcgccccgggagctgcaggggccccgggcggcggcgaggccggagaggggcgggcccgggacaccggcacccggcgccctcggagccaaaggcgcgcggcggacacggcggggccctcgcgcgcctggagacgatgccaaagctgcagggcttcgagttctggagccgcaccctgcgaggggcccgccacgtcgtggcccccatggtggaccagagcgagctggcctggaggctgctgagccggcgccacggggcacagctctgctacacgcccatgctgcatgcccaggtctttgtccgcgacgccaactaccggaaggagaacctgtactgcgaggtgtgccccgaggaccggcccctcatcgtgcagttctgtgccaatgacccggaggtgtttgttcaggcggctctcctggctcaggattactgtgacgccattgacctgaacttgggctgcccacagatgatagccaagagagttttgctggcccacgagaaactctctgttcctgtcacgtgcaaaatccgtgtcttcccggagattgacaagaccgtgaggtacgcccagatgctggagaaggccggctgccagttgctgacggtgcacggacgcaccaaggagcagaaggggcccctgtcgggtgcagcgtcctgggagcatatcaaggctgtgcggaaggctgtggccatccctgtgtttgctaacgggaacatccagtgcctgcaggacgtggagcgctgcctccgggacacgggtgtgcagggcgtcatgagcgcagagggcaacctgcacaaccccgccctgttcgagggccggagccctgccgtgtgggagctggccgaggagtatctggacatcgtgcgggagcacccct

SEQ ID NO: 126873 - DNA, 1212 bp, Homo sapiens
  Payload ID: 4874
  Gene Symbol: DUS1L
  Gene Name: dihydrouridine synthase 1-like
  ENST ID: ENST00000582529
  CDS Start-End: 286-1212
ctcggagccgggcgcggtttccggggaacgcgtttcccgccgcaccgtgggccgcccggaccgcgcaggaccgggcaccttccggtggcggcgcggagccttgggcccggctgcggcccggcggcggccccggcgcggtgcgggcgttcgcggcgccccgggagctgcaggggccccgggcggcggcgaggccggagaggggcgggcccgggacaccggcacccggcgccctcggagccaaaggcgcgcggcggacacggcggggccctcgcgcgcctggagacgatgccaaagctgcagggcttcgagttctggagccgcaccctgcgaggggcccgccacgtcgtggcccccatggtggaccagagcgagctggcctggaggctgctgagccggcgccacggggcacagctctgctacacgcccatgctgcatgcccaggtctttgtccgcgacgccaactaccggaaggagaacctgtactgcgaggtgtgccccgaggaccggcccctcatcgtgcagttctgtgccaatgacccggaggtgtttgttcaggcggctctcctggctcaggattactgtgacgccattgacctgaacttgggctgcccacagatgatagccaagagaggtcactatggcgcctttctgcaggacgagtgggacctgctccaaagaatgattttgctggcccacgagaaactctctgttcctgtcacgtgcaaaatccgtgtcttcccggagattgacaagaccgtgaggtacgcccagatgctggagaaggccggctgccagttgctgacggtgcacggacgcaccaaggagcagaaggggcccctgtcgggtgcagcgtcctgggagcatatcaaggctgtgcggaaggctgtggccatccctgtgtttgctaacgggaacatccagtgcctgcaggacgtggagcgctgcctccgggacacgggtgtgcagggcgtcatgagcgcagagggcaacctgcacaaccccgccctgttcgagggccggagccctgccgtgtgggagctggccgaggagtatctggacatcgtgcgggagcacccctgccccctgtcctacgtccgggcccacctcttcaagctgtggcaccacacgctgcaggtgcaccaggagctgcgagaggagctggccaaggtgaagaccctggagggcatcgctgctgtgagccaggagctgaag

SEQ ID NO: 126874 - DNA, 648 bp, Homo sapiens
  Payload ID: 4874
  Gene Symbol: DUS1L
  Gene Name: dihydrouridine synthase 1-like
  ENST ID: ENST00000577907
  CDS Start-End: 193-648
cggagccttgggcccggctgcggcccggcggcggccccggcgcggtgcgggcgttcgcggcgccccgggagctgcaggggccccgggcggcggcgaggccggagaggggcgggcccgggacaccggcacccggcgccctcggagccaaaggcgcgcggcggacacggcggggccctcgcgcgcctggagacgatgccaaagctgcagggcttcgagttctggagccgcaccctgcgaggggcccgccacgtcgtggcccccatggtggaccagagcgagctggcctggaggctgctgagccggcgccacggggcacagctctgctacacgcccatgctgcatgcccaggtctttgtccgcgacgccaactaccggaaggagaacctgtactgcgaggtgtgccccgaggaccggcccctcatcgtgcaggcggctctcctggctcaggattactgtgacgccattgacctgaacttgggctgcccacagatgatagccaagagaggtcactatggcgcctttctgcaggacgagtgggacctgctccaaagaatgattttgctggcccacgagaaactctctgttcctgtcacgtgcaaaatccgtgtcttcccggagattgacaagaccgtgaggtacgcccagatg

SEQ ID NO: 126875 - DNA, 1084 bp, Homo sapiens
  Payload ID: 4874
  Gene Symbol: DUS1L
  Gene Name: dihydrouridine synthase 1-like
  ENST ID: ENST00000578907
  CDS Start-End: 182-1084
gcccggctgcggcccggcggcggccccggcgcggtgcgggcgttcgcggcgccccgggagctgcaggggccccgggcggcggcgaggccggagaggggcgggcccgggacaccggcacccggcgccctcggagccaaaggcgcgcggcggacacggcggggccctcgcgcgcctggagacgatgccaaagctgcagggcttcgagttctggagccgcaccctgcgaggggcccgccacgtcgtggcccccatggtggaccagagcgagctggcctggaggctgctgagccggcgccacggggcacagctctgctacacgcccatgctgcatgcccaggtctttgtccgcgacgccaactaccggaaggagaacctgtactgcgaggtgtgccccgaggaccggcccctcatcgtgcagttctgtgccaatgacccggaggtgtttgttcaggcggctctcctggctcaggattactgtgacgccattgacctgaacttgggctgcccacagatgatagccaagagaggtcactatggcgcctttctgcaggacgagtgggacctgctccaaagaatgattttgctggcccacgagaaactctctgttcctgtcacgtgcaaaatccgtgtcttcccggagattgacaagaccgtgaggtacgcccagatgctggagaaggccggctgccagttgctgacggtgcacggacgcaccaaggagcagaaggggcccctgtcgggtgcagcgtcctgggagcatatcaaggctgtgcggaaggctgtggccatccctgtgtttgctaacgggaacatccagtgcctgcaggacgtggagcgctgcctccgggacacgggtgtgcagggcgtcatgagcgcaggtgggcagggcccaggacagcagccagggccccatgcacacggcctgataccaccgcccagagggcaacctgcacaaccccgccctgttcgagggccggagccctgccgtgtgggagctggccgaggagtatctggacatcgtgcgggagcacccctgccccctgtcctacgtccgggcccacctcttcaagctgtggcaccacac

SEQ ID NO: 126876 - DNA, 1933 bp, Homo sapiens
  Payload ID: 4875
  Gene Symbol: DUS2
  Gene Name: dihydrouridine synthase 2
  Uniprot ID: Q9NX74
  ENST ID: ENST00000358896
  CDS Start-End: 118-1599
gcgacctcgcgtacggtggctggcgaggctcagtacggtgtgtggagctggagcaccgtgaggaagaagcgaggttctttttaagagttcagctgcgaggctgtaacagaggaggaaatgattttgaatagcctctctctgtgttaccataataagctaatcctggccccaatggttcgggtagggactcttccaatgaggctgctggccctggattatggagcggacattgtttactgtgaggagctgatcgacctcaagatgattcagtgcaagagagttgttaatgaggtgctcagcacagtggactttgtcgcccctgatgatcgagttgtcttccgcacctgtgaaagagagcagaacagggtggtcttccagatggggacttcagacgcagagcgagcccttgctgtggccaggcttgtagaaaatgatgtggctggtattgatgtcaacatgggctgtccaaaacaatattccaccaagggaggaatgggagctgccctgctgtcagaccctgacaagattgagaagatcctcagcactcttgttaaagggacacgcagacctgtgacctgcaagattcgcatcctgccatcgctagaagataccctgagccttgtgaagcggatagagaggactggcattgctgccatcgcagttcatgggaggaagcgggaggagcgacctcagcatcctgtcagctgtgaagtcatcaaagccattgctgataccctctccattcctgtcatagccaacggaggatctcatgaccacatccaacagtattcggacatagaggactttcgacaagccacggcagcctcttccgtgatggtggcccgagcagccatgtggaacccatctatcttcctcaaggagggtctgcggcccctggaggaggtcatgcagaaatacatcagatacgcggtgcagtatgacaaccactacaccaacaccaagtactgcttgtgccagatgctacgagaacagctggagtcgccccagggaaggttgctccatgctgcccagtcttcccgggaaatttgtgaggcctttggccttggtgccttctatgaggagaccacacaggagctggatgcccagcaggccaggctctcagccaagacttcagagcagacaggggagccagctgaagatacctctggtgtcattaagatggctgtcaagtttgaccggagagcatacccagcccagatcacccctaagatgtgcctactagagtggtgccggagggagaagttggcacagcctgtgtatgaaacggttcaacgccctctagatcgcctgttctcctctattgtcaccgttgctgaacaaaagtatcagtctaccttgtgggacaagtccaagaaactggcggagcaggctgcagccatcgtctgtctgcggagccagggcctccctgagggtcggctgggtgaggagagcccttccttgcacaagcgaaagagggaggctcctgaccaagaccctgggggccccagagctcaggagctagcacaacctggggatctgtgcaagaagccctttgtggccttgggaagtggtgaagaaagccccctggaaggctggtgactactcttcctgccttagtcacccctccatgggcctggtgctaaggtggctgtggatgccacagcatgaaccagatgccgttgaacagtttgctggtcttgcctggcagaagttagatgtcctggcaggggccatcagcctagagcatggaccaggggccgcccaggggtggatcctggcccctttggtggatctgagtgacagggtcaagttctctttgaaaacaggagcttttcaggtggtaactccccaacctgacattggtactgtgcaataaagacaccccctaccctcacccacggctggctgcttcagccttgggcatcttcataaa

SEQ ID NO: 126877 - DNA, 1864 bp, Homo sapiens
  Payload ID: 4875
  Gene Symbol: DUS2
  Gene Name: dihydrouridine synthase 2
  ENST ID: ENST00000432752
  CDS Start-End: 159-1535
gtgtggagctggagcaccgtgaggaagaagcgaggttctttttaagagttcagctgcgagatatcaaacaaagaattactctgtacaaagccagaacacatatatcaaagtaatcctgaagtatcagaacaaaataataggctgtaacagaggaggaaatgattttgaatagcctctctctgtgttaccataataagctaatcctggccccaatggttcgggtagggactcttccaatgaggctgctggccctggattatggagcggacattgtttactgtgaggagctgatcgacctcaagatgattcagtgcaagagagttgttaatgaggtgctcagcacagtggactttgtcgcccctgatgatcgagttgtcttccgcacctgtgaaagagagcagaacagggtggtcttccagatgggaggaatgggagctgccctgctgtcagaccctgacaagattgagaagatcctcagcactcttgttaaagggacacgcagacctgtgacctgcaagattcgcatcctgccatcgctagaagataccctgagccttgtgaagcggatagagaggactggcattgctgccatcgcagttcatgggaggaagcgggaggagcgacctcagcatcctgtcagctgtgaagtcatcaaagccattgctgataccctctccattcctgtcatagccaacggaggatctcatgaccacatccaacagtattcggacatagaggactttcgacaagccacggcagcctcttccgtgatggtggcccgagcagccatgtggaacccatctatcttcctcaaggagggtctgcggcccctggaggaggtcatgcagaaatacatcagatacgcggtgcagtatgacaaccactacaccaacaccaagtactgcttgtgccagatgctacgagaacagctggagtcgccccagggaaggttgctccatgctgcccagtcttcccgggaaatttgtgaggcctttggccttggtgccttctatgaggagaccacacaggagctggatgcccagcaggccaggctctcagccaagacttcagagcagacaggggagccagctgaagatacctctggtgtcattaagatggctgtcaagtttgaccggagagcatacccagcccagatcacccctaagatgtgcctactagagtggtgccggagggagaagttggcacagcctgtgtatgaaacggttcaacgccctctagatcgcctgttctcctctattgtcaccgttgctgaacaaaagtatcagtctaccttgtgggacaagtccaagaaactggcggagcaggctgcagccatcgtctgtctgcggagccagggcctccctgagggtcggctgggtgaggagagcccttccttgcacaagcgaaagagggaggctcctgaccaagaccctgggggccccagagctcaggagctagcacaacctggggatctgtgcaagaagccctttgtggccttgggaagtggtgaagaaagccccctggaaggctggtgactactcttcctgccttagtcacccctccatgggcctggtgctaaggtggctgtggatgccacagcatgaaccagatgccgttgaacagtttgctggtcttgcctggcagaagttagatgtcctggcaggggccatcagcctagagcatggaccaggggccgcccaggggtggatcctggcccctttggtggatctgagtgacagggtcaagttctctttgaaaacaggagcttttcaggtggtaactccccaacctgacattggtactgtgcaataaagacaccccctaccctcacccacggctggctgcttcagccttgggcatcttc

SEQ ID NO: 126878 - DNA, 544 bp, Homo sapiens
  Payload ID: 4875
  Gene Symbol: DUS2
  Gene Name: dihydrouridine synthase 2
  ENST ID: ENST00000566306
  CDS Start-End: 199-544
agccacgcactggtgctaagcaatcaacagcaggagaggcagagattgggatggacaaagggatcatggaaggctccttcgagctggacttgaaggactgatatcaaacaaagaattactctgtacaaagccagaacacatatatcaaagtaatcctgaagtatcagaacaaaataataggctgtaacagaggaggaaatgattttgaatagcctctctctgtgttaccataataagctaatcctggccccaatggttcgggtagggactcttccaatgaggctgctggccctggattatggagcggacattgtttactgtgaggagctgatcgacctcaagatgattcagtgcaagagagttgttaatgaggtgctcagcacagtggactttgtcgcccctgatgatcgagttgtcttccgcacctgtgaaagagagcagaacagggtggtcttccagatggggacttcagacgcagagcgagcccttgctgtggccaggcttgtagaaaatgatgtggctggtattgatgtcaacatgggct

SEQ ID NO: 126879 - DNA, 567 bp, Homo sapiens
  Payload ID: 4875
  Gene Symbol: DUS2
  Gene Name: dihydrouridine synthase 2
  ENST ID: ENST00000567100
  CDS Start-End: 324-567
agtacggtgtgtggagctggagcaccgtgaggaagaagcgaggttctttttaagagttcagctgcgagccaaggttcactctctactccctcgtcacgcgtcccaacttctcatccagaacccacccctcttgcagcccgctcagctccactggcttccccgtcagaaacctgaattacctaaaatagtagtaagaagggtgctgcgaccctacaaagtgatcaaatatcaaacaaagaattactctgtacaaagccagaacacatatatcaaagtaatcctgaagtatcagaacaaaataataggctgtaacagaggaggaaatgattttgaatagcctctctctgtgttaccataataagctaatcctggccccaatggttcgggtagggactcttccaatgaggctgctggccctggattatggagcggacattgtttactgtgaggagctgatcgacctcaagatgattcagtgcaagagagttgttaatgaggtgctcagcacagtggactttgtcgcccctgatgatcgagttgtcttccgcacctgtgaaagagagcaga

SEQ ID NO: 126880 - DNA, 2310 bp, Homo sapiens
  Payload ID: 4875
  Gene Symbol: DUS2
  Gene Name: dihydrouridine synthase 2
  Uniprot ID: Q9NX74
  ENST ID: ENST00000565263
  CDS Start-End: 495-1976
tgaggcgcgccggctggttcaactccggccgccgcgccgaaaccagcagcggtccgggtcgaaccagcaccggcctcgggaggttccgccgcctgctctgccgctgttccaactgccgctgtagagccactgggatgcgcaccaccggcaggggttcgtcgggactgcggaccgtgaggccccgtcgcggcgccaggagcaaccgagtcacgagggaaaagagccgcaccggccgcgttagagccatgtttcccttagtgcgggagaagcgcacatcagtgacgtcacggacgcgccgcgacctcgcgtacggtggctggcgaggctcagtacggtgtgtggagctggagcaccgtgaggaagaagcgaggttctttttaagagttcagctgcgagatatcaaacaaagaattactctgtacaaagccagaacacatatatcaaagtaatcctgaagtatcagaacaaaataataggctgtaacagaggaggaaatgattttgaatagcctctctctgtgttaccataataagctaatcctggccccaatggttcgggtagggactcttccaatgaggctgctggccctggattatggagcggacattgtttactgtgaggagctgatcgacctcaagatgattcagtgcaagagagttgttaatgaggtgctcagcacagtggactttgtcgcccctgatgatcgagttgtcttccgcacctgtgaaagagagcagaacagggtggtcttccagatggggacttcagacgcagagcgagcccttgctgtggccaggcttgtagaaaatgatgtggctggtattgatgtcaacatgggctgtccaaaacaatattccaccaagggaggaatgggagctgccctgctgtcagaccctgacaagattgagaagatcctcagcactcttgttaaagggacacgcagacctgtgacctgcaagattcgcatcctgccatcgctagaagataccctgagccttgtgaagcggatagagaggactggcattgctgccatcgcagttcatgggaggaagcgggaggagcgacctcagcatcctgtcagctgtgaagtcatcaaagccattgctgataccctctccattcctgtcatagccaacggaggatctcatgaccacatccaacagtattcggacatagaggactttcgacaagccacggcagcctcttccgtgatggtggcccgagcagccatgtggaacccatctatcttcctcaaggagggtctgcggcccctggaggaggtcatgcagaaatacatcagatacgcggtgcagtatgacaaccactacaccaacaccaagtactgcttgtgccagatgctacgagaacagctggagtcgccccagggaaggttgctccatgctgcccagtcttcccgggaaatttgtgaggcctttggccttggtgccttctatgaggagaccacacaggagctggatgcccagcaggccaggctctcagccaagacttcagagcagacaggggagccagctgaagatacctctggtgtcattaagatggctgtcaagtttgaccggagagcatacccagcccagatcacccctaagatgtgcctactagagtggtgccggagggagaagttggcacagcctgtgtatgaaacggttcaacgccctctagatcgcctgttctcctctattgtcaccgttgctgaacaaaagtatcagtctaccttgtgggacaagtccaagaaactggcggagcaggctgcagccatcgtctgtctgcggagccagggcctccctgagggtcggctgggtgaggagagcccttccttgcacaagcgaaagagggaggctcctgaccaagaccctgggggccccagagctcaggagctagcacaacctggggatctgtgcaagaagccctttgtggccttgggaagtggtgaagaaagccccctggaaggctggtgactactcttcctgccttagtcacccctccatgggcctggtgctaaggtggctgtggatgccacagcatgaaccagatgccgttgaacagtttgctggtcttgcctggcagaagttagatgtcctggcaggggccatcagcctagagcatggaccaggggccgcccaggggtggatcctggcccctttggtggatctgagtgacagggtcaagttctctttgaaaacaggagcttttcaggtggtaactccccaacctgacattggtactgtgcaataaagacaccccctaccctcacccacggctggctgcttcagccttgggcatcttcataaa

SEQ ID NO: 126881 - DNA, 540 bp, Homo sapiens
  Payload ID: 4875
  Gene Symbol: DUS2
  Gene Name: dihydrouridine synthase 2
  ENST ID: ENST00000568099
  CDS Start-End: 220-540
acggtggctggcgaggctcagtacggtgtgtggagctggagcaccgtgaggaagaagcgaggttctttttaagagttcagctgcgaggtttcatccatttccatgtgccactgtttttcagatatcaaacaaagaattactctgtacaaagccagaacacatatatcaaagtaatcctgaagtatcagaacaaaataataggctgtaacagaggaggaaatgattttgaatagcctctctctgtgttaccataataagctaatcctggccccaatggttcgggtagggactcttccaatgaggctgctggccctggattatggagcggacattgtttactgtgaggagctgatcgacctcaagatgattcagtgcaagagagttgttaatgaggtgctcagcacagtggactttgtcgcccctgatgatcgagttgtcttccgcacctgtgaaagagagcagaacagggtggtcttccagatggggacttcagacgcagagcgagcccttgctgtggccaggcttgtagaaaatgatgtg

SEQ ID NO: 126882 - DNA, 373 bp, Homo sapiens
  Payload ID: 4875
  Gene Symbol: DUS2
  Gene Name: dihydrouridine synthase 2
  ENST ID: ENST00000569289
  CDS Start-End: 251-373
gaggttctttttaagagttcagctgcgagatatcaaacaaagaattactctgtacaaagccagaacacatatatcaaagtaatcctgaagtatcagaacaaaataatagattatttcctaatcagtatccagaattgggctcaacctcttctgttgctttcttatgtgaatcttgttcactcaagtgatggctccatgcaagttggccaaagggcttgtagtcctttactgggctgtaacagaggaggaaatgattttgaatagcctctctctgtgttaccataataagctaatcctggccccaatggttcgggtagggactcttccaatgaggctgctggccctggattatggagcggacattgtttactgt

SEQ ID NO: 126883 - DNA, 540 bp, Homo sapiens
  Payload ID: 4875
  Gene Symbol: DUS2
  Gene Name: dihydrouridine synthase 2
  ENST ID: ENST00000564781
  CDS Start-End: 386-540
ctttttaagagttcagctgcgaggtctgtagctccgaataggggatggcgacatccagacccggccagccttggggaagggcgcgtcgtggaggcaggactggaggctggcgatacgaggcggcagtggggccttgacccaatggaccatgagggcggagggcttctggcgattggttacctggttcctgggattctctttagttgttcctcattgccctgagatagcttgtcccgtgctggtatccgaggttgcagctgttttcccagatgtgttccctgcgcaggatatcaaacaaagaattactctgtacaaagccagaacacatatatcaaagtaatcctgaagtatcagaacaaaataataggctgtaacagaggaggaaatgattttgaatagcctctctctgtgttaccataataagctaatcctggccccaatggttcgggtagggactcttccaatgaggctgctggccctggattatggagcggacattgtttactgtgaggagctgatcgacctcaagatgattcagtg

SEQ ID NO: 126884 - DNA, 1712 bp, Homo sapiens
  Payload ID: 4875
  Gene Symbol: DUS2
  Gene Name: dihydrouridine synthase 2
  ENST ID: ENST00000561965
  CDS Start-End: 21-284
aggctgtaacagaggaggaaatgattttgaatagcctctctctgtgttaccataataagctaatcctggccccaatggttcgggtagggactcttccaatgaggctgctggccctggattatggagcggacattgtttactgtgagaggtgctcagcacagtggactttgtcgcccctgatgatcgagttgtcttccgcacctgtgaaagagagcagaacagggtggtcttccagatggggacttcagacgcagagcgagcccttgctgtggccaggcttgtagaaaatgatgtggctggtattgatgtcaacatgggctgtccaaaacaatattccaccaagggaggaatgggagctgccctgctgtcagaccctgacaagattgagaagatcctcagcactcttgttaaagggacacgcagacctgtgacctgcaagattcgcatcctgccatcgctagaagataccctgagccttgtgaagcggatagagaggactggcattgctgccatcgcagttcatgggaggaagcgggaggagcgacctcagcatcctgtcagctgtgaagtcatcaaagccattgctgataccctctccattcctgtcatagccaacggaggatctcatgaccacatccaacagtattcggacatagaggactttcgacaagccacggcagcctcttccgtgatggtggcccgagcagccatgtggaacccatctatcttcctcaaggagggtctgcggcccctggaggaggtcatgcagaaatacatcagatacgcggtgcagtatgacaaccactacaccaacaccaagtactgcttgtgccagatgctacgagaacagctggagtcgccccagggaaggttgctccatgctgcccagtcttcccgggaaatttgtgaggcctttggccttggtgccttctatgaggagaccacacaggagctggatgcccagcaggccaggctctcagccaagacttcagagcagacaggggagccagctgaagatacctctggtgtcattaagatggctgtcaagtttgaccggagagcatacccagcccagatcacccctaagatgtgcctactagagtggtgccggagggagaagttggcacagcctgtgtatgaaacggttcaacgccctctagatcgcctgttctcctctattgtcaccgttgctgaacaaaagtatcagtctaccttgtgggacaagtccaagaaactggcggagcaggctgcagccatcgtctgtctgcggagccagggcctccctgagggtcggctgggtgaggagagcccttccttgcacaagcgaaagagggaggctcctgaccaagaccctgggggccccagagctcaggagctagcacaacctggggatctgtgcaagaagccctttgtggccttgggaagtggtgaagaaagccccctggaaggctggtgactactcttcctgccttagtcacccctccatgggcctggtgctaaggtggctgtggatgccacagcatgaaccagatgccgttgaacagtttgctggtcttgcctggcagaagttagatgtcctggcaggggccatcagcctagagcatggaccaggggccgcccaggggtggatcctggcccctttggtggatctgagtgacagggtcaagttctctttgaaaacaggagcttttcaggtggtaactccccaacct

SEQ ID NO: 126885 - DNA, 571 bp, Homo sapiens
  Payload ID: 4875
  Gene Symbol: DUS2
  Gene Name: dihydrouridine synthase 2
  ENST ID: ENST00000576994
  CDS Start-End: 351-571
gacttaaggggcaggcttcaggccttcagggttttgtggaggagagcagggcagagatagagaggaatcctgcctgggccctcccatccagccctccctacaaatgcctagtagccactctgtggggcacatctgtcggctggtacaagccccagtgaccacaggagggcaagagaaacctaaattctgatatgagctggagaggcaagattaatctaagagatagataggtagccacgcactggtgctaagcaatcaacagcaggagaggcagagattgggatggacaaagggatcatggaaggctccttcgagctggacttgaaggactggctgtaacagaggaggaaatgattttgaatagcctctctctgtgttaccataataagctaatcctggccccaatggttcgggtagggactcttccaatgaggctgctggccctggattatggagcggacattgtttactgtgaggagctgatcgacctcaagatgattcagtgcaagagagttgttaatgaggtgctcagcacagtggactttgtcgcccctgatgatcgagttgtctt

SEQ ID NO: 126886 - DNA, 570 bp, Homo sapiens
  Payload ID: 4875
  Gene Symbol: DUS2
  Gene Name: dihydrouridine synthase 2
  ENST ID: ENST00000571081
  CDS Start-End: 307-570
gttttcttcctgtacctagaggtggcagtcggtgctcagcttccacagctctccttgatacacttgctcagacccctcggctactctcttgcccagcccagagtaccttttccacttgtctgaagacccgcagcaggtttccacgaaggacaccctgaagctcttcctcactccagccacgactcagcaactcctctatcaggaccggatatcaaacaaagaattactctgtacaaagccagaacacatatatcaaagtaatcctgaagtatcagaacaaaataataggctgtaacagaggaggaaatgattttgaatagcctctctctgtgttaccataataagctaatcctggccccaatggttcgggtagggactcttccaatgaggctgctggccctggattatggagcggacattgtttactgtgaggagctgatcgacctcaagatgattcagtgcaagagagttgttaatgaggtgctcagcacagtggactttgtcgcccctgatgatcgagttgtcttccgcacctgtgaaagagagcagaacagggtggtcttccagatg

SEQ ID NO: 126887 - DNA, 569 bp, Homo sapiens
  Payload ID: 4875
  Gene Symbol: DUS2
  Gene Name: dihydrouridine synthase 2
  ENST ID: ENST00000570709
  CDS Start-End: 201-569
agtcggtgctcagcttccacagctctccttgatacacttgctcagacccctcggctactctcttgcccagcccagagtaccttttccacttgtctgaagacccgcagcaggtttccacgaaggacaccctgaagctcttcctcactccagccacgactcagcaactcctctatcaggaccgggctgtaacagaggaggaaatgattttgaatagcctctctctgtgttaccataataagctaatcctggccccaatggttcgggtagggactcttccaatgaggctgctggccctggattatggagcggacattgtttactgtgaggagctgatcgacctcaagatgattcagtgcaagagagttgttaatgaggtgctcagcacagtggactttgtcgcccctgatgatcgagttgtcttccgcacctgtgaaagagagcagaacagggtggtcttccagatggggacttcagacgcagagcgagcccttgctgtggccaggcttgtagaaaatgatgtggctggtattgatgtcaacatgggctgtccaaaacaatattccaccaag

SEQ ID NO: 126888 - DNA, 570 bp, Homo sapiens
  Payload ID: 4875
  Gene Symbol: DUS2
  Gene Name: dihydrouridine synthase 2
  ENST ID: ENST00000575677
  CDS Start-End: 97-570
attttagggactgcacacttgatgttgcccagtgtctgctgtccaggaggaaggcagatcgatggccgagtgctcgaggctgtaacagaggaggaaatgattttgaatagcctctctctgtgttaccataataagctaatcctggccccaatggttcgggtagggactcttccaatgaggctgctggccctggattatggagcggacattgtttactgtgaggagctgatcgacctcaagatgattcagtgcaagagagttgttaatgaggtgctcagcacagtggactttgtcgcccctgatgatcgagttgtcttccgcacctgtgaaagagagcagaacagggtggtcttccagatggggacttcagacgcagagcgagcccttgctgtggccaggcttgtagaaaatgatgtggctggtattgatgtcaacatgggctgtccaaaacaatattccaccaagggaggaatgggagctgccctgctgtcagaccctgacaagattgagaagatcctcagcactcttgttaaagggacacgcagacctgtgacctgcaagattcgcatc

SEQ ID NO: 126889 - DNA, 736 bp, Homo sapiens
  Payload ID: 4875
  Gene Symbol: DUS2
  Gene Name: dihydrouridine synthase 2
  ENST ID: ENST00000562246
  CDS Start-End: 112-736
gctggaaccttgaagaagggaagcctgctcttgataacaggagagattttcttcatttgaatttctgactcttgtttcctctttttttttcaggctgtaacagaggaggaaatgattttgaatagcctctctctgtgttaccataataagctaatcctggccccaatggttcgggtagggactcttccaatgaggctgctggccctggattatggagcggacattgtttactgtgaggagctgatcgacctcaagatgattcagtgcaagagagttgttaatgaggtgctcagcacagtggactttgtcgcccctgatgatcgagttgtcttccgcacctgtgaaagagagcagaacagggtggtcttccagatggggacttcagacgcagagcgagcccttgctgtggccaggcttgtagaaaatgatgtggctggtattgatgtcaacatgggctgtccaaaacaatattccaccaagggaggaatgggagctgccctgctgtcagaccctgacaagattgagaagatcctcagcactcttgttaaagggacacgcagacctgtgacctgcaagattcgcatcctgccatcgctagaagataccctgagccttgtgaagcggatagagaggactggcattgctgccatcgcagttcatgggaggaagcgggaggagcgacctcagcatcctgtcagctgtgaagtcatcaaagccattgctgataccctctcca

SEQ ID NO: 126890 - DNA, 2113 bp, Homo sapiens
  Payload ID: 4876
  Gene Symbol: DUS3L
  Gene Name: dihydrouridine synthase 3-like
  Uniprot ID: Q96G46
  ENST ID: ENST00000309061
  CDS Start-End: 98-2050
gacatgagcatgcgcacttccccagcacaatcagggaagacacgcgtgacccggaaggtcttcccgccacactccagagcggatgtgaggggcgccgatggcggagggaacggcggaggctcctctagagaatggtggtggtggcgactcgggagccggagctttggaacgaggagtggcgcccattaagcgtcaatacctcaccaccaaggagcagtttcaccaattcctggaagccaaagggcaggagaagacttgccgggaaaccgaggtaggagaccctgctggcaatgagctggctgagcctgaggctaagcggatccgactggaggatggacagacggcggacgggcagacggaggaggcagcagagcccggggagcagctacagactcagaagagggcccggggacaaaacaagggccggccccatgtgaagcccacgaactacgacaagaacaggctgtgtccctccctaatccaggagtcggctgctaagtgtttcttcggtgatcgctgccgctttctgcacgacgtggggcgctacctggagaccaagccggccgacctgggcccccgctgcgtgctcttcgagaccttcggccggtgcccctacggcgtgacctgccgcttcgctggggcccacctgaggcccgagggacagaacctggtgcaggaggagttggcggcccgcgggacccagcccccgtccatccgcaacggcctggacaaagccctgcagcagcagctgcggaagcgcgaggtccgcttcgagcgagctgagcaggccctgcgccggttcagccagggccccacacccgctgccgctgtccccgagggcacggcagccgagggcgctcccaggcaggaaaactgtggtgcccagcaggtccccgcagggccgggcactagcacccctcccagcagccccgtgcggacctgcgggcccctgacggatgaggacgtggtcaggctgcggccctgtgagaagaagcggctggacatccgtggcaaactttacctggcccccctcaccacgtgtgggaacctgcccttccgacggatctgcaagcgcttcggggcggatgtgacatgtggagagatggccgtctgcaccaacctgctgcagggccagatgtccgagtgggccctactcaaacgccaccagtgtgaggacatctttggcgtccagctggagggcgccttccccgacaccatgaccaagtgtgccgagctgctgagccgcaccgtggaggtggactttgtggacatcaacgtcggctgccccatcgacctcgtgtacaagaagggtgggggctgtgccctcatgaatcgctccaccaagttccagcagatcgtccgtggcatgaaccaggtgctggatgtgccgctgactgtgaagatccgcacaggcgtccaggagcgtgtgaacctggcgcaccgcctgctgcccgagctgcgggactggggcgtggcactcgtcacgctccacggccgctctcgggagcagcgctacaccaagctagccgactggcagtacatcgaggagtgcgtgcaggccgccagccccatgcccctgttcggaaatggggacatcttgtcatttgaggatgccaaccgcgccatgcagactggtgtcaccgggatcatgattgcccgtggcgccctgctcaagccgtggctcttcacggagatcaaggagcagcggcactgggacatctcgtcgtccgagcgcctggacatcctgcgggacttcaccaactacggcctggagcactggggctcggacacgcagggcgtggagaagacccggcgctttctgctcgagtggctgtccttcctgtgccggtacgtgcccgtggggctgctggagcggctcccacagaggatcaacgagcggccgccctactacctgggccgcgactacctggagacgctgatggccagccagaaggcagccgactggatccgcatcagcgagatgctccttgggccagtgccccccagcttcgccttcttgccgaagcacaaggccaacgcgtacaagtagcctcaggctttcccaggggcaccctggggcgaggagagtacaataaattttattcttttaaaa

SEQ ID NO: 126891 - DNA, 1355 bp, Homo sapiens
  Payload ID: 4876
  Gene Symbol: DUS3L
  Gene Name: dihydrouridine synthase 3-like
  Uniprot ID: Q96G46
  ENST ID: ENST00000320699
  CDS Start-End: 66-1292
agggaagacacgcgtgacccggaaggtcttcccgccacactccagagcggatgtgaggggcgccgatggcggagggaacggcggaggctcctctagagaatggtggtggtggcgactcgggagccggagctttggaacgaggagtggcgcccattaagcgtcaatacctcaccaccaaggagcagtttcaccaattcctggaagccaaagggcaggagaagacttgccgggaaaccgagctggacatccgtggcaaactttacctggcccccctcaccacgtgtgggaacctgcccttccgacggatctgcaagcgcttcggggcggatgtgacatgtggagagatggccgtctgcaccaacctgctgcagggccagatgtccgagtgggccctactcaaacgccaccagtgtgaggacatctttggcgtccagctggagggcgccttccccgacaccatgaccaagtgtgccgagctgctgagccgcaccgtggaggtggactttgtggacatcaacgtcggctgccccatcgacctcgtgtacaagaagggtgggggctgtgccctcatgaatcgctccaccaagttccagcagatcgtccgtggcatgaaccaggtgctggatgtgccgctgactgtgaagatccgcacaggcgtccaggagcgtgtgaacctggcgcaccgcctgctgcccgagctgcgggactggggcgtggcactcgtcacgctccacggccgctctcgggagcagcgctacaccaagctagccgactggcagtacatcgaggagtgcgtgcaggccgccagccccatgcccctgttcggaaatggggacatcttgtcatttgaggatgccaaccgcgccatgcagactggtgtcaccgggatcatgattgcccgtggcgccctgctcaagccgtggctcttcacggagatcaaggagcagcggcactgggacatctcgtcgtccgagcgcctggacatcctgcgggacttcaccaactacggcctggagcactggggctcggacacgcagggcgtggagaagacccggcgctttctgctcgagtggctgtccttcctgtgccggtacgtgcccgtggggctgctggagcggctcccacagaggatcaacgagcggccgccctactacctgggccgcgactacctggagacgctgatggccagccagaaggcagccgactggatccgcatcagcgagatgctccttgggccagtgccccccagcttcgccttcttgccgaagcacaaggccaacgcgtacaagtagcctcaggctttcccaggggcaccctggggcgaggagagtacaataaattttattcttttaaaa

SEQ ID NO: 126892 - DNA, 977 bp, Homo sapiens
  Payload ID: 4876
  Gene Symbol: DUS3L
  Gene Name: dihydrouridine synthase 3-like
  ENST ID: ENST00000590110
  CDS Start-End: 85-738
gcacttccccagcacaatcagggaagacacgcgtgacccggaaggtcttcccgccacactccagagcggatgtgaggggcgccgatggcggagggaacggcggaggctcctctagagaatggtggtggtggcgactcgggagccggagctttggaacgaggagtggcgcccattaagcgtcaatacctcaccaccaaggagcagtttcaccaattcctggaagccaaagggcaggagaagacttgccgggaaaccgaggtaggagaccctgctggcaatgagctggctgagcctgaggctaagcggatccgactggaggatggacagacggcggacgggcagacggaggaggcagcagagcccggggagcagctacagactcagaagagggcccggggacaaaacaagggccggccccatgtgaagcccacgaactacgacaagaacagaacctggtgcaggaggagttggcggcccgcgggacccagcccccgtccatccgcaacggcctggacaaagccctgcagcagcagctgcggaagcgcgaggtccgcttcgagcgagctgagcaggccctgcgccggttcagccagggccccacacccgctgccgctgtccccgagggcacggcagccgagggcgctcccaggcaggaaaactgtggtgcccagcaggtccccgcagggccgggcactagcacccctcccagcagccccgtgcggacctgcgggcccctgacggatgaggacgtggtcaggctgcggccctgtgagaagaagcggctggacatccgtggcaaactttacctggcccccctcaccacgtgtgggaacctgcccttccgacggatctgcaagcgcttcggggcggatgtgacatgtggagagatggccgtctgcaccaacctgctgcagggccagatgtccgagtgggccctactcaaacgccaccagtgtgaggacatctttggcgtccag

SEQ ID NO: 126893 - DNA, 833 bp, Homo sapiens
  Payload ID: 4876
  Gene Symbol: DUS3L
  Gene Name: dihydrouridine synthase 3-like
  ENST ID: ENST00000590343
  CDS Start-End: 1-508
caaggagcagcggcactgggacatctcgtcgtccgagcgcctggacatcctgcgggacttcaccaactacggcctggagcactggggctcggacacgcagggcgtggagaagacccggcgctttctgctcgagtggctgtccttcctgtgccggtacgtgcccgtggggctgctggagcggctcccacagaggatcaacgagcggccgccctactacctgggccgcgactacctggagacgctgatggccagccagaaggcagccgactggatccgcatcaggtgcctgggtgggctggagttggggagctgcagtcgggggcccggggtcacggagggtactttgcaggtcctgggcctgacctcgctttccacctgctctcccacagcgagatgctccttgggccagtgccccccagcttcgccttcttgccgaagcacaaggccaacgcgtacaagtagcctcaggctttcccaggggcaccctggggcgaggagagtacaataaattttattcttttaaaatccaggcctttctgtgaccctgaagcagcccctcctcggcccccaccttccccaaacctcttagctgcctccatgggccctgccccaagctgggtgctgctggtgcccagagaggccttgacccccaagaaggtagcgggttgaggacccggggggcctcagcctgtgtgggtgtggatcagggcagcctgcctggaggaggcggcctcaaagctgttaggggggtgttgctggaagaggcaaaggcctggcccagaatcctccctcccatggtgatgaccatgtctgccaacgtctgcccctgcttg

SEQ ID NO: 126894 - DNA, 806 bp, Homo sapiens
  Payload ID: 4876
  Gene Symbol: DUS3L
  Gene Name: dihydrouridine synthase 3-like
  ENST ID: ENST00000592491
  CDS Start-End: 1-234
accgaggtaggagaccctgctggcaatgagctggctgagcctgaggctaagcggatccgactggaggatggacagacggcggacgggcagacggaggaggcagcagagcccggggagcagctacagactcagaagagggcccggggacaaaacaagggccggccccatgtgaagcccacgaactacgacaagaacaggctgtgtccctccctaatccaggcaatcggctgctaagtgtttcttcggtgatcgctgccgctttctgcacgacgtggggcgctacctggagaccaagccggccgacctgggcccccgctgcgtgctcttcgagaccttcggccggtgcccctacggcgtgacctgccgcttcgctggggcccacctgaggcccgagggacagaacctggtgcaggaggagttggcggcccgcgggacccagcccccgtccatccgcaacggcctggacaaagccctgcagcagcagctgcggaagcgcgaggtccgcttcgagcgagctgagcaggccctgcgccggttcagccagggccccacacccgctgccgctgtccccgagggcacggcagccgagggcgctcccaggcaggaaaactgtggtgcccagcaggtccccgcagggccgggcactagcacccctcccagcagccccgtgcggacctgcgggcccctgacggatgaggacgtggtcaggctgcggccctgtgagaagaagcgggtacgtgttgaggacaacgtcagtagcagatctgtccatctggtgtgcgtctattaaataccagctgtgtcca

SEQ ID NO: 126895 - DNA, 768 bp, Homo sapiens
  Payload ID: 4876
  Gene Symbol: DUS3L
  Gene Name: dihydrouridine synthase 3-like
  ENST ID: ENST00000591560
  CDS Start-End: 1-516
tgtgggaacctgcccttccgacggatctgcaagcgcttcggggcggatgtgacatgtggagagatggccgtctgcaccaacctgctgcagggccagatgtccgagtgggccctactcaaacgccaccagtgtgaggacatctttggcgtccagctggagggcgccttccccgacaccatgaccaagtgtgccgagctgctgagccgcaccgtggaggtggactttgtggacatcaacgtcggctgccccatcgacctcgtgtacaagaagggtgggggctgtgccctcatgaatcgctccaccaagttccagcagatcgtccgtggcatgaaccaggtgctggatgtgccgctgactgtgaagatccgcacaggcgtccaggagcgtgtgaacctggcgcaccgcctgctgcccgagctgcgggactggggcgtggcactcgtcacggaaatggggacatcttgtcatttgaggatgccaaccgcgccatgcagactggtgtcaccgggatcatgattgcccgtggcgccctgctcaagccgtggctcttcacggagatcaaggagcagcggcactgggacatctcgtcgtccgagcgcctggacatcctgcgggacttcaccaactacggcctggagcactggggctcggacacgcagggcgtggagaagacccggcgctttctgctcgagtggctgtccttcctgtgccggtacgtgcccgtggggctgctggagcggctcccacagaggatcaacgagcggccgc

SEQ ID NO: 126896 - DNA, 797 bp, Homo sapiens
  Payload ID: 4876
  Gene Symbol: DUS3L
  Gene Name: dihydrouridine synthase 3-like
  ENST ID: ENST00000592468
  CDS Start-End: 1-419
ttggcgtccagctggagggcgccttccccgacaccatgaccaagtgtgccgagctgctgagccgcaccgtggaggtggactttgtggacatcaacgtcggctgccccatcgacctcgtgtacaagaagggtgggggctgtgccctcatgaatcgctccaccaagttccagcagatcgtccgtggcatgaaccaggtgctggatgtgccgctgactgtgaagatccgcacaggcgtccaggagcgtgtgaacctggcgcaccgcctgctgcccgagctgcgggactggggcgtggcactcgtcacgcctggctctcttggtctcttcctctctgcgtctcactctctgcctcctaccctgcgtggcggcttctcccccagctccacggccgctctcgggagcagcgctacaccaagctagccgactggcagtacatcgaggagtgcgtgcaggccgccagccccatgcccctgttcggaaatggggacatcttgtcatttgaggatgccaaccgcgccatgcagactggtgtcaccgggatcatgattgcccgtggcgccctgctcaagccgtggctcttcacggagatcaaggagcagcggcactgggacatctcgtcgtccgagcgcctggacatcctgcgggacttcaccaactacggcctggagcactggggctcggacacgcagggcgtggagaagacccggcgctttctgctcgagtggctgtccttcctgtgccggtacgtgcccgtggggctgctggagcggctcccacagaggatcaacgagcggccgc

SEQ ID NO: 126897 - DNA, 895 bp, Homo sapiens
  Payload ID: 4876
  Gene Symbol: DUS3L
  Gene Name: dihydrouridine synthase 3-like
  ENST ID: ENST00000585587
  CDS Start-End: 103-216
ggctgagggcgagaagccaccggctcttcattccgggccgttcttccgcctgcagggtggtcagcggaggtacctgagatcgtgcacgttggggcctgtcacatgcgcgaaggacaccacgtgcatgctagggcagatacctcaccaccaaggagcagtttcaccaattcctggaagccaaagggcaggagaagacttgccgggaaaccgaggtaggagaccctgctggcaatgagctggctgagcctgaggctaagcggatccgactggaggatggacagacggcggacgggcagacggaggaggcagcagagcccggggagcagctacagactcagaagagggcccggggacaaaacaagggccggccccatgtgaagcccacgaactacgacaagaacaggctgtgtccctccctaatccaggcaatcggctgctaagtgtttcttcggtgatcgctgccgctttctgcacgacgtggggcgctacctggagaccaagccggccgacctgggcccccgctgcgtgctcttcgagaccttcggccggtgcccctacggcgtgacctgccgcttcgctggggcccacctgaggcccgagggacagaacctggtgcaggaggagttggcggcccgcgggacccagcccccgtccatccgcaacggcctggacaaagccctgcagcagcagctgcggaagcgcgaggtccgcttcgagcgagctgagcaggccctgcgccggttcagccagggccccacacccgctgccgctgtccccgagggcacggcagccgagggcgctcccaggcaggaaaactgtggtgcccagcaggtccccgcagggccgggcactagcacccctcccagcagccccgtgcggacctgcgggcccctga

SEQ ID NO: 126898 - DNA, 2220 bp, Homo sapiens
  Payload ID: 4877
  Gene Symbol: DUS4L
  Gene Name: dihydrouridine synthase 4-like
  Uniprot ID: O95620
  ENST ID: ENST00000265720
  CDS Start-End: 363-1316
gaatcccggcgccgcccgcccacccagcccatggctccaggcccacctggcgaactgactctcagcccgcgcctgggctaagcctggctaggagccgcgcaggtactcgagcagtgggcgcccagggtccgagtgctctgcgcccagcgcaccgagggagccaaggccgtcgggccggcgctttcagctgtctctcgcagcagctcagggccgcgccccctgggctggcgtcgtgccctagccaaggagaagtttcagtcacgtgccagactttttcttaattacaaactgatagatggtccacatctcaactaacagtattgacgctgtaagagcatcagatttgaaacatatctgtattaatgaagagtgactgcatgcaaacgacaatatgtcaggaaagaaaaaaagatcccatagaaatgtttcattctggacagctggtaaaagtctgtgccccaatggttcgatattcaaagttggcttttaggacactagtaagaaaatatagttgtgatctgtgttacacaccaatgattgttgccgctgattttgtcaaatctataaaagccagagacagcgaatttaccacaaatcaaggtgattgcccattgattgttcagtttgctgctaacgatgcaagacttttatctgatgctgctcgtatagtctgtccttatgcgaatggaatagacattaactgtggttgccctcagaggtgggcaatggcagaaggttatggggcttgcttaataaacaagccagagcttgttcaagacatggtgaaacaagtaagaaatcaagtggaaacccctggattttcagtttctattaaaataaggatccatgatgaccttaaaagaactgtagatctttgtcaaaaggctgaagcaacaggagtttcatggattacagtccatggaagaactgctgaagaaagacatcagccagtgcactatgattccattaaaataattaaggaaaatatgtctatacctgtaattgctaatggagacatcagaagcttaaaggaagcagaaaatgtgtggcggattactgggacagatggtgtgatggttgcaagaggactcttagcaaacccggccatgtttgctggatatgaggaaaccccactgaaatgcatctgggactgggttgacattgctcttgaactcgggactccttacatgtgtttccatcaacatttaatgtacatgatggaaaagataacttcaaggcaggaaaaaagggtatttaatgctctgtcaagcacatcagcaatcatagattaccttacagaccattatggcatttgactagacttcccaaataattttaatatatacttttagacccacagtgaaaccacagaaggtcatattttgtaccttaaaccagtagctctcaaattttagtataaaaacaattcctgggagcgttttttaaaaatcagttgtagacaccaccctcagagattctgattaggtagatctggagtagacccagaaatacacagtttaaagaaaactcccagtggttcaaacatcctgatcatcctaggcaaacattgacaaatactgctctgaatcctgttctatagatattggggggatgggtagagtgggaattttttcctaatcatgtttttaacattttaaaataaaatttaatactaagaaattatggcttatagtatctataaattaacaagaagtatgcaggtgcaaaaaagtggtggaacaaataccaacatccatccaaaatgaaaaagaacaggaaattctgaatagaattgcactcagaacttatattaaaaattccatttggttaatgacattaaatttggtacatttcaaaacttctaggtcctccaaagattgaaagcttaataatctcctacctaaaaagataaaattaattgcaatctaccatatcttaagtataggaaatttggtgtccaacctggagatgattatatatttgaaatatttcctagagaatagtaaccaggttttgtttttaactttaaaacctaattacttttgtgcctctcagccgttgattgtaactttaaagtcccatggttttggagtgttattaatagattttgttatcggtgggcatgcactgcaagaattaagtatctcagactgaaataaaaccgttcataattaaagtattattttgttttgccaacatgaaaactgttataaggaaaca

SEQ ID NO: 126899 - DNA, 1676 bp, Homo sapiens
  Payload ID: 4877
  Gene Symbol: DUS4L
  Gene Name: dihydrouridine synthase 4-like
  ENST ID: ENST00000443233
  CDS Start-End: 371-730
atggctccaggcccacctggcgaactgactctcagcccgcgcctgggctaagcctggctaggagccgcgcaggtactcgagcagtgggcgcccagggtccgagtgctctgcgcccagcgcaccgagggagccaaggccgtcgggccggcgctttcagctgtctctcgcagcagctcagggccgcgccccctgggctggcgtcgtgccctagccaaggagaaggtgggcaccggaacgtggccgcagcgcttatctgtgaatttcagtcacgtgccagactttttcttaattacaaactgatagatggtccacatctcaactaacagtattgacgctgtaagagcatcagatttgaaacatatctgtattaatgaagagtgactgcatgcaaacgacaatatgtcaggaaagaaaaaaagatcccatagaaatgtttcattctggacagctggtaaaagtctgtgccccaatggttcgatattcaaagttggcttttaggacactagtaagaaaatatagttgtgatctgtgttacacaccaatgattgttgccgctgattttgtcaaatctataaaagccagagacagcgaatttaccacaaatcaaggtgattgcccattgattgttcagtttgctgctaacgatgcaagacttttatctgatgctgctcgtatagtctgtccttatgcgaatggaatagacattaactgtggttgccctcagaggtaaagctcaaagaagttggaagaattttccaaaagagtagaaaaaaaactgtgtgaacatggtgggcaatggcagaaggttatggggcttgcttaataaacaagccagagcttgttcaagacatggtgaaacaagtaagaaatcaagtggaaacccctggattttcagtttctattaaaataaggatccatgatgaccttaaaagaactgtagatctttgtcaaaaggctgaagcaacaggagtttcatggattacagtccatggaagaactgctgaagaaagacatcagccagtgcactatgattccattaaaataattaaggaaaatatgtctatacctgtaattgctaatggagacatcagaagcttaaaggaagcagaaaatgtgtggcggattactgggacagatggtgtgatggttgcaagaggactcttagcaaacccggccatgtttgctggatatgaggaaaccccactgaaatgcatctgggactgggttgacattgctcttgaactcgggactccttacatgtgtttccatcaacatttaatgtacatgatggaaaagataacttcaaggcaggaaaaaagggtatttaatgctctgtcaagcacatcagcaatcatagattaccttacagaccattatggcatttgactagacttcccaaataattttaatatatacttttagacccacagtgaaaccacagaaggtcatattttgtaccttaaaccagtagctctcaaattttagtataaaaacaattcctgggagcgttttttaaaaatcagttgtagacaccaccctcagagattctgattaggtagatctggagtagacccagaaatacacagtttaaagaaaactcccagtggttcaaacatcctgatcatcctaggcaaacattgacaaatactgctctgaatcctgttctatagatattg

SEQ ID NO: 126900 - DNA, 1375 bp, Homo sapiens
  Payload ID: 4877
  Gene Symbol: DUS4L
  Gene Name: dihydrouridine synthase 4-like
  ENST ID: ENST00000431839
  CDS Start-End: 191-463
cccagcccatggctccaggcccacctggcgaactgactctcagcccgcgcctgggctaagcctggctaggagccgcgcagtttcagtcacgtgccagactttttcttaattacaaactgatagatggtccacatctcaactaacagtattgacgctgtaagagcatcagatttgaaacatatctgtattaatgaagagtgactgcatgcaaacgacaatatgtcaggaaagaaaaaaagatcccatagaaatgtttcattctggacagctggtaaaagtctgtgccccaatggttcgatattcaaagttggcttttaggacactagtaagaaaatatagttgtgatctgtgttacacaccaatgattgttgccgctgattttgtcaaatctataaaagccagagacagcgaatttaccacaaatcaaggtgggcaatggcagaaggttatggggcttgcttaataaacaagccagagcttgttcaagacatggtgaaacaagtaagaaatcaagtggaaacccctggattttcagtttctattaaaataaggatccatgatgaccttaaaagaactgtagatctttgtcaaaaggctgaagcaacaggagtttcatggattacagtccatggaagaactgctgaagaaagacatcagccagtgcactatgattccattaaaataattaaggaaaatatgtctatacctgtaattgctaatggagacatcagaagcttaaaggaagcagaaaatgtgtggcggattactgggacagatggtgtgatggttgcaagaggactcttagcaaacccggccatgtttgctggatatgaggaaaccccactgaaatgcatctgggactgggttgacattgctcttgaactcgggactccttacatgtgtttccatcaacatttaatgtacatgatggaaaagataacttcaaggcaggaaaaaagggtatttaatgctctgtcaagcacatcagcaatcatagattaccttacagaccattatggcatttgactagacttcccaaataattttaatatatacttttagacccacagtgaaaccacagaaggtcatattttgtaccttaaaccagtagctctcaaattttagtataaaaacaattcctgggagcgttttttaaaaatcagttgtagacaccaccctcagagattctgattaggtagatctggagtagacccagaaatacacagtttaaagaaaactcccagtggttcaaacatcctgatcatcctaggcaaacattgacaaatactgctctgaatcctgttctatagatattggggggatgggtagagtgggaattttttcctaatcatgtttttaacattttaaaataaaa

SEQ ID NO: 126901 - DNA, 857 bp, Homo sapiens
  Payload ID: 4877
  Gene Symbol: DUS4L
  Gene Name: dihydrouridine synthase 4-like
  ENST ID: ENST00000458611
  CDS Start-End: 296-442
cgcgcctgggctaagcctggctaggagccgcgcaggtactcgagcagtgggcgcccagggtccgagtgctctgcgcccagcgcaccgagggagccaaggccgtcgggccggcgctttcagctgtctctcgcagcagctcagggccgcgccccctgggctggcgtcgtgccctagccaaggagaagtttcagtcacgtgccagactttttcttaattacaaactgatagatggtccacatctcaactaacagtattgacgctgtaagagcatcagatttgaaacatatctgtattaatgaagagtgactgcatgcaaacgacaatatgtcaggaaagaaaaaaagatcccatagaaatgtttcattctggacagctggtaaaagtctgtgccccaatggttcgatattcaaaaagatggaaattctatcacattaaactgtgactccccattccactgttcctcacagcagcccctggcaaccattattctactttctccctctatgaacttcactactctaggttggcttttaggacactagtaagaaaatatagttgtgatctgtgttacacaccaatgattgttgccgctgattttgtcaaatctataaaagccagagacagcgaatttaccacaaatcaaggtgattgcccattgattgttcagtttgctgctaacgatgcaagacttttatctgatgctgctcgtatagtctgtccttatgcgaatggaatagacattaactgtggttgccctcagaggtgggcaatggcagaaggttatggggcttgcttaataaacaagccagagcttgttcaagacatggtgaaacaagtaagaaatcaagtggaaaccc

SEQ ID NO: 126902 - DNA, 1610 bp, Homo sapiens
  Payload ID: 4877
  Gene Symbol: DUS4L
  Gene Name: dihydrouridine synthase 4-like
  ENST ID: ENST00000422290
  CDS Start-End: 363-635
gaatcccggcgccgcccgcccacccagcccatggctccaggcccacctggcgaactgactctcagcccgcgcctgggctaagcctggctaggagccgcgcaggtactcgagcagtgggcgcccagggtccgagtgctctgcgcccagcgcaccgagggagccaaggccgtcgggccggcgctttcagctgtctctcgcagcagctcagggccgcgccccctgggctggcgtcgtgccctagccaaggagaagtttcagtcacgtgccagactttttcttaattacaaactgatagatggtccacatctcaactaacagtattgacgctgtaagagcatcagatttgaaacatatctgtattaatgaagagtgactgcatgcaaacgacaatatgtcaggaaagaaaaaaagatcccatagaaatgtttcattctggacagctggtaaaagtctgtgccccaatggttcgatattcaaagttggcttttaggacactagtaagaaaatatagttgtgatctgtgttacacaccaatgattgttgccgctgattttgtcaaatctataaaagccagagacagcgaatttaccacaaatcaaggtgggcaatggcagaaggttatggggcttgcttaataaacaagccagagcttgttcaagacatggtgaaacaagtaagaaatcaagtggaaacccctggattttcagtttctattaaaataaggctgaagcaacaggagtttcatggattacagtccatggaagaactgctgaagaaagacatcagccagtgcactatgattccattaaaataattaaggaaaatatgtctatacctgtaattgctaatggagacatcagaagcttaaaggaagcagaaaatgtgtggcggattactgggacagatggtgtgatggttgcaagaggactcttagcaaacccggccatgtttgctggatatgaggaaaccccactgaaatgcatctgggactgggttgacattgctcttgaactcgggactccttacatgtgtttccatcaacatttaatgtacatgatggaaaagataacttcaaggcaggaaaaaagggtatttaatgctctgtcaagcacatcagcaatcatagattaccttacagaccattatggcatttgactagacttcccaaataattttaatatatacttttagacccacagtgaaaccacagaaggtcatattttgtaccttaaaccagtagctctcaaattttagtataaaaacaattcctgggagcgttttttaaaaatcagttgtagacaccaccctcagagattctgattaggtagatctggagtagacccagaaatacacagtttaaagaaaactcccagtggttcaaacatcctgatcatcctaggcaaacattgacaaatactgctctgaatcctgttctatagatattggggggatgggtagagtgggaattttttcctaatcatgtttttaacattttaaaataaaatttaatactaagaaattatggcttatagtatctataaattaacaagaagtatgcaggtgcaaaaaagtggtggaacaaataccaacatccatccaaaatgaaaaag

SEQ ID NO: 126903 - DNA, 2280 bp, Homo sapiens
  Payload ID: 4877
  Gene Symbol: DUS4L
  Gene Name: dihydrouridine synthase 4-like
  ENST ID: ENST00000436411
  CDS Start-End: 700-972
cccacctggcgaactgactctcagcccgcgcctgggctaagcctggctaggagccgcgcaggtactcgagcagtgggcgcccagggtccgagtgctctgcgcccagcgcaccgagggagccaaggccgtcgggccggcgctttcagctgtctctcgcagcagctcagggccgcgccccctgggctggcgtcgtgccctagccaaggagaaggtgggcaccggaacgtggccgcagcgcttatctgtgaagcaagtattaaacctcagaacaggggccgcgcggcgtaaggcaggagagcagagcggaggtttcagggagcttcgtttgccctccacactcacaagagtcacgcgttagttgctacacagctttatctgttccacgccttgattggcactcctggggtaataaaagcccgcaggaaatgcttgggaagaaaagttgctggggatgaacagtgaagagaattagggagagtcgatgaagaaggaagtctgaaccataaaaggaccaataaaactcactgtctctaccctccttccttcccatgagacctttgaccttttgccttttctacttcttcctcagtttcagtcacgtgccagactttttcttaattacaaactgatagatggtccacatctcaactaacagtattgacgctgtaagagcatcagatttgaaacatatctgtattaatgaagagtgactgcatgcaaacgacaatatgtcaggaaagaaaaaaagatcccatagaaatgtttcattctggacagctggtaaaagtctgtgccccaatggttcgatattcaaagttggcttttaggacactagtaagaaaatatagttgtgatctgtgttacacaccaatgattgttgccgctgattttgtcaaatctataaaagccagagacagcgaatttaccacaaatcaaggtgggcaatggcagaaggttatggggcttgcttaataaacaagccagagcttgttcaagacatggtgaaacaagtaagaaatcaagtggaaacccctggattttcagtttctattaaaataaggatccatgatgaccttaaaagaactgtagatctttgtcaaaaggctgaagcaacaggagtttcatggattacagtccatggaagaactgctgaagaaagacatcagccagtgcactatgattccattaaaataattaaggaaaatatgtctatacctgtaattgctaatggagacatcagaagcttaaaggaagcagaaaatgtgtggcggattactgggacagatggtgtgatggttgcaagaggactcttagcaaacccggccatgtttgctggatatgaggaaaccccactgaaatgcatctgggactgggttgacattgctcttgaactcgggactccttacatgtgtttccatcaacatttaatgtacatgatggaaaagataacttcaaggcaggaaaaaagggtatttaatgctctgtcaagcacatcagcaatcatagattaccttacagaccattatggcatttgactagacttcccaaataattttaatatatacttttagacccacagtgaaaccacagaaggtcatattttgtaccttaaaccagtagctctcaaattttagtataaaaacaattcctgggagcgttttttaaaaatcagttgtagacaccaccctcagagattctgattaggtagatctggagtagacccagaaatacacagtttaaagaaaactcccagtggttcaaacatcctgatcatcctaggcaaacattgacaaatactgctctgaatcctgttctatagatattggggggatgggtagagtgggaattttttcctaatcatgtttttaacattttaaaataaaatttaatactaagaaattatggcttatagtatctataaattaacaagaagtatgcaggtgcaaaaaagtggtggaacaaataccaacatccatccaaaatgaaaaagaacaggaaattctgaatagaattgcactcagaacttatattaaaaattccatttggttaatgacattaaatttggtacatttcaaaacttctaggtcctccaaagattgaaagcttaataatctcctacctaaaaagataaaattaattgcaatctaccatatcttaagtataggaaatttggtgtccaacctggagatgattatatatttgaaatatttcctagagaatagtaaccaggttttgtttttaactttaaaacctaattacttttgtgcctctcagccgttg

SEQ ID NO: 126904 - DNA, 2859 bp, Homo sapiens
  Payload ID: 4878
  Gene Symbol: DIMT1
  Gene Name: DIM1 dimethyladenosine transferase 1 homolog
  Uniprot ID: Q9UNQ2
  ENST ID: ENST00000199320
  CDS Start-End: 162-1103
gctcagagcgtacgggagggggcggacccttgcccctccggcgcttgggccagagtggtgcgggcggcgcgtggcggcgatccccacgtggtggctttctcacgctagccctctttggtcctccttgacgtcccgggcctgtgggcccgctttctgccgagatgccgaaggtcaagtcgggggccatcggccgccgccgcgggcggcaggagcagcgccgggagctgaagagcgctggaggactcatgttcaacacggggattgggcagcacattttgaaaaatcctctcattattaacagcattatcgataaggctgccttaagaccaactgatgtagtgctggaagttggacctggaactggcaacatgactgtaaagttgttagaaaaggcaaaaaaggttgttgcttgtgaacttgacccaaggctagtagctgaacttcacaaaagagttcagggcacgcctgtggccagcaaacttcaagtactggtgggtgatgtgctgaaaacagatttgccattctttgatacttgtgtggcaaatttgccttatcagatctcttcaccttttgtcttcaagctgttgctacatcgaccttttttcaggtgtgctatacttatgtttcaaagagaatttgccctccgactggttgcaaaacctggagataagttatactgcagactctcaattaatacacagctgttggcacgtgtggaccatctaatgaaagtgggaaagaataacttcagaccaccgcccaaggtggaatccagtgttgtaaggatagaacctaagaatccaccaccacccatcaattttcaggaatgggatggtctagtaaggataacctttgttaggaaaaacaagacactctctgctgcatttaaatcaagtgcagtgcaacaactcttggaaaaaaactacagaattcactgttcagtccataatattataataccagaagatttcagcatagcagataaaatacagcaaatcctaaccagcacaggttttagtgacaaacgggcccgttccatggacatagatgacttcatcagattgctacatggattcaacgcagaaggtattcatttttcctaggtatttggaaaacagaaattttcaaggtcaagaaaagaaatgaattttgtattttttgtatttgagaagataatgcttttgctttactgagacattatttacttgactatttttggttcaatactactactgttgtcaccatttatgattctgaattttaaagttggaaagttctaagtatcaaagtttttaatatataatgctggtccaatctattcataataatcttcaagttcaggagccgcagagacgcacaactttacacttatcatttctaacagtttattgtataaagatgttactcttctatttactgttatatactgtaaggccttctttaggcctttagctctgttcctccagtaataaaaaagttaaaatatgcttcactagtcacacattccccataccatttcgtgttattcacattccccgtaccatttcttgttattcacatgtacagtaaaacaattgtttcttaaattatttttattttggttctctcattctcttccctatttatcctatacagtgtctgttacgattgcctacctctttcgctatcctatagcgtcagagacttagggttctgggtaagcccaagtctgctactgccaccgtgcagtgccaggcatattaaagggcatgactcccaacatgtaaaatgaggaagctaaactggaatgaaattaacaataaaattatctttttttatggttcttagggagataactataggcttagcaaaatttcagagggttttgtaattgaaactggtttcaacttcagaaaaacagccatttcccataactacaggttcccagtattcctatgatttctggacaattaaaatttccagttcctttttcatatacctggtgcttagttttaagctattttaaaactgtcagactgagaatttcaatagatgtcataaactagttttattagctactatgtttaagtcaatataatactaagtgctgttaatatactataatagagttatagtagctattttgtttctataaaaaattaataaaaatatctttattgatatttggctttttttaatacctaacttaatagaagagtgtttccaattaatttaacaaagccagattttgaaatctggcttcaaagtcatagtaaatgttactacataattaaaataatgcttgttcttaatgtataatccagaacaaaggcatcaagctgcttttgttaaacaaatatgaaataatatacattaagagtagatttttttgtttaatttcacaaaactattttgcagagttcacttgtatcatctctatccttatagtaaaaattttaagatttaactcggctttctcaggttatttccctctacccctatgaactgctgagttttagttccttttctggccttcagttttcactatctgtaaagctgaaggactgtattatattacctccagtatcttttctggtactaatttttaaaatacctgatcagaatgaagccatcatagtgtaaggcagcatatttgtctataaggagactttccaaagacagtacccatccaatgcaaataataaatttgaagctaatcatctgttgtgctttaaaatgagcaaattcacatgtctttattgccctttgaaagttggttaatctcaaaaactaccttttttttaaatatcctttgcaaggtcaattgtaacagttctccatccttcctcttccctttgaaataaacacaaatagaatata

SEQ ID NO: 126905 - DNA, 1208 bp, Homo sapiens
  Payload ID: 4878
  Gene Symbol: DIMT1
  Gene Name: DIM1 dimethyladenosine transferase 1 homolog
  ENST ID: ENST00000506390
  CDS Start-End: 127-954
ctccggcgcttgggccagagtggtgcgggcggcgcgtggcggcgatccccacgtggtggctttctcacgctagccctctttggtcctccttgacgtcccgggcctgtgggcccgctttctgccgagatgccgaaggtcaagtcgggggccatcggccgccgccgcgggcggcaggagcagcgccgggagctgaagagcgctggaggactcatgttcaacacggggattgggcagcacattttgaaaaatcctctcattattaacagcattatcgataaggctgccttaagaccaactgatgtagtgctggaagttggacctggaactggcaacatgactgtaaagttgttagaaaaggcaaaaaaggttgttgcttgtgaacttgacccaaggctagtagctgaacttcacaaaagagttcagggcacgcctgtggccagcaaacttcaagtactggtgggtgatgtgctgaaaacagatttgccattctttgatacttgtgtggcaaatttgccttatcagatctcttcaccttttgtcttcaagctgttgctacatcgaccttttttcaggtgtgctatacttatgtttcaaagagaatttgccctccgactggttgcaaaacctggagataagttatactgcagactctcaattaatacacagctgttggcacgtgtggaccatctaatgaaagtgggaaagaataacttcagaccaccgcccaaggtggaatccagtgttgtaaggatagaacctaagaatccaccaccacccatcaattttcaggaatgggatggtctagtaaggataacctttgttaggaaaaacaagacactctctgctgcatttaaatcaagtgcagtgcaacaactcttggaaaaaaactacagaattcactgttcagtccataatattgtcagtgctgctgtgtatcctgtgaaacagatatgagcaactttgattactccaccctgtcctctaactactgacagttgtttttagccataacaagaatcagattcagcagttacaggttcctcaaagctgtagatatgtgtagcttgcacaacttaaaataattgtgtagtttactgtcctctgaattgtgaccacgtcttgtttcttgctcacatagcagttacaaatatagttattactttctttgtatagaaattgaaataaagttcatatggctcaatagcaga

SEQ ID NO: 126906 - DNA, 1034 bp, Homo sapiens
  Payload ID: 4878
  Gene Symbol: DIMT1
  Gene Name: DIM1 dimethyladenosine transferase 1 homolog
  ENST ID: ENST00000514911
  CDS Start-End: 168-632
ggaggagctcagagcgtacgggagggggcggacccttgcccctccggcgcttgggccagagtggtgcgggcggcgcgtggcggcgatccccacgtggtggctttctcacgctagccctctttggtcctccttgacgtcccgggcctgtgggcccgctttctgccgagatgccgaaggtcaagtcgggggccatcggccgccgccgcgggcggcaggagcagcgccgggagctgaagagcgctggaggactcatgttcaacacggggattgggcagcacattttgaaaaatcctctcattattaacagcattatcgataaggctgccttaagaccaactgatgtagtgctggaagttggacctggaactggcaacatgactgtaaagttgttagaaaaggcaaaaaaggttgttgcttgtgaacttgacccaaggctagtagctgaacttcacaaaagagttcagggcacgcctgtggccagcaaacttcaagtactggtgggtgatgtgctgaaaacagatttgccattctttgatacttgtgtggcaaatttgccttatcagatctcttcaccttttgtcttcaagctgttgctacatcgaccttttttcaggtttgtgacaaaagactagagttactgccaaattttgaaagacttacagttcaggtggtgaacatagccaaaaatgagtcaggtgtgctatacttatgtttcaaagagaatttgccctccgactggttgcaaaacctggagataagttatactgcagactctcaattaatacacagctgttggcacgtgtggaccatctaatgaaagtgggaaagaataacttcagaccaccgcccaaggtggaatccagtgttgtaaggatagaacctaagaatccaccaccacccatcaattttcaggaatgggatggtctagtaaggataacctttgttaggaaaaacaagacactctctgctgcatttaaatcaagtgcagtgcaacaactcttggaaaaaaactacagaattcactgttcagtcca

SEQ ID NO: 126907 - DNA, 3920 bp, Homo sapiens
  Payload ID: 4879
  Gene Symbol: DDAH1
  Gene Name: dimethylarginine dimethylaminohydrolase 1
  Uniprot ID: O94760
  ENST ID: ENST00000284031
  CDS Start-End: 96-953
aggagccgacgggcgctcgcaggctcagcgcgcgctgcccgcggcaggacccggccgcctccgccgccgccgccgcccctaagcctcccgaagccatggccgggctcggccaccccgccgccttcggccgggccacccacgccgtggtgcgggcgctacccgagtcgctcggccagcacgcgctgagaagcgccaagggcgaggaggtggacgtcgcccgcgcggaacggcagcaccagctctacgtgggcgtgctgggcagcaagctggggctgcaggtggtggagctgccggccgacgagagccttccggactgcgtcttcgtggaggacgtggccgtggtgtgcgaggagacggccctcatcacccgacccggggcgccgagccggaggaaggaggttgacatgatgaaagaagcattagaaaaacttcagctcaatatagtagagatgaaagatgaaaatgcaactttagatggcggagatgttttattcacaggcagagaattttttgtgggcctttccaaaaggacaaatcaacgaggtgctgaaatcttggctgatacttttaaggactatgcagtctccacagtgccagtggcagatgggttgcatttgaagagtttctgcagcatggctgggcctaacctgatcgcaattgggtctagtgaatctgcacagaaggcccttaagatcatgcaacagatgagtgaccaccgctacgacaaactcactgtgcctgatgacatagcagcaaactgtatatatctaaatatccccaacaaagggcacgtcttgctgcaccgaaccccggaagagtatccagaaagtgcaaaggtttatgagaaactgaaggaccatatgctgatccccgtgagcatgtctgaactggaaaaggtggatgggctgctcacctgctgctcagttttaattaacaagaaagtagactcctgagctgcagagtcccccccggtagccggcaagaccgcacaggcaaggccgatgactctgtgcccactcctgttgttttccttgacaatctactgtgccactgtgctactaactcttgtttacaaaatttgattctaagttgaattgcttcattcaacacccccaccctccctcccctcgaggtggtacctaagctgtggatttgctaaatgaattaagcaacctagaagatacagagctaatgaattatcaaaatgtgattaatcccagtaaggaaacactcatttagtgtctgtatttttggtgtgaaaattatttagttgccagtatattctgaagaatgtcttcttgatcagtcagataagcttgctttttttttttttttttttcatgaatcatgtttggttcctgtgaaagtccctggtccagggatcctcctcctttctcttttacttctgaattctgaaattcagttagttacttttgcctttcgctcttctatcacagccaccttgaccttgggtaaaacccaaggtctttccttctggctaccttcctgcaggtccaccctgtctgccattggtctcctctgcctctgactacatctgccaccaacaaccctcccctcacccctgccaggggcagacaggcttctcagcagaactgtgactgaaatcagagctgctgtctggggcagtgttaactacacagaggcacatcctgacagggtttgccccagagatctaaattccagaaggagggcaccacacctaggaaggtaaatccagtatcagaaggttgctaaaagattaaagatcaagaagcttggaaacatcccatgggtacaatgtcttagaaagtctttaagtcacataccatgaatttttgcttcattactgaccatatatgaccttggaggaactcttttttttttttccttctactcatttctgtttccacctaccctgactcaccgtatttccagtcttctacccctgcagttatcctagtccagcaaagtcatttctttcaaaagagacatcatgtctgaaaataattactggtagtctaatatgagccagagtaaacagctcctcatggtcaatgaacatgttcaggaagcgatcaccttgatgcttgaacccaaccccagacagtggacaattctactttgaaatatccgtgaatatttactgtgggatccaatttaaacttctttcttctctagcctttaaattacacaactttgaactgacacggatctcttacaaagaacaatgcggcactgaaggaagagatgattcctttactcaaacctgcaggaatcagcctattaacaggcaggggaaacggtactttccaatgaatggtaactgatccaggcacattatcacacttcctagtcatctccacctttcctgtattgcctgtggcttgttgtttaagattaagaatcaaagagattaagaagtatcacttcaaatcttgctctgctcacttctatgtttgcagtcaaattattccttatgttggtgacctaaagagaattactttcattcatttcatttcccccgtagcagatggaaggagaaacctctgagaaaatgaaaacatccttaaccactatctttcccttttatttgattattttatgtcagaaatttgcaaaagtttttttctcctccttctcttccttgttgcttaactttttaattcatgccatatgcagatatccaattatgtgcatcctgtgaataaaccacgtcttggtcactgtcatattttgaaccatctcatcagagatgaataatatctttttaccagagagagaacgaatgttagccacatgcccaagttaacaaagaaaaaatgttctcaaggttgtccttttgggttaaatctggcccttccttggcaaaagcaaaaattctccctgtgagagctcaacatctcaaatacaaccacaggaaaaatggcccaatctgccagtttaggcttaccagcatataatttttaatatctttacttctatcatcccaaatcaaagaactcttctctattatgtttaatcaattgcaagcaaatagatttttctttgtaacaatttgttctgcagaaggctgtttttcacttttcctttcttttgcttctttctgtctttccttctcttttgtctggagaaatcacttagactctgtgtgcctcttctacattgcattctgctctgctatgttacctgctaggctggcttctttggactccctatatgattgatgatgtgaaaacctaaattacttgcagcatagtattacttctttgatgttctcattagcataatgttatttttgaaaaggaaagatactatcacataagttttcctcatctgttgtgatatacaccaatggataaactaacggaaactgctttttgacattaaaagacaggagaaattatatttaactaagtaaaagttaagtcagaattacttgggtgatgtgattcaatttagttaaaggatgatatagagaaaatacattatttagcattatttcttcagctataatgaattgctatagaaatcaggcagatctttctaatgtgtattgattggtcttttcagctactctgaacagattactaaggccatctcctcatctctaagggagaaaaatagtctgtagatgaataatgtaaggtaaagagttgcatgtcagtctttgtaattatttacactttaactttctccagaactcagacatgatttcaacatggtgttagatttgtgcattttattttcctgaccacctcattccagccaatgtatggttatccactctgtgtgccaaaaccaatcatgcctttcacggccctttagttcagagaagttctgcactgatttttagtctcttgatgtctcaatcttacatgtataccaatcacaatggaataaagtgttgagttgtactgtga

SEQ ID NO: 126908 - DNA, 4017 bp, Homo sapiens
  Payload ID: 4879
  Gene Symbol: DDAH1
  Gene Name: dimethylarginine dimethylaminohydrolase 1
  Uniprot ID: O94760
  ENST ID: ENST00000426972
  CDS Start-End: 503-1051
gtttgtttctggacttcaactggggaatcttgaggatgagtttgccccagaagagaaatttagagaaccttaccgtcagctgcccatttaaagcagggggtgtgttgtgggatgggggtgggaagctggagcaacagggccaggaggtgtgggagcgggagacactagagtaacctatgtgcacagcctctccatataccatgtgctgttgcgcctgctagtaatcgacgacattaggcaagagaaacagcggctcctcaagtcctgcccaaagaccgtccagaaaccccagcctcccgtcgccttctcgccgcctccgctgggagccgcagatcagtccaagttgacggacaggaggcgaaatgtgcaaatgtttatggtttcatctgtatggaaaaggagctctggtaactttggccaagacttttcagtaggaaatgcttcaaaatacaaagcaagagctattttcaagaaagaccttctaaatttatattaggttgacatgatgaaagaagcattagaaaaacttcagctcaatatagtagagatgaaagatgaaaatgcaactttagatggcggagatgttttattcacaggcagagaattttttgtgggcctttccaaaaggacaaatcaacgaggtgctgaaatcttggctgatacttttaaggactatgcagtctccacagtgccagtggcagatgggttgcatttgaagagtttctgcagcatggctgggcctaacctgatcgcaattgggtctagtgaatctgcacagaaggcccttaagatcatgcaacagatgagtgaccaccgctacgacaaactcactgtgcctgatgacatagcagcaaactgtatatatctaaatatccccaacaaagggcacgtcttgctgcaccgaaccccggaagagtatccagaaagtgcaaaggtttatgagaaactgaaggaccatatgctgatccccgtgagcatgtctgaactggaaaaggtggatgggctgctcacctgctgctcagttttaattaacaagaaagtagactcctgagctgcagagtcccccccggtagccggcaagaccgcacaggcaaggccgatgactctgtgcccactcctgttgttttccttgacaatctactgtgccactgtgctactaactcttgtttacaaaatttgattctaagttgaattgcttcattcaacacccccaccctccctcccctcgaggtggtacctaagctgtggatttgctaaatgaattaagcaacctagaagatacagagctaatgaattatcaaaatgtgattaatcccagtaaggaaacactcatttagtgtctgtatttttggtgtgaaaattatttagttgccagtatattctgaagaatgtcttcttgatcagtcagataagcttgctttttttttttttttttttcatgaatcatgtttggttcctgtgaaagtccctggtccagggatcctcctcctttctcttttacttctgaattctgaaattcagttagttacttttgcctttcgctcttctatcacagccaccttgaccttgggtaaaacccaaggtctttccttctggctaccttcctgcaggtccaccctgtctgccattggtctcctctgcctctgactacatctgccaccaacaaccctcccctcacccctgccaggggcagacaggcttctcagcagaactgtgactgaaatcagagctgctgtctggggcagtgttaactacacagaggcacatcctgacagggtttgccccagagatctaaattccagaaggagggcaccacacctaggaaggtaaatccagtatcagaaggttgctaaaagattaaagatcaagaagcttggaaacatcccatgggtacaatgtcttagaaagtctttaagtcacataccatgaatttttgcttcattactgaccatatatgaccttggaggaactcttttttttttttccttctactcatttctgtttccacctaccctgactcaccgtatttccagtcttctacccctgcagttatcctagtccagcaaagtcatttctttcaaaagagacatcatgtctgaaaataattactggtagtctaatatgagccagagtaaacagctcctcatggtcaatgaacatgttcaggaagcgatcaccttgatgcttgaacccaaccccagacagtggacaattctactttgaaatatccgtgaatatttactgtgggatccaatttaaacttctttcttctctagcctttaaattacacaactttgaactgacacggatctcttacaaagaacaatgcggcactgaaggaagagatgattcctttactcaaacctgcaggaatcagcctattaacaggcaggggaaacggtactttccaatgaatggtaactgatccaggcacattatcacacttcctagtcatctccacctttcctgtattgcctgtggcttgttgtttaagattaagaatcaaagagattaagaagtatcacttcaaatcttgctctgctcacttctatgtttgcagtcaaattattccttatgttggtgacctaaagagaattactttcattcatttcatttcccccgtagcagatggaaggagaaacctctgagaaaatgaaaacatccttaaccactatctttcccttttatttgattattttatgtcagaaatttgcaaaagtttttttctcctccttctcttccttgttgcttaactttttaattcatgccatatgcagatatccaattatgtgcatcctgtgaataaaccacgtcttggtcactgtcatattttgaaccatctcatcagagatgaataatatctttttaccagagagagaacgaatgttagccacatgcccaagttaacaaagaaaaaatgttctcaaggttgtccttttgggttaaatctggcccttccttggcaaaagcaaaaattctccctgtgagagctcaacatctcaaatacaaccacaggaaaaatggcccaatctgccagtttaggcttaccagcatataatttttaatatctttacttctatcatcccaaatcaaagaactcttctctattatgtttaatcaattgcaagcaaatagatttttctttgtaacaatttgttctgcagaaggctgtttttcacttttcctttcttttgcttctttctgtctttccttctcttttgtctggagaaatcacttagactctgtgtgcctcttctacattgcattctgctctgctatgttacctgctaggctggcttctttggactccctatatgattgatgatgtgaaaacctaaattacttgcagcatagtattacttctttgatgttctcattagcataatgttatttttgaaaaggaaagatactatcacataagttttcctcatctgttgtgatatacaccaatggataaactaacggaaactgctttttgacattaaaagacaggagaaattatatttaactaagtaaaagttaagtcagaattacttgggtgatgtgattcaatttagttaaaggatgatatagagaaaatacattatttagcattatttcttcagctataatgaattgctatagaaatcaggcagatctttctaatgtgtattgattggtcttttcagctactctgaacagattactaaggccatctcctcatctctaagggagaaaaatagtctgtagatgaataatgtaaggtaaagagttgcatgtcagtctttgtaattatttacactttaactttctccagaactcagacatgatttcaacatggtgttagatttgtgcattttattttcctgaccacctcattccagccaatgtatggttatccactctgtgtgccaaaaccaatcatgcctttcacggccctttagttcagagaagttctgcactgatttttagtctcttgatgtctcaatcttacatgtataccaatcacaatggaataaagtgttgagttgtactgtg

SEQ ID NO: 126909 - DNA, 1519 bp, Homo sapiens
  Payload ID: 4879
  Gene Symbol: DDAH1
  Gene Name: dimethylarginine dimethylaminohydrolase 1
  Uniprot ID: O94760
  ENST ID: ENST00000539042
  CDS Start-End: 100-957
caagaggagccgacgggcgctcgcaggctcagcgcgcgctgcccgcggcaggacccggccgcctccgccgccgccgccgcccctaagcctcccgaagccatggccgggctcggccaccccgccgccttcggccgggccacccacgccgtggtgcgggcgctacccgagtcgctcggccagcacgcgctgagaagcgccaagggcgaggaggtggacgtcgcccgcgcggaacggcagcaccagctctacgtgggcgtgctgggcagcaagctggggctgcaggtggtggagctgccggccgacgagagccttccggactgcgtcttcgtggaggacgtggccgtggtgtgcgaggagacggccctcatcacccgacccggggcgccgagccggaggaaggaggttgacatgatgaaagaagcattagaaaaacttcagctcaatatagtagagatgaaagatgaaaatgcaactttagatggcggagatgttttattcacaggcagagaattttttgtgggcctttccaaaaggacaaatcaacgaggtgctgaaatcttggctgatacttttaaggactatgcagtctccacagtgccagtggcagatgggttgcatttgaagagtttctgcagcatggctgggcctaacctgatcgcaattgggtctagtgaatctgcacagaaggcccttaagatcatgcaacagatgagtgaccaccgctacgacaaactcactgtgcctgatgacatagcagcaaactgtatatatctaaatatccccaacaaagggcacgtcttgctgcaccgaaccccggaagagtatccagaaagtgcaaaggtttatgagaaactgaaggaccatatgctgatccccgtgagcatgtctgaactggaaaaggtggatgggctgctcacctgctgctcagttttaattaacaagaaagtagactcctgagctgcagagtcccccccggtagccggcaagaccgcacaggcaaggccgatgactctgtgcccactcctgttgttttccttgacaatctactgtgccactgtgctactaactcttgtttacaaaatttgattctaagttgaattgcttcatctataatgaattgctatagaaatcaggcagatctttctaatgtgtattgattggtcttttcagctactctgaacagattactaaggccatctcctcatctctaagggagaaaaatagtctgtagatgaataatgtaaggtaaagagttgcatgtcagtctttgtaattatttacactttaactttctccagaactcagacatgatttcaacatggtgttagatttgtgcattttattttcctgaccacctcattccagccaatgtatggttatccactctgtgtgccaaaaccaatcatgcctttcacggccctttagttcagagaagttctgcactgatttttagtctcttgatgtctcaatcttacatgtataccaatcacaatggaataaagtgttgagttgtactgtg

SEQ ID NO: 126910 - DNA, 3909 bp, Homo sapiens
  Payload ID: 4879
  Gene Symbol: DDAH1
  Gene Name: dimethylarginine dimethylaminohydrolase 1
  Uniprot ID: O94760
  ENST ID: ENST00000535924
  CDS Start-End: 390-938
gggggtgggaagctggagcaacagggccaggaggtgtgggagcgggagacactagagtaacctatgtgcacagcctctccatataccatgtgctgttgcgcctgctagtaatcgacgacattaggcaagagaaacagcggctcctcaagtcctgcccaaagaccgtccagaaaccccagcctcccgtcgccttctcgccgcctccgctgggagccgcagatcagtccaagttgacggacaggaggcgaaatgtgcaaatgtttatggtttcatctgtatggaaaaggagctctggtaactttggccaagacttttcagtaggaaatgcttcaaaatacaaagcaagagctattttcaagaaagaccttctaaatttatattaggttgacatgatgaaagaagcattagaaaaacttcagctcaatatagtagagatgaaagatgaaaatgcaactttagatggcggagatgttttattcacaggcagagaattttttgtgggcctttccaaaaggacaaatcaacgaggtgctgaaatcttggctgatacttttaaggactatgcagtctccacagtgccagtggcagatgggttgcatttgaagagtttctgcagcatggctgggcctaacctgatcgcaattgggtctagtgaatctgcacagaaggcccttaagatcatgcaacagatgagtgaccaccgctacgacaaactcactgtgcctgatgacatagcagcaaactgtatatatctaaatatccccaacaaagggcacgtcttgctgcaccgaaccccggaagagtatccagaaagtgcaaaggtttatgagaaactgaaggaccatatgctgatccccgtgagcatgtctgaactggaaaaggtggatgggctgctcacctgctgctcagttttaattaacaagaaagtagactcctgagctgcagagtcccccccggtagccggcaagaccgcacaggcaaggccgatgactctgtgcccactcctgttgttttccttgacaatctactgtgccactgtgctactaactcttgtttacaaaatttgattctaagttgaattgcttcattcaacacccccaccctccctcccctcgaggtggtacctaagctgtggatttgctaaatgaattaagcaacctagaagatacagagctaatgaattatcaaaatgtgattaatcccagtaaggaaacactcatttagtgtctgtatttttggtgtgaaaattatttagttgccagtatattctgaagaatgtcttcttgatcagtcagataagcttgctttttttttttttttttttcatgaatcatgtttggttcctgtgaaagtccctggtccagggatcctcctcctttctcttttacttctgaattctgaaattcagttagttacttttgcctttcgctcttctatcacagccaccttgaccttgggtaaaacccaaggtctttccttctggctaccttcctgcaggtccaccctgtctgccattggtctcctctgcctctgactacatctgccaccaacaaccctcccctcacccctgccaggggcagacaggcttctcagcagaactgtgactgaaatcagagctgctgtctggggcagtgttaactacacagaggcacatcctgacagggtttgccccagagatctaaattccagaaggagggcaccacacctaggaaggtaaatccagtatcagaaggttgctaaaagattaaagatcaagaagcttggaaacatcccatgggtacaatgtcttagaaagtctttaagtcacataccatgaatttttgcttcattactgaccatatatgaccttggaggaactcttttttttttttccttctactcatttctgtttccacctaccctgactcaccgtatttccagtcttctacccctgcagttatcctagtccagcaaagtcatttctttcaaaagagacatcatgtctgaaaataattactggtagtctaatatgagccagagtaaacagctcctcatggtcaatgaacatgttcaggaagcgatcaccttgatgcttgaacccaaccccagacagtggacaattctactttgaaatatccgtgaatatttactgtgggatccaatttaaacttctttcttctctagcctttaaattacacaactttgaactgacacggatctcttacaaagaacaatgcggcactgaaggaagagatgattcctttactcaaacctgcaggaatcagcctattaacaggcaggggaaacggtactttccaatgaatggtaactgatccaggcacattatcacacttcctagtcatctccacctttcctgtattgcctgtggcttgttgtttaagattaagaatcaaagagattaagaagtatcacttcaaatcttgctctgctcacttctatgtttgcagtcaaattattccttatgttggtgacctaaagagaattactttcattcatttcatttcccccgtagcagatggaaggagaaacctctgagaaaatgaaaacatccttaaccactatctttcccttttatttgattattttatgtcagaaatttgcaaaagtttttttctcctccttctcttccttgttgcttaactttttaattcatgccatatgcagatatccaattatgtgcatcctgtgaataaaccacgtcttggtcactgtcatattttgaaccatctcatcagagatgaataatatctttttaccagagagagaacgaatgttagccacatgcccaagttaacaaagaaaaaatgttctcaaggttgtccttttgggttaaatctggcccttccttggcaaaagcaaaaattctccctgtgagagctcaacatctcaaatacaaccacaggaaaaatggcccaatctgccagtttaggcttaccagcatataatttttaatatctttacttctatcatcccaaatcaaagaactcttctctattatgtttaatcaattgcaagcaaatagatttttctttgtaacaatttgttctgcagaaggctgtttttcacttttcctttcttttgcttctttctgtctttccttctcttttgtctggagaaatcacttagactctgtgtgcctcttctacattgcattctgctctgctatgttacctgctaggctggcttctttggactccctatatgattgatgatgtgaaaacctaaattacttgcagcatagtattacttctttgatgttctcattagcataatgttatttttgaaaaggaaagatactatcacataagttttcctcatctgttgtgatatacaccaatggataaactaacggaaactgctttttgacattaaaagacaggagaaattatatttaactaagtaaaagttaagtcagaattacttgggtgatgtgattcaatttagttaaaggatgatatagagaaaatacattatttagcattatttcttcagctataatgaattgctatagaaatcaggcagatctttctaatgtgtattgattggtcttttcagctactctgaacagattactaaggccatctcctcatctctaagggagaaaaatagtctgtagatgaataatgtaaggtaaagagttgcatgtcagtctttgtaattatttacactttaactttctccagaactcagacatgatttcaacatggtgttagatttgtgcattttattttcctgaccacctcattccagccaatgtatggttatccactctgtgtgccaaaaccaatcatgcctttcacggccctttagttcagagaagttctgcactgatttttagtctcttgatgtctcaatcttacatgtataccaatcacaatggaataaagtgttgagttgtactgtgatcaa

SEQ ID NO: 126911 - DNA, 703 bp, Homo sapiens
  Payload ID: 4879
  Gene Symbol: DDAH1
  Gene Name: dimethylarginine dimethylaminohydrolase 1
  ENST ID: ENST00000633113
  CDS Start-End: 146-703
gttattatttgctccatggctcaatccgggtcagactgttcttcagtaacacaggtggatgttaaaacagggaatctgttgaaaagattgcggaggaactgcttcccaaaagcagttctggatggcaatttgatggcagtcagctatggttgacatgatgaaagaagcattagaaaaacttcagctcaatatagtagagatgaaagatgaaaatgcaactttagatggcggagatgttttattcacaggcagagaattttttgtgggcctttccaaaaggacaaatcaacgaggtgctgaaatcttggctgatacttttaaggactatgcagtctccacagtgccagtggcagatgggttgcatttgaagagtttctgcagcatggctgggcctaacctgatcgcaattgggtctagtgaatctgcacagaaggcccttaagatcatgcaacagatgagtgaccaccgctacgacaaactcactgtgcctgatgacatagcagcaaactgtatatatctaaatatccccaacaaagggcacgtcttgctgcaccgaaccccggaagagtatccagaaagtgcaaaggtttatgagaaactgaaggaccatatgctgatccccgtgagcatgtctgaactggaaaaggtggatgggctgctcacctgctgctcagttttaattaacaagaaagtagactcctga

SEQ ID NO: 126912 - DNA, 1330 bp, Homo sapiens
  Payload ID: 4880
  Gene Symbol: DDAH2
  Gene Name: dimethylarginine dimethylaminohydrolase 2
  Uniprot ID: O95865
  ENST ID: ENST00000375787
  CDS Start-End: 274-1131
cccgcttagacaatgccccggagccgccagaccgtcgcgcccctgccccatcgtagtatatgagctcgcctacacaaggacccgcgctaaaagccagagctcccagtccccgaggcttgaagacggggactcccttctccaccaactctgtcctcggggggtggggccccagccgagatcacagcgcgacaggagtgggggtggccgctggaggtgaagaaacaagaaaactaagaaatccgagcggttggagggggagtctgtgtggatgggatggggacgccgggggaggggctgggccgctgctcccatgccctgatccggggagtcccagagagcctggcgtcgggggaaggtgcgggggctggccttcccgctctggatctggccaaagctcaaagggagcacggggtgctgggaggtaaactgaggcaacgactggggctacagctgctagaactgccacctgaggagtcattgccgctgggaccgctgcttggcgacacggccgtgatccaaggggacacggccctaatcacgcggccctggagccccgctcgtaggccagaggtcgatggagtccgcaaagccctgcaagacctggggctccgaattgtggaaataggagacgagaacgcgacgctggatggcactgacgttctcttcaccggccgggagtttttcgtaggcctctccaaatggaccaatcaccgaggagctgagatcgtggcggacacgttccgggacttcgccgtctccactgtgccagtctcgggtccctcccacctgcgcggtctctgcggcatggggggacctcgcactgttgtggcaggcagcagcgacgctgcccaaaaggctgtccgggcaatggcagtgctgacagatcacccatatgcctccctgaccctcccagatgacgcagctgctgactgtctctttcttcgtcctgggttgcctggtgtgccccctttcctcctgcaccgtggaggtggggatctgcccaacagccaggaggcactgcagaagctctctgatgtcaccctggtacctgtgtcctgctcagaactggagaaggctggcgccgggctcagctccctctgcttggtgctcagcacacgcccccacagctgagggcctggccttggggtactgctggccaggggtaggatagtataggaagtagaaggggaaggagggttagatagagaatgctgaataggcagtagttgggagagagcctcaatattgggggaggggagagtgtagggaaaaggatccactgggtgaatcctccctctcagaaccaataaaatagaattgaccttttaga

SEQ ID NO: 126913 - DNA, 1688 bp, Homo sapiens
  Payload ID: 4880
  Gene Symbol: DDAH2
  Gene Name: dimethylarginine dimethylaminohydrolase 2
  Uniprot ID: O95865
  ENST ID: ENST00000375789
  CDS Start-End: 632-1489
atactaggtcgcgctaggggcagcgtgaccagccagggcggagagaggatgcttaactccttaggctcgaactcctcccttcctacccacctctctcccttctcgttcgggtattcaggacttccattccccagcccctgcctctccagctttctccttctgtcccataacccctgcgggtcgcgggctggacttccagtccctgcggtagcgagcagctgagggttaagggggcggggctgctgcatttttggggagtgagcgcatcctagtggctgccaagaggggcgcccgacagggacctcacaagcccccaagcaggggcaacaggtgttttggagattagagaccctagccttgttcctcaggctcctcttaaagaatctgacccctgagggtgctgggtagagtgaggtcgacaggagcggaaggtctggagtgggtggggcggagtgggagggacgcctagagatggcaggaggaagacctgggcgctcttaaccacccccaacgcccttgtctgcatgtctttttctctgtctcctccttttctgtttcttctcccagacaggtgaagaaacaagaaaactaagaaatccgagcggttggagggggagtctgtgtggatgggatggggacgccgggggaggggctgggccgctgctcccatgccctgatccggggagtcccagagagcctggcgtcgggggaaggtgcgggggctggccttcccgctctggatctggccaaagctcaaagggagcacggggtgctgggaggtaaactgaggcaacgactggggctacagctgctagaactgccacctgaggagtcattgccgctgggaccgctgcttggcgacacggccgtgatccaaggggacacggccctaatcacgcggccctggagccccgctcgtaggccagaggtcgatggagtccgcaaagccctgcaagacctggggctccgaattgtggaaataggagacgagaacgcgacgctggatggcactgacgttctcttcaccggccgggagtttttcgtaggcctctccaaatggaccaatcaccgaggagctgagatcgtggcggacacgttccgggacttcgccgtctccactgtgccagtctcgggtccctcccacctgcgcggtctctgcggcatggggggacctcgcactgttgtggcaggcagcagcgacgctgcccaaaaggctgtccgggcaatggcagtgctgacagatcacccatatgcctccctgaccctcccagatgacgcagctgctgactgtctctttcttcgtcctgggttgcctggtgtgccccctttcctcctgcaccgtggaggtggggatctgcccaacagccaggaggcactgcagaagctctctgatgtcaccctggtacctgtgtcctgctcagaactggagaaggctggcgccgggctcagctccctctgcttggtgctcagcacacgcccccacagctgagggcctggccttggggtactgctggccaggggtaggatagtataggaagtagaaggggaaggagggttagatagagaatgctgaataggcagtagttgggagagagcctcaatattgggggaggggagagtgtagggaaaaggatccactgggtgaatcctccctctcagaaccaataaaatagaattgaccttttaga

SEQ ID NO: 126914 - DNA, 1688 bp, Homo sapiens
  Payload ID: 4880
  Gene Symbol: DDAH2
  Gene Name: dimethylarginine dimethylaminohydrolase 2
  Uniprot ID: O95865
  ENST ID: ENST00000375792
  CDS Start-End: 632-1489
ataaaatacagaataaaaatcaagtgtttttacgcaatggggatttaaagtgtgggcgacatggaatgaggggtgggtcagtgatcttgagctcagggcagaagccaggaattaagaagggaaatgtttgtggtggggctgctatgtttcgtgccggtccgccggtccgccgttgcgctgttctgaggtctacgaagcgtttgcagccccgtcgccagggccggccagatctgggtgggcctgggcagcgctcgctgggcggtgccgatttctggcaaggggggcgcagtctggatgtaatgggcgaggcttagcagggcggaatgggcgtggcccgaagaagccccgccccgtcccgcttagacaatgccccggagccgccagaccgtcgcgcccctgccccatcgtagtatatgagctcgcctacacaaggacccgcgctaaaagccagagctcccagtccccgaggcttgaagacggggactcccttctccaccaactctgtcctcggggggtggggccccagccgagatcacagcgcgacaggagtgggggtggccgctggagacaggtgaagaaacaagaaaactaagaaatccgagcggttggagggggagtctgtgtggatgggatggggacgccgggggaggggctgggccgctgctcccatgccctgatccggggagtcccagagagcctggcgtcgggggaaggtgcgggggctggccttcccgctctggatctggccaaagctcaaagggagcacggggtgctgggaggtaaactgaggcaacgactggggctacagctgctagaactgccacctgaggagtcattgccgctgggaccgctgcttggcgacacggccgtgatccaaggggacacggccctaatcacgcggccctggagccccgctcgtaggccagaggtcgatggagtccgcaaagccctgcaagacctggggctccgaattgtggaaataggagacgagaacgcgacgctggatggcactgacgttctcttcaccggccgggagtttttcgtaggcctctccaaatggaccaatcaccgaggagctgagatcgtggcggacacgttccgggacttcgccgtctccactgtgccagtctcgggtccctcccacctgcgcggtctctgcggcatggggggacctcgcactgttgtggcaggcagcagcgacgctgcccaaaaggctgtccgggcaatggcagtgctgacagatcacccatatgcctccctgaccctcccagatgacgcagctgctgactgtctctttcttcgtcctgggttgcctggtgtgccccctttcctcctgcaccgtggaggtggggatctgcccaacagccaggaggcactgcagaagctctctgatgtcaccctggtacctgtgtcctgctcagaactggagaaggctggcgccgggctcagctccctctgcttggtgctcagcacacgcccccacagctgagggcctggccttggggtactgctggccaggggtaggatagtataggaagtagaaggggaaggagggttagatagagaatgctgaataggcagtagttgggagagagcctcaatattgggggaggggagagtgtagggaaaaggatccactgggtgaatcctccctctcagaaccaataaaatagaattgaccttttaga

SEQ ID NO: 126915 - DNA, 1330 bp, Homo sapiens
  Payload ID: 4880
  Gene Symbol: DDAH2
  Gene Name: dimethylarginine dimethylaminohydrolase 2
  Uniprot ID: O95865
  ENST ID: ENST00000383409
  CDS Start-End: 274-1131
cccgcttagacaatgccccggagccgccagaccgtcgcgcccctgccccatcgtagtatatgagctcgcctacacaaggacccccgctaaaagccagagctcccagtccccgaggcttgaagacggggactcccttctccaccaactctgtcctcggggggtggggccccagccgagatcacagcgcgacaggagtgggggtggccgctggaggtgaagaaacaagaaaactaagaaatccgagcggttggagggggagtctgtgtggatgggatggggacgccgggggaggggctgggccgctgctcccatgccctgatccggggagtcccagagagcctggcgtcgggggaaggtgcgggggctggccttcccgctctggatctggccaaagctcaaagggagcacggggtgctgggaggtaaactgaggcaacgactggggctacagctgctagaactgccacctgaggagtcattgccgctgggaccgctgcttggcgacacggccgtgatccaaggggacacggccctaatcacgcggccctggagccccgctcgtaggccagaggtcgatggagtccgcaaagccctgcaagacctggggctccgaattgtggaaataggagacgagaacgcgacgctggatggcactgacgttctcttcaccggccgggagtttttcgtaggcctctccaaatggaccaatcaccgaggagctgagatcgtggcggacacgttccgggacttcgccgtctccactgtgccagtctcgggtccctcccacctgcgcggtctctgcggcatggggggacctcgcactgttgtggcaggcagcagcgacgctgcccaaaaggctgtccgggcaatggcagtgctgacagatcacccatatgcctccctgaccctcccagatgacgcagctgctgactgtctctttcttcgtcctgggttgcctggtgtgccccctttcctcctgcaccgtggaggtggggatctgcccaacagccaggaggcactgcagaagctctctgatgtcaccctggtacctgtgtcctgctcagaactggagaaggctggcgccgggctcagctccctctgcttggtgctcagcacacgcccccacagctgagggcctggccttggggtactgctggccaggggtaggatagtataggaagtagaaggggaaggagggttagatagagaatgctgaataggcagtagttgggagagagcctcaatattgggggaggggagagtgtagggaaaaggatccactgggtgaatcctccctctcagaaccaataaaatagaattgaccttttaga

SEQ ID NO: 126916 - DNA, 1688 bp, Homo sapiens
  Payload ID: 4880
  Gene Symbol: DDAH2
  Gene Name: dimethylarginine dimethylaminohydrolase 2
  Uniprot ID: O95865
  ENST ID: ENST00000400062
  CDS Start-End: 632-1489
atactaggtcgtgctaggggcagcgtgaccagccagggcggagagaggatgcttaactccttaggctcgaactcctcccttcctacccacctctctcccttctcgttcgggtattcaggacttccattccccagcccctgcctctccagctttctccttctgtcccataacccctgcgggtcccgggctggacttccagtccctgcggtagcgagcagctgagggttaagggggcggggctgctgcatttttggggagtgagcgcatcctagtggctgccaagaggggcgcccgacagggacctcacaagcccccaagcaggggcaacaggtgttttggagattagagaccctagccttgttcctcaggctcctcttaaagaatctgacccctgagggtgctgggtagagtgaggtcgacaggagcggaaggtctggagtgggtggggcggagtgggagggacgcctagagatggcaggaggaagacctgggcgctcttaaccacccccaacgcccttgtctgcatgtctttttctctgtctcctccttttctgtttcttctcccagacaggtgaagaaacaagaaaactaagaaatccgagcggttggagggggagtctgtgtggatgggatggggacgccgggggaggggctgggccgctgctcccatgccctgatccggggagtcccagagagcctggcgtcgggggaaggtgcgggggctggccttcccgctctggatctggccaaagctcaaagggagcacggggtgctgggaggtaaactgaggcaacgactggggctacagctgctagaactgccacctgaggagtcattgccgctgggaccgctgcttggcgacacggccgtgatccaaggggacacggccctaatcacgcggccctggagccccgctcgtaggccagaggtcgatggagtccgcaaagccctgcaagacctggggctccgaattgtggaaataggagacgagaacgcgacgctggatggcactgacgttctcttcaccggccgggagtttttcgtaggcctctccaaatggaccaatcaccgaggagctgagatcgtggcggacacgttccgggacttcgccgtctccactgtgccagtctcgggtccctcccacctgcgcggtctctgcggcatggggggacctcgcactgttgtggcaggcagcagcgacgctgcccaaaaggctgtccgggcaatggcagtgctgacagatcacccatatgcctccctgaccctcccagatgacgcagctgctgactgtctctttcttcgtcctgggttgcctggtgtgccccctttcctcctgcaccgtggaggtggggatctgcccaacagccaggaggcactgcagaagctctctgatgtcaccctggtacctgtgtcctgctcagaactggagaaggctggcgccgggctcagctccctctgcttggtgctcagcacacgcccccacagctgagggcctggccttggggtactgctggccaggggtaggatagtataggaagtagaaggggaaggagggttagatagagaatgctgaataggcagtagttgggagagagcctcaatattgggggaggggagagtgtagggaaaaggatccactgggtgaatcctccctctcagaaccaataaaatagaattgaccttttaga

SEQ ID NO: 126917 - DNA, 1688 bp, Homo sapiens
  Payload ID: 4880
  Gene Symbol: DDAH2
  Gene Name: dimethylarginine dimethylaminohydrolase 2
  Uniprot ID: O95865
  ENST ID: ENST00000400063
  CDS Start-End: 632-1489
ataaaatacagaataaaaatcaagtgtttttacgcaatgggggtttaaagtgtgggcgacatggaatgaggggtgggtcagtgatcttgagctcagggcagaagccaggaattaagaagggaaatgtttgtggtggggctgctatgtttcgtgccggtccgccggtccgccgttgcgctgttctgaggtctacgaagcgtttgcagccccgtcgccagggccggccagatctgggtgggcctgggcagcgctcgctgggcggtgccgatttctggcaaggggggcgcagtctggatgtaatgggcgcggcttagcagggcggaatgggcgtggcccgaagaagccccgccccgtcccgcttagacaatgccccggagccgccagaccgtcgcgcccctgccccatcgtagtatatgagctcgcctacacaaggacccccgctaaaagccagagctcccagtccccgaggcttgaagacggggactcccttctccaccaactctgtcctcggggggtggggccccagccgagatcacagcgcgacaggagtgggggtggccgctggagacaggtgaagaaacaagaaaactaagaaatccgagcggttggagggggagtctgtgtggatgggatggggacgccgggggaggggctgggccgctgctcccatgccctgatccggggagtcccagagagcctggcgtcgggggaaggtgcgggggctggccttcccgctctggatctggccaaagctcaaagggagcacggggtgctgggaggtaaactgaggcaacgactggggctacagctgctagaactgccacctgaggagtcattgccgctgggaccgctgcttggcgacacggccgtgatccaaggggacacggccctaatcacgcggccctggagccccgctcgtaggccagaggtcgatggagtccgcaaagccctgcaagacctggggctccgaattgtggaaataggagacgagaacgcgacgctggatggcactgacgttctcttcaccggccgggagtttttcgtaggcctctccaaatggaccaatcaccgaggagctgagatcgtggcggacacgttccgggacttcgccgtctccactgtgccagtctcgggtccctcccacctgcgcggtctctgcggcatggggggacctcgcactgttgtggcaggcagcagcgacgctgcccaaaaggctgtccgggcaatggcagtgctgacagatcacccatatgcctccctgaccctcccagatgacgcagctgctgactgtctctttcttcgtcctgggttgcctggtgtgccccctttcctcctgcaccgtggaggtggggatctgcccaacagccaggaggcactgcagaagctctctgatgtcaccctggtacctgtgtcctgctcagaactggagaaggctggcgccgggctcagctccctctgcttggtgctcagcacacgcccccacagctgagggcctggccttggggtactgctggccaggggtaggatagtataggaagtagaaggggaaggagggttagatagagaatgctgaataggcagtagttgggagagagcctcaatattgggggaggggagagtgtagggaaaaggatccactgggtgaatcctccctctcagaaccaataaaatagaattgaccttttaga

SEQ ID NO: 126918 - DNA, 882 bp, Homo sapiens
  Payload ID: 4880
  Gene Symbol: DDAH2
  Gene Name: dimethylarginine dimethylaminohydrolase 2
  ENST ID: ENST00000434279
  CDS Start-End: 205-882
ccgacagggacctcacaagcccccaagcaggggcaacaggtgttttggagattagagaccctagccttgttcctcaggctcctcttaaagaatctgacccctgagggtgctgggtagagtgaggtcgacaggagcggaagacaggtgaagaaacaagaaaactaagaaatccgagcggttggagggggagtctgtgtggatgggatggggacgccgggggaggggctgggccgctgctcccatgccctgatccggggagtcccagagagcctggcgtcgggggaaggtgcgggggctggccttcccgctctggatctggccaaagctcaaagggagcacggggtgctgggaggtaaactgaggcaacgactggggctacagctgctagaactgccacctgaggagtcattgccgctgggaccgctgcttggcgacacggccgtgatccaaggggacacggccctaatcacgcggccctggagccccgctcgtaggccagaggtcgatggagtccgcaaagccctgcaagacctggggctccgaattgtggaaataggagacgagaacgcgacgctggatggcactgacgttctcttcaccggccgggagtttttcgtaggcctctccaaatggaccaatcaccgaggagctgagatcgtggcggacacgttccgggacttcgccgtctccactgtgccagtctcgggtccctcccacctgcgcggtctctgcggcatggggggacctcgcactgttgtggcaggcagcagcgacgctgcccaaaaggctgtccgggcaatggcagtgctgacagatcacccatatgcctccctgaccctcccagatgacgcagctgctgactgtctctttcttcgtcctggg

SEQ ID NO: 126919 - DNA, 887 bp, Homo sapiens
  Payload ID: 4880
  Gene Symbol: DDAH2
  Gene Name: dimethylarginine dimethylaminohydrolase 2
  ENST ID: ENST00000439767
  CDS Start-End: 179-887
gtttatactaggtcgtgctaggggcagcgtgaccagccagggcggagagaggatgcttaactccttaggctcgaactcctcccttcctacccacctctctcccttctcgttcggacaggtgaagaaacaagaaaactaagaaatccgagcggttggagggggagtctgtgtggatgggatggggacgccgggggaggggctgggccgctgctcccatgccctgatccggggagtcccagagagcctggcgtcgggggaaggtgcgggggctggccttcccgctctggatctggccaaagctcaaagggagcacggggtgctgggaggtaaactgaggcaacgactggggctacagctgctagaactgccacctgaggagtcattgccgctgggaccgctgcttggcgacacggccgtgatccaaggggacacggccctaatcacgcggccctggagccccgctcgtaggccagaggtcgatggagtccgcaaagccctgcaagacctggggctccgaattgtggaaataggagacgagaacgcgacgctggatggcactgacgttctcttcaccggccgggagtttttcgtaggcctctccaaatggaccaatcaccgaggagctgagatcgtggcggacacgttccgggacttcgccgtctccactgtgccagtctcgggtccctcccacctgcgcggtctctgcggcatggggggacctcgcactgttgtggcaggcagcagcgacgctgcccaaaaggctgtccgggcaatggcagtgctgacagatcacccatatgcctccctgaccctcccagatgacgcagctgctgactgtctctttcttcgtcctgggttgcctggtgtgccccctttcctcctgcacc

SEQ ID NO: 126920 - DNA, 1688 bp, Homo sapiens; identical to SEQ ID NO: 126916
  Payload ID: 4880
  Gene Symbol: DDAH2
  Gene Name: dimethylarginine dimethylaminohydrolase 2
  Uniprot ID: O95865
  ENST ID: ENST00000443533
  CDS Start-End: 632-1489

SEQ ID NO: 126921 - DNA, 724 bp, Homo sapiens
  Payload ID: 4880
  Gene Symbol: DDAH2
  Gene Name: dimethylarginine dimethylaminohydrolase 2
  ENST ID: ENST00000436457
  CDS Start-End: 1-565
tcgtaggccagaggtcgatggagtccgcaaagccctgcaagacctggggctccgaattgtggaaataggagacgagaacgcgacgctggatggcactgacgttctcttcaccggccgggagtttttcgtaggcctctccaaatggaccaatcaccgaggagctgagatcgtggcggacacgttccgggacttcgccgtctccactgtgccagtctcgggtccctcccacctgcgcggtctctgcggcatggggggacctcgcactgttgtggcaggcagcagcgacgctgcccaaaaggctgtccggatgacgcagctgctgactgtctctttcttcgtcctgggttgcctggtgtgccccctttcctcctgcaccgtggaggtggggatctgcccaacagccaggaggcactgcagaagctctctgatgtcaccctggtacctgtgtcctgctcagaactggagaaggctggcgccgggctcagctccctctgcttggtgctcagcacacgcccccacagctgagggcctggccttggggtactgctggccaggggtaggatagtataggaagtagaaggggaaggagggttagatagagaatgctgaataggcagtagttgggagagagcctcaatattgggggaggggagagtgtagggaaaaggatccactgggtgaatcctccctctcagaaccaataaaatagaattgaccttttaga

SEQ ID NO: 126922 - DNA, 1330 bp, Homo sapiens; identical to SEQ ID NO: 126915
  Payload ID: 4880
  Gene Symbol: DDAH2
  Gene Name: dimethylarginine dimethylaminohydrolase 2
  Uniprot ID: O95865
  ENST ID: ENST00000424790
  CDS Start-End: 274-1131

SEQ ID NO: 126923 - DNA, 1688 bp, Homo sapiens
  Payload ID: 4880
  Gene Symbol: DDAH2
  Gene Name: dimethylarginine dimethylaminohydrolase 2
  Uniprot ID: O95865
  ENST ID: ENST00000434464
  CDS Start-End: 632-1489
ataaaatacagaataaaaatcaagtgtttttacgcaatgggggtttaaagtgtgggcgacatggaatgaggggtgggtcagtgatcttgagctcagggcagaagccaggaattaagaagggaaatgtttgtggtggggctgctatgtttcgtgccggtccgccggtccgccgttgcgctgttctgaggtctacgaagcgtttgcagccccgtcgccagggccggccagatctgggtgggcctgggcagcgctcgctgggcggtgccgatttctggcaaggggggcgcagtctggatgtaatgggcgaggcttagcagggcggaatgggcgtggcccgaagaagccccgccccgtcccgcttagacaatgccccggagccgccagaccgtcgcgcccctgccccatcgtagtatatgagctcgcctacacaaggacccccgctaaaagccagagctcccagtccccgaggcttgaagacggggactcccttctccaccaactctgtcctcggggggtggggccccagccgagatcacagcgcgacaggagtgggggtggccgctggagacaggtgaagaaacaagaaaactaagaaatccgagcggttggagggggagtctgtgtggatgggatggggacgccgggggaggggctgggccgctgctcccatgccctgatccggggagtcccagagagcctggcgtcgggggaaggtgcgggggctggccttcccgctctggatctggccaaagctcaaagggagcacggggtgctgggaggtaaactgaggcaacgactggggctacagctgctagaactgccacctgaggagtcattgccgctgggaccgctgcttggcgacacggccgtgatccaaggggacacggccctaatcacgcggccctggagccccgctcgtaggccagaggtcgatggagtccgcaaagccctgcaagacctggggctccgaattgtggaaataggagacgagaacgcgacgctggatggcactgacgttctcttcaccggccgggagtttttcgtaggcctctccaaatggaccaatcaccgaggagctgagatcgtggcggacacgttccgggacttcgccgtctccactgtgccagtctcgggtccctcccacctgcgcggtctctgcggcatggggggacctcgcactgttgtggcaggcagcagcgacgctgcccaaaaggctgtccgggcaatggcagtgctgacagatcacccatatgcctccctgaccctcccagatgacgcagctgctgactgtctctttcttcgtcctgggttgcctggtgtgccccctttcctcctgcaccgtggaggtggggatctgcccaacagccaggaggcactgcagaagctctctgatgtcaccctggtacctgtgtcctgctcagaactggagaaggctggcgccgggctcagctccctctgcttggtgctcagcacacgcccccacagctgagggcctggccttggggtactgctggccaggggtaggatagtataggaagtagaaggggaaggagggttagatagagaatgctgaataggcagtagttgggagagagcctcaatattgggggaggggagagtgtagggaaaaggatccactgggtgaatcctccctctcagaaccaataaaatagaattgaccttttaga

SEQ ID NO: 126924 - DNA, 880 bp, Homo sapiens
  Payload ID: 4880
  Gene Symbol: DDAH2
  Gene Name: dimethylarginine dimethylaminohydrolase 2
  ENST ID: ENST00000444060
  CDS Start-End: 205-880
ccgacagggacctcacaagcccccaagcaggggcaacaggtgttttggagattagagaccctagccttgttcctcaggctcctcttaaagaatctgacccctgagggtgctgggtagagtgaggtcgacaggagcggaagacaggtgaagaaacaagaaaactaagaaatccgagcggttggagggggagtctgtgtggatgggatggggacgccgggggaggggctgggccgctgctcccatgccctgatccggggagtcccagagagcctggcgtcgggggaaggtgcgggggctggccttcccgctctggatctggccaaagctcaaagggagcacggggtgctgggaggtaaactgaggcaacgactggggctacagctgctagaactgccacctgaggagtcattgccgctgggaccgctgcttggcgacacggccgtgatccaaggggacacggccctaatcacgcggccctggagccccgctcgtaggccagaggtcgatggagtccgcaaagccctgcaagacctggggctccgaattgtggaaataggagacgagaacgcgacgctggatggcactgacgttctcttcaccggccgggagtttttcgtaggcctctccaaatggaccaatcaccgaggagctgagatcgtggcggacacgttccgggacttcgccgtctccactgtgccagtctcgggtccctcccacctgcgcggtctctgcggcatggggggacctcgcactgttgtggcaggcagcagcgacgctgcccaaaaggctgtccgggcaatggcagtgctgacagatcacccatatgcctccctgaccctcccagatgacgcagctgctgactgtctctttcttcgtcctg

SEQ ID NO: 126925 - DNA, 887 bp, Homo sapiens; identical to SEQ ID NO: 126919
  Payload ID: 4880
  Gene Symbol: DDAH2
  Gene Name: dimethylarginine dimethylaminohydrolase 2
  ENST ID: ENST00000455919
  CDS Start-End: 179-887

SEQ ID NO: 126926 - DNA, 1688 bp, Homo sapiens; identical to SEQ ID NO: 126913
  Payload ID: 4880
  Gene Symbol: DDAH2
  Gene Name: dimethylarginine dimethylaminohydrolase 2
  Uniprot ID: O95865
  ENST ID: ENST00000427126
  CDS Start-End: 632-1489

SEQ ID NO: 126927 - DNA, 882 bp, Homo sapiens; identical to SEQ ID NO: 126918
  Payload ID: 4880
  Gene Symbol: DDAH2
  Gene Name: dimethylarginine dimethylaminohydrolase 2
  ENST ID: ENST00000436437
  CDS Start-End: 205-882

SEQ ID NO: 126928 - DNA, 887 bp, Homo sapiens
  Payload ID: 4880
  Gene Symbol: DDAH2
  Gene Name: dimethylarginine dimethylaminohydrolase 2
  ENST ID: ENST00000416410
  CDS Start-End: 179-887
gtttatactaggtcgcgctaggggcagcgtgaccagccagggcggagagaggatgcttaactccttaggctcgaactcctcccttcctacccacctctctcccttctcgttcggacaggtgaagaaacaagaaaactaagaaatccgagcggttggagggggagtctgtgtggatgggatggggacgccgggggaggggctgggccgctgctcccatgccctgatccggggagtcccagagagcctggcgtcgggggaaggtgcgggggctggccttcccgctctggatctggccaaagctcaaagggagcacggggtgctgggaggtaaactgaggcaacgactggggctacagctgctagaactgccacctgaggagtcattgccgctgggaccgctgcttggcgacacggccgtgatccaaggggacacggccctaatcacgcggccctggagccccgctcgtaggccagaggtcgatggagtccgcaaagccctgcaagacctggggctccgaattgtggaaataggagacgagaacgcgacgctggatggcactgacgttctcttcaccggccgggagtttttcgtaggcctctccaaatggaccaatcaccgaggagctgagatcgtggcggacacgttccgggacttcgccgtctccactgtgccagtctcgggtccctcccacctgcgcggtctctgcggcatggggggacctcgcactgttgtggcaggcagcagcgacgctgcccaaaaggctgtccgggcaatggcagtgctgacagatcacccatatgcctccctgaccctcccagatgacgcagctgctgactgtctctttcttcgtcctgggttgcctggtgtgccccctttcctcctgcacc

SEQ ID NO: 126929 - DNA, 1688 bp, Homo sapiens
  Payload ID: 4880
  Gene Symbol: DDAH2
  Gene Name: dimethylarginine dimethylaminohydrolase 2
  Uniprot ID: O95865
  ENST ID: ENST00000437889
  CDS Start-End: 632-1489
ataaaatacagaataaaaatcaagtgtttttacgcaatggggatttaaagtgtgggcgacatggaatgaggggtgggtcagtgatcttgagctcagggcagaagccaggaattaagaagggaaatgtttgtggtggggctgctatgtttcgtgccggtccgccggtccgccgttgcgctgttctgaggtctacgaagcgtttgcagccccgtcgccagggccggccagatctgggtgggcctgggcagcgctcgctgggcggtgccgatttctggcaaggggggcgcagtctggatgtaatgggcgaggcttagcagggcggaatgggcgtggcccgaagaagccccgccccgtcccgcttagacaatgccccggagccgccagaccgtcgcgcccctgccccatcgtagtatatgagctcgcctacacaaggacccccgctaaaagccagagctcccagtccccgaggcttgaagacggggactcccttctccaccaactctgtcctcggggggtggggccccagccgagatcacagcgcgacaggagtgggggtggccgctggagacaggtgaagaaacaagaaaactaagaaatccgagcggttggagggggagtctgtgtggatgggatggggacgccgggggaggggctgggccgctgctcccatgccctgatccggggagtcccagagagcctggcgtcgggggaaggtgcgggggctggccttcccgctctggatctggccaaagctcaaagggagcacggggtgctgggaggtaaactgaggcaacgactggggctacagctgctagaactgccacctgaggagtcattgccgctgggaccgctgcttggcgacacggccgtgatccaaggggacacggccctaatcacgcggccctggagccccgctcgtaggccagaggtcgatggagtccgcaaagccctgcaagacctggggctccgaattgtggaaataggagacgagaacgcgacgctggatggcactgacgttctcttcaccggccgggagtttttcgtaggcctctccaaatggaccaatcaccgaggagctgagatcgtggcggacacgttccgggacttcgccgtctccactgtgccagtctcgggtccctcccacctgcgcggtctctgcggcatggggggacctcgcactgttgtggcaggcagcagcgacgctgcccaaaaggctgtccgggcaatggcagtgctgacagatcacccatatgcctccctgaccctcccagatgacgcagctgctgactgtctctttcttcgtcctgggttgcctggtgtgccccctttcctcctgcaccgtggaggtggggatctgcccaacagccaggaggcactgcagaagctctctgatgtcaccctggtacctgtgtcctgctcagaactggagaaggctggcgccgggctcagctccctctgcttggtgctcagcacacgcccccacagctgagggcctggccttggggtactgctggccaggggtaggatagtataggaagtagaaggggaaggagggttagatagagaatgctgaataggcagtagttgggagagagcctcaatattgggggaggggagagtgtagggaaaaggatccactgggtgaatcctccctctcagaaccaataaaatagaattgaccttttaga

SEQ ID NO: 126930 - DNA, 1688 bp, Homo sapiens; identical to SEQ ID NO: 126923
  Payload ID: 4880
  Gene Symbol: DDAH2
  Gene Name: dimethylarginine dimethylaminohydrolase 2
  Uniprot ID: O95865
  ENST ID: ENST00000454138
  CDS Start-End: 632-1489

SEQ ID NO: 126931 - DNA, 1330 bp, Homo sapiens; identical to SEQ ID NO: 126915
  Payload ID: 4880
  Gene Symbol: DDAH2
  Gene Name: dimethylarginine dimethylaminohydrolase 2
  Uniprot ID: O95865
  ENST ID: ENST00000413532
  CDS Start-End: 274-1131

SEQ ID NO: 126932 - DNA, 724 bp, Homo sapiens; identical to SEQ ID NO: 126921
  Payload ID: 4880
  Gene Symbol: DDAH2
  Gene Name: dimethylarginine dimethylaminohydrolase 2
  ENST ID: ENST00000444893
  CDS Start-End: 1-565

SEQ ID NO: 126933 - DNA, 1688 bp, Homo sapiens; identical to SEQ ID NO: 126913
  Payload ID: 4880
  Gene Symbol: DDAH2
  Gene Name: dimethylarginine dimethylaminohydrolase 2
  Uniprot ID: O95865
  ENST ID: ENST00000451411
  CDS Start-End: 632-1489

SEQ ID NO: 126934 - DNA, 1688 bp, Homo sapiens; identical to SEQ ID NO: 126913
  Payload ID: 4880
  Gene Symbol: DDAH2
  Gene Name: dimethylarginine dimethylaminohydrolase 2
  Uniprot ID: O95865
  ENST ID: ENST00000414455
  CDS Start-End: 632-1489

SEQ ID NO: 126935 - DNA, 1330 bp, Homo sapiens; identical to SEQ ID NO: 126915
  Payload ID: 4880
  Gene Symbol: DDAH2
  Gene Name: dimethylarginine dimethylaminohydrolase 2
  Uniprot ID: O95865
  ENST ID: ENST00000444699
  CDS Start-End: 274-1131

SEQ ID NO: 126936 - DNA, 887 bp, Homo sapiens; identical to SEQ ID NO: 126928
  Payload ID: 4880
  Gene Symbol: DDAH2
  Gene Name: dimethylarginine dimethylaminohydrolase 2
  ENST ID: ENST00000417916
  CDS Start-End: 179-887

SEQ ID NO: 126937 - DNA, 1688 bp, Homo sapiens; identical to SEQ ID NO: 126923
  Payload ID: 4880
  Gene Symbol: DDAH2
  Gene Name: dimethylarginine dimethylaminohydrolase 2
  Uniprot ID: O95865
  ENST ID: ENST00000447101
  CDS Start-End: 632-1489

SEQ ID NO: 126938 - DNA, 724 bp, Homo sapiens; identical to SEQ ID NO: 126921
  Payload ID: 4880
  Gene Symbol: DDAH2
  Gene Name: dimethylarginine dimethylaminohydrolase 2
  ENST ID: ENST00000450563
  CDS Start-End: 1-565

SEQ ID NO: 126939 - DNA, 1330 bp, Homo sapiens; identical to SEQ ID NO: 126915
  Payload ID: 4880
  Gene Symbol: DDAH2
  Gene Name: dimethylarginine dimethylaminohydrolase 2
  Uniprot ID: O95865
  ENST ID: ENST00000430482
  CDS Start-End: 274-1131

SEQ ID NO: 126940 - DNA, 887 bp, Homo sapiens; identical to SEQ ID NO: 126928
  Payload ID: 4880
  Gene Symbol: DDAH2
  Gene Name: dimethylarginine dimethylaminohydrolase 2
  ENST ID: ENST00000457271
  CDS Start-End: 179-887

SEQ ID NO: 126941 - DNA, 724 bp, Homo sapiens; identical to SEQ ID NO: 126921
  Payload ID: 4880
  Gene Symbol: DDAH2
  Gene Name: dimethylarginine dimethylaminohydrolase 2
  ENST ID: ENST00000413343
  CDS Start-End: 1-565

SEQ ID NO: 126942 - DNA, 1688 bp, Homo sapiens; identical to SEQ ID NO: 126917
  Payload ID: 4880
  Gene Symbol: DDAH2
  Gene Name: dimethylarginine dimethylaminohydrolase 2
  Uniprot ID: O95865
  ENST ID: ENST00000411456
  CDS Start-End: 632-1489

SEQ ID NO: 126943 - DNA, 882 bp, Homo sapiens; identical to SEQ ID NO: 126918
  Payload ID: 4880
  Gene Symbol: DDAH2
  Gene Name: dimethylarginine dimethylaminohydrolase 2
  ENST ID: ENST00000427351
  CDS Start-End: 205-882

SEQ ID NO: 126944 - DNA, 882 bp, Homo sapiens; identical to SEQ ID NO: 126918
  Payload ID: 4880
  Gene Symbol: DDAH2
  Gene Name: dimethylarginine dimethylaminohydrolase 2
  ENST ID: ENST00000434107
  CDS Start-End: 205-882

SEQ ID NO: 126945 - DNA, 887 bp, Homo sapiens; identical to SEQ ID NO: 126928
  Payload ID: 4880
  Gene Symbol: DDAH2
  Gene Name: dimethylarginine dimethylaminohydrolase 2
  ENST ID: ENST00000441011
  CDS Start-End: 179-887

SEQ ID NO: 126946 - DNA, 1330 bp, Homo sapiens; identical to SEQ ID NO: 126915
  Payload ID: 4880
  Gene Symbol: DDAH2
  Gene Name: dimethylarginine dimethylaminohydrolase 2
  Uniprot ID: O95865
  ENST ID: ENST00000426149
  CDS Start-End: 274-1131

SEQ ID NO: 126947 - DNA, 1688 bp, Homo sapiens; identical to SEQ ID NO: 126913
  Payload ID: 4880
  Gene Symbol: DDAH2
  Gene Name: dimethylarginine dimethylaminohydrolase 2
  Uniprot ID: O95865
  ENST ID: ENST00000413655
  CDS Start-End: 632-1489

SEQ ID NO: 126948 - DNA, 724 bp, Homo sapiens; identical to SEQ ID NO: 126921
  Payload ID: 4880
  Gene Symbol: DDAH2
  Gene Name: dimethylarginine dimethylaminohydrolase 2
  ENST ID: ENST00000437288
  CDS Start-End: 1-565

SEQ ID NO: 126949 - DNA, 724 bp, Homo sapiens; identical to SEQ ID NO: 126921
  Payload ID: 4880
  Gene Symbol: DDAH2
  Gene Name: dimethylarginine dimethylaminohydrolase 2
  ENST ID: ENST00000446426
  CDS Start-End: 1-565

SEQ ID NO: 126950 - DNA, 882 bp, Homo sapiens; identical to SEQ ID NO: 126918
  Payload ID: 4880
  Gene Symbol: DDAH2
  Gene Name: dimethylarginine dimethylaminohydrolase 2
  ENST ID: ENST00000437358
  CDS Start-End: 205-882

SEQ ID NO: 126951 - DNA, 887 bp, Homo sapiens; identical to SEQ ID NO: 126928
  Payload ID: 4880
  Gene Symbol: DDAH2
  Gene Name: dimethylarginine dimethylaminohydrolase 2
  ENST ID: ENST00000449216
  CDS Start-End: 179-887

SEQ ID NO: 126952 - DNA, 882 bp, Homo sapiens; identical to SEQ ID NO: 126918
  Payload ID: 4880
  Gene Symbol: DDAH2
  Gene Name: dimethylarginine dimethylaminohydrolase 2
  ENST ID: ENST00000417274
  CDS Start-End: 205-882

SEQ ID NO: 126953 - DNA, 724 bp, Homo sapiens; identical to SEQ ID NO: 126921
  Payload ID: 4880
  Gene Symbol: DDAH2
  Gene Name: dimethylarginine dimethylaminohydrolase 2
  ENST ID: ENST00000413287
  CDS Start-End: 1-565

SEQ ID NO: 126954 - DNA, 3106 bp, Homo sapiens
  Payload ID: 4881
  Gene Symbol: DMGDH
  Gene Name: dimethylglycine dehydrogenase
  Uniprot ID: Q9UI17
  ENST ID: ENST00000255189
  CDS Start-End: 30-2630
gcgcctgcgccctcggcctcggcctagtcatgctccgtcccggcgcgcagctgctgcggggcctcctgctgcggagctgcccgctgcagggctcccccgggcgcccgcgctctgtctgcggccgggaaggagaggaaaaaccacccttatctgcagaaacacaatggaaagacagagcagaaacagtgataattggaggtggctgtgttggtgtgagtctggcttatcacctggccaaagcagggatgaaagatgtggtcctgctggagaaatcagagctcacggctggatctacctggcacgcagcaggtttaacaacttactttcatcctggaataaacttgaagaaaatacattatgatagcatcaaactttatgagaaactggaagaagaaactggtcaggtggtgggattccatcagccaggtagtatcagacttgctaccacccctgtaagggtagatgaatttaaatatcaaatgactcggactggctggcatgcaacagaacagtatctcattgaacctgaaaaaattcaagagatgttccctttactcaacatgaataaggttttagctggattgtataatcctggagatggtcacattgatccttattctctaactatggcactggctgctggggctaggaaatgtggtgcccttttaaaatatcctgcaccagtaacttctctgaaagccaggtcagatggaacatgggacgttgaaacaccacaggggtctatgagagcaaatagaattgtgaatgctgcaggattttgggctcgtgaagtaggtaaaatgattggactagaacatcctctcattccggttcaacatcaatatgttgttacatcgactatatctgaagtgaaagctttgaaacgagaactgcctgtgctccgtgacctggaaggatcatattatctccgacaggaaagggatgggcttttgtttggtccatatgaaagtcaagagaaaatgaaagttcaggactcctgggtcaccaatggagttcctccaggttttggaaaggaactctttgagtctgatctagatcgaatcatggaacacatcaaagctgccatggaaatggttcctgtcttgaaaaaggctgacatcatcaatgttgtcaatggtcctatcacgtattctcctgacattctgcctatggtggggccccatcagggggtcagaaactactgggtggctataggctttggatatggcataatccacgctggtggggtagggaaatatctcagtgactggatcctgcatggagaacctccttttgatctgatagaattggatcctaatcgctatggcaaatggacaacaacccagtacactgaggccaaagcaagagaatcatatggattcaacaatattgttggttatcctaaagaagaacggtttgctgggaggccgactcaacgagtcagtgggctctatcaaaggctggagtctaagtgttccatggggttccatgctggctgggagcagccgcactggttctacaaaccaggccaggacactcagtacaggccaagttttcgccgcacaaactggtttgagcctgtgggctcggagtataaacaggttatgcaaagagtagcggtaactgacctatcaccatttggcaagtttaacatcaaaggccaagattccattagactactggaccatctctttgcaaatgtcattccaaaggtgggttttacaaatataagtcacatgttaacacccaagggtcgagtgtatgctgagctgactgtttctcaccaatctcctggggagtttcttttaattactggctctggatcagaacttcatgatcttagatggattgaagaagaagcagtcaaaggtggatatgatgttgaaattaaaaacataactgatgagcttggagttcttggagttgctgggccacaggcaagaaaggtccttcagaaactgacctctgaagatcttagtgatgatgttttcaagtttcttcaaaccaagtccttaaaggtttccaacattcctgtcactgctattaggatatcttatactggtgagctgggttgggagctgtatcacagaagagaagattctgtggcgctgtatgacgctatcatgaatgcaggccaggaggagggaatcgacaattttggaacctatgccatgaatgccttacgcctggagaaagccttcagagcctgggggttagagatgaactgtgatacaaatcctttggaagctggactggaatattttgtgaagttaaataagccagcagacttcataggaaagcaagcactgaaacagattaaagccaaggggctgaaacgaagactggtctgcctcaccttggcaacggatgatgttgatccagagggaaatgaaagcatctggtacaatggcaaggtggttggcaacacgacatctggaagctatagctacagcatccagaagagtctggctttcgcatatgtccctgtacaactaagtgaagtgggacagcaagtggaagttgaactattaggcaaaaattacccagcagtcatcatacaagaacctttggtattgaccgaaccaaccagaaaccggcttcagaaaaaaggtggaaaggacaaaacttgaaaaaagaccttcagcagtcaactgaattagagttgctaatgactgtccttgaaattattataactggctcccaggggaatagaggaaaccaggaattcatttcaaaatcatcaaagtctaaatttagaatcttaatgaaacctttctgttaagtgttttctaagcaagacagaataatagataaatgatttacattgttcttttaaatgaagaaatttgaaatgaatgtttttttatttaccccacattacccaatcagtaaaacatttaggtgtttgctaatatacacaatcattactataacctaattaagggacattttataattttagtaacaaatgcattcggttcttgacagctgaaaacaaattaataaattatcttttacataaaaacatgtacaatattgtttatggatttacttctttgagaaatctttccttagatgaataaatgaaagttttaatttttcatga

SEQ ID NO: 126955 - DNA, 1966 bp, Homo sapiens
  Payload ID: 4881
  Gene Symbol: DMGDH
  Gene Name: dimethylglycine dehydrogenase
  ENST ID: ENST00000518477
  CDS Start-End: 10-306
ggcctagtcatgctccgtcccggcgcgcagctgctgcggggcctcctgctgcggagctgcccgctgcagggctcccccgggcgcccgcgctctgtctgcggccgggaaggagaggaaaaaccacccttatctgcagaaacacaatggaaagacagagcagaaacagtgataattggaggtggctgtgttggtgtgagtctggcttatcacctggccaaagcagggatgaaagatgtggtcctgctggagaaatcagagctcacggctggatctacctggcacgcagattttgggctcgtgaagtaggtaaaatgattggactagaacatcctctcattccggttcaacatcaatatgttgttacatcgactatatctgaagtgaaagctttgaaacgagaactgcctgtgctccgtgacctggaaggatcatattatctccgacaggaaagggatgggcttttgtttggtccatatgaaagtcaagagaaaatgaaagttcaggactcctgggtcaccaatggagttcctccaggttttggaaaggaactctttgagtctgatctagatcgaatcatggaacacatcaaagctgccatggaaatggttcctgtcttgaaaaaggctgacatcatcaatgttgtcaatggtcctatcacgtattctcctgacattctgcctatggtggggccccatcagggggtcagaaactactgggtggctataggctttggatatggcataatccacgctggtggggtagggaaatatctcagtgactggatcctgcatggagaacctccttttgatctgatagaattggatcctaatcgctatggcaaatggacaacaacccagtacactgaggccaaagcaagagaatcatatggattcaacaatattgttggttatcctaaagaagaacggtttgctgggaggccgactcaacgagtcagtgggctctatcaaaggctggagtctaagtgttccatggggttccatgctggctgggagcagccgcactggttctacaaaccaggccaggacactcagtacaggccaagttttcgccgcacaaactggtttgagcctgtgggctcggagtataaacaggttatgcaaagagtagcggtaactgacctatcaccatttggcaagtttaacatcaaaggccaagattccattagactactggaccatctctttgcaaatgtcattccaaaggtgggttttacaaatataagtcacatgttaacacccaagggtcgagtgtatgctgagctgactgtttctcaccaatctcctggggagtttcttttaattactggctctggatcagaacttcatgatcttagatggattgaagaagaagcagtcaaaggtggatatgatgttgaaattaaaaacataactgatgagcttggagttcttggagttgctgggccacaggcaagaaaggtccttcagaaactgacctctgaagatcttagtgatgatgttttcaagtttcttcaaaccaagtccttaaaggtttccaacattcctgtcactgctattaggatatcttatactggtgagctgggttgggagctgtatcacagaagagaagattctgtggcgctgtatgacgctatcatgaatgcaggccaggaggagggaatcgacaattttggaacctatgccatgaatgccttacgcctggagaaagccttcagagcctgggggttagagatgaactgtgatacaaatcctttggaagctggactggaatattttgtgaagttaaataaggatcagaatagctgctttgcccattttaaggaggaaaatggctgggtgagcagatgggccatcaggccttattagggtgaatcgtgttcttgtcaaaacctgtcagcaagtagggaaaagaacaatggagtactgaagaactctttcatcacaaagggagacggcgcagtggccct

SEQ ID NO: 126956 - DNA, 572 bp, Homo sapiens
  Payload ID: 4881
  Gene Symbol: DMGDH
  Gene Name: dimethylglycine dehydrogenase
  ENST ID: ENST00000524206
  CDS Start-End: 7-159
ctagtcatgctccgtcccggcgcgcagctgctgcggggcctcctgctgcggagctgcccgctgcagggctcccccgggcgcccgcgctctgtctgcggccgggaagggtttaacaacttactttcatcctggaataaacttgaagaaaatacattatgatagcatcaaactttatgagaaactggaagaagaaactggtcaggtggtgggattccatcagccaggtagtatcagacttgctaccacccctgtaagggtagatgaatttaaatatcaaatgactcggactggctggcatgcaacagaacagtatctcattgaacctgaaaaaattcaagagatgttccctttactcaacatgaataaggttttagctggattgtataatcctggagatggtcacattgatccttattctctaactatggcactggctgctggggctaggaaatgtggtgcccttttaaaatatcctgcaccagtaacttctctgaaagccaggtcagatggaacatgggacgttgaaacaccacaggggtctatgagagcaaatagaattgtgaatgctgcag

SEQ ID NO: 126957 - DNA, 1517 bp, Homo sapiens
  Payload ID: 4881
  Gene Symbol: DMGDH
  Gene Name: dimethylglycine dehydrogenase
  ENST ID: ENST00000517853
  CDS Start-End: 10-330
ggcctagtcatgctccgtcccggcgcgcagctgctgcggggcctcctgctgcggagctgcccgctgcagggctcccccgggcgcccgcgctctgtctgcggccgggaaggagaggaaaaaccacccttatctgcagaaacacaatggaaagacagagcagaaacagtgataattggaggtggctgtgttggtgtgagtctggcttatcacctggccaaagcagggatgaaagatgtggtcctgctggagaaatcagagctcacggctggatctacctggcacgcaatatggcataatccacgctggtggggtagggaaatatctcagtgactggatcctgcatggagaacctccttttgatctgatagaattggatcctaatcgctatggcaaatggacaacaacccagtacactgaggccaaagcaagagaatcatatggattcaacaatattgttggttatcctaaagaagaacggtttgctgggaggccgactcaacgagtcagtgggctctatcaaaggctggagtctaagtgttccatggggttccatgctggctgggagcagccgcactggttctacaaaccaggccaggacactcagtacaggccaagttttcgccgcacaaactggtttgagcctgtgggctcggagtataaacaggttatgcaaagagtagcggtaactgacctatcaccatttggcaagtttaacatcaaaggccaagattccattagactactggaccatctctttgcaaatgtcattccaaaggtgggttttacaaatataagtcacatgttaacacccaagggtcgagtgtatgctgagctgactgtttctcaccaatctcctggggagtttcttttaattactggctctggatcagaacttcatgatcttagatggattgaagaagaagcagtcaaaggtggatatgatgttgaaattaaaaacataactgatgagcttggagttcttggagttgctgggccacaggcaagaaaggtccttcagaaactgacctctgaagatcttagtgatgatgttttcaagtttcttcaaaccaagtccttaaaggtttccaacattcctgtcactgctattaggatatcttatactggtgagctgggttgggagctgtatcacagaagagaagattctgtggcgctgtatgacgctatcatgaatgcaggccaggaggagggaatcgacaattttggaacctatgccatgaatgccttacgcctggagaaagccttcagagcctgggggttagagatgaactgtgatacaaatcctttggaagctggactggaatattttgtgaagttaaataaggatcagaatagctgctttgcccattttaaggaggaaaatggctgggtgagcagatgggccatcaggccttattagggtgaatcgtgttcttgtcaaaacctgtcagcaagtagggaaaagaacaatggagtactgaagaactctttcatcacaaagggagacggcgcagtggccc

SEQ ID NO: 126958 - DNA, 554 bp, Homo sapiens
  Payload ID: 4881
  Gene Symbol: DMGDH
  Gene Name: dimethylglycine dehydrogenase
  ENST ID: ENST00000521052
  CDS Start-End: 55-207
aggctgcccgctggcctcggagcaggcgcctgcgccctcggcctcggcctagtcatgctccgtcccggcgcgcagctgctgcggggcctcctgctgcggagctgcccgctgcagggctcccccgggcgcccgcgctctgtctgcggccgggaagggtttaacaacttactttcatcctggaataaacttgaagaaaatacattatgatagcatcaaactttatgagaaactggaagaagaaactggtcaggattttgggctcgtgaagtaggtaaaatgattggactagaacatcctctcattccggttcaacatcaatatgttgttacatcgactatatctgaagtgaaagctttgaaacgagaactgcctgtgctccgtgacctggaaggatcatattatctccgacaggaaagggatgggcttttgtttggtccatatgaaagtcaagagaaaatgaaagttcaggactcctgggtcaccaatggagttcctccaggttttggaaaggaactctttgagtctgatctagatcgaatcatggaacacatcaa

SEQ ID NO: 126959 - DNA, 2777 bp, Homo sapiens
  Payload ID: 4881
  Gene Symbol: DMGDH
  Gene Name: dimethylglycine dehydrogenase
  ENST ID: ENST00000523732
  CDS Start-End: 1-1842
tatctcattgaacctgaaaaaattcaagagatgttccctttactcaacatgaataaggttttagctggattgtataatcctggagatggtcacattgatccttattctctaactatggcactggctgctggggctaggaaatgtggtgcccttttaaaatatcctgcaccagtaacttctctgaaagccaggtcagatggaacatgggacgttgaaacaccacaggggtctatgagagcaaatagaattgtgaatgctgcaggattttgggctcgtgaagtaggtaaaatgattggactagaacatcctctcattccggttcaacatcaatatgttgttacatcgactatatctgaagtgaaagctttgaaacgagaactgcctgtgctccgtgacctggaaggatcatattatctccgacaggaaagggatgggcttttgtttggtccatatgaaagtcaagagaaaatgaaagttcaggactcctgggtcaccaatggagttcctccaggttttggaaaggaactctttgagtctgatctagatcgaatcatggaacacatcaaagctgccatggaaatggttcctgtcttgaaaaaggctgacatcatcaatgttgtcaatggtcctatcacgtattctcctgacattctgcctatggtggggccccatcagggggtcagaaactactgggtggctataggctttggatatggcataatccacgctggtggggtagggaaatatctcagtgactggatcctgcatggagaacctccttttgatctgatagaattggatcctaatcgctatggcaaatggacaacaacccagtacactgaggccaaagcaagagaatcatatggattcaacaatattgttggttatcctaaagaagaacggtttgctgggaggccgactcaacgagtcagtgggctctatcaaaggctggagtctaagtgttccatggggttccatgctggctgggagcagccgcactggttctacaaaccaggccaggacactcagtacaggccaagttttcgccgcacaaactggtttgagcctgtgggctcggagtataaacaggttatgcaaagagtagcggtaactgacctatcaccatttggcaagtttaacatcaaaggccaagattccattagactactggaccatctctttgcaaatgtcattccaaaggtgggttttacaaatataagtcacatgttaacacccaagggtcgagtgtatgctgagctgactgtttctcaccaatctcctggggagtttcttttaattactggctctggatcagaacttcatgatcttagatggattgaagaagaagcagtcaaaggtggatatgatgttgaaattaaaaacataactgatgagcttggagttcttggagttgctgggccacaggcaagaaaggtccttcagaaactgacctctgaagatcttagtgatgatgttttcaagtttcttcaaaccaagtccttaaaggtttccaacattcctgtcactgctattaggatatcttatactggtgagctgggttgggagctgtatcacagaagagaagattctgtggcgctgtatgacgctatcatgaatgcaggccaggaggagggaatcgacaattttggaacctatgccatgaatgccttacgcctggagaaagccttcagagcctgggggttagagatgaactgtgatacaaatcctttggaagctggactggaatattttgtgaagttaaataaggatcagaatagctgctttgcccattttaaggaggaaaatggctgggtgagcagatgggccatcaggccttattagggtgaatcgtgttcttgtcaaaacctgtcagcaagtagggaaaagaacaatggagtactgaagaactctttcatcacaaagggagacggcgcagtggcccttgcttccttccgtcttggagttgttccagcctccttcccctgctgttggcttatgtgaagttgatacacatgtatcattcattcatccgttcatctagtagacatttattaagtaccgctgattagacaccttgctaacccatagatctaaatgttaaagatatactcctgatggctctcagatctcatgaacctggaaacaaataatatttcaggaactaaagctgtagggatacgttcttagccgtaattgtgaagataacccttccgcaagtggagggctctccagccgcatacaacactgccatcttgtgggaagtgctccgtagagccacttcaggaagccttgaccaaagctgcggtaaaaataattgaatctgtacttttaaaatcttcttaactaaaaacgcttcacctgaaacgactcatatcattgttctcaatggtatttttggtatgttccaaaggaagtaacttttgggaggaaaatcagtagcctttgtttagttggagatggaagaaatgcattaatcaagagcaaaaggaaaatcagctgcctttggatggagtcataggcattcctggaattttcatggtggaaatattgaatttttgtccatttctggagaacctccacgaagattcacagagactcaagtattaaacgtaatgtgttgaagcacatcagaagaatttgttttctataatatgtttctccctctttttctcactctctccttctccctctctttccctttttctctctccttcccctctctccccgtgtagagcttctaactagtagaaacagaataaaatgtaatctctattaaa

SEQ ID NO: 126960 - DNA, 1592 bp, Homo sapiens
  Payload ID: 4882
  Gene Symbol: DPEP1
  Gene Name: dipeptidase 1 (renal)
  Uniprot ID: P16444
  ENST ID: ENST00000261615
  CDS Start-End: 123-1358
gtgcctctcctggcaggcagagtggctcctcacagcctgaagctcatccttctgcacgggccagccaggccagcacagaggcaccagggcagcagtgcacacaggtccccggggaccccaccatgtggagcggatggtggctgtggccccttgtggccgtctgcactgcagacttctttcgggacgaggcagagaggatcatgagggactcccctgtcattgatgggcacaatgacctcccctggcagctgctggatatgttcaacaaccggctgcaggacgagagggccaacctgaccaccttggccggcacacacaccaacatccccaagctgagggccggctttgtgggaggccagttctggtccgtgtacacgccctgcgacacccagaacaaagacgccgtgcggaggacgctggagcagatggacgtggtccaccgcatgtgccggatgtacccggagaccttcctgtatgtcaccagcagtgcaggcattcggcaggccttccgggaagggaaggtggccagcctgatcggcgtggagggcggccactccattgacagcagtttgggcgtcctgcgggcactctatcagctgggcatgcggtacctgaccctcacccacagctgcaacacgccctgggctgacaactggctggtggacacgggagacagcgagccccagagccaaggcttgtcaccctttgggcagcgtgtggtgaaggagctgaaccgtctgggggtcctcatcgacttggctcacgtgtctgtggccaccatgaaggccaccctgcagctgtccagagccccggtcatcttcagccactcctcggcctacagcgtgtgcgcaagccggcgcaacgtgcctgacgacgtcctgaggctggtgaaacagacagacagcctggtgatggtgaacttctacaacaattacatttcctgcaccaacaaggccaacctgtcccaagtggccgaccatctggatcacatcaaggaggtggcaggagccagagccgtgggttttggtggggactttgatggtgttccaagggtccctgaggggctggaggacgtctccaagtatccagacctgatcgctgagctgctcaggaggaactggacggaggcggaggtcaagggcgcactggctgacaacctgctgagggtcttcgaggctgtggaacaggccagcaacctcacacaggctcccgaggaggagcccatcccgctggaccagctgggtggctcctgcaggacccattacggctactcctctggggcttccagcctccatcgccactgggggctcctgctggcctccctcgctcccctggtcctctgtctgtctctcctgtgaaacctgggagaccagagtcccctttagggttcccggagctccgggaagacccgcccatcccaggactccagatgccaggagccctgctgcccacatgcaaggaccagcatctcctgagaggacgcctgggcttacctggggggcaggatgcctggggacagttcaggacacacacacagtaggcccgcaataaaagcaacaccccttcacatcctggggtacgtgtcatcggca

SEQ ID NO: 126961 - DNA, 1734 bp, Homo sapiens
  Payload ID: 4882
  Gene Symbol: DPEP1
  Gene Name: dipeptidase 1 (renal)
  Uniprot ID: P16444
  ENST ID: ENST00000393092
  CDS Start-End: 292-1527
ggggtactgtgcgagccctcaaggaggtggctgttctgtagctggagagctccgtgggtggcaggactgaacttgaacaccagaaacaacccccaagccttgtgacctgggaggcaggaggcgggtctgtctccctgggacttgggtggctgagccgaggtactcgggaccctgtcccgcgcatggcagagtggctcctcacagcctgaagctcatccttctgcacgggccagccaggccagcacagaggcaccagggcagcagtgcacacaggtccccggggaccccaccatgtggagcggatggtggctgtggccccttgtggccgtctgcactgcagacttctttcgggacgaggcagagaggatcatgagggactcccctgtcattgatgggcacaatgacctcccctggcagctgctggatatgttcaacaaccggctgcaggacgagagggccaacctgaccaccttggccggcacacacaccaacatccccaagctgagggccggctttgtgggaggccagttctggtccgtgtacacgccctgcgacacccagaacaaagacgccgtgcggaggacgctggagcagatggacgtggtccaccgcatgtgccggatgtacccggagaccttcctgtatgtcaccagcagtgcaggcattcggcaggccttccgggaagggaaggtggccagcctgatcggcgtggagggcggccactccattgacagcagtttgggcgtcctgcgggcactctatcagctgggcatgcggtacctgaccctcacccacagctgcaacacgccctgggctgacaactggctggtggacacgggagacagcgagccccagagccaaggcttgtcaccctttgggcagcgtgtggtgaaggagctgaaccgtctgggggtcctcatcgacttggctcacgtgtctgtggccaccatgaaggccaccctgcagctgtccagagccccggtcatcttcagccactcctcggcctacagcgtgtgcgcaagccggcgcaacgtgcctgacgacgtcctgaggctggtgaaacagacagacagcctggtgatggtgaacttctacaacaattacatttcctgcaccaacaaggccaacctgtcccaagtggccgaccatctggatcacatcaaggaggtggcaggagccagagccgtgggttttggtggggactttgatggtgttccaagggtccctgaggggctggaggacgtctccaagtatccagacctgatcgctgagctgctcaggaggaactggacggaggcggaggtcaagggcgcactggctgacaacctgctgagggtcttcgaggctgtggaacaggccagcaacctcacacaggctcccgaggaggagcccatcccgctggaccagctgggtggctcctgcaggacccattacggctactcctctggggcttccagcctccatcgccactgggggctcctgctggcctccctcgctcccctggtcctctgtctgtctctcctgtgaaacctgggagaccagagtcccctttagggttcccggagctccgggaagacccgcccatcccaggactccagatgccaggagccctgctgcccacatgcaaggaccagcatctcctgagaggacgcctgggcttacctggggggcaggatgcctggggacagttcaggacacacacacagtaggcccgcaataaaagcaacacccctt

SEQ ID NO: 126962 - DNA, 1647 bp, Homo sapiens
  Payload ID: 4882
  Gene Symbol: DPEP1
  Gene Name: dipeptidase 1 (renal)
  Uniprot ID: P16444
  ENST ID: ENST00000421184
  CDS Start-End: 204-1439
ggcacatccacacatgagggaaaaacactgccaggacatctcagggcactctcaggaaatgaggaagctgctggagaagtttctagccttgggggaggcagagtggctcctcacagcctgaagctcatccttctgcacgggccagccaggccagcacagaggcaccagggcagcagtgcacacaggtccccggggaccccaccatgtggagcggatggtggctgtggccccttgtggccgtctgcactgcagacttctttcgggacgaggcagagaggatcatgagggactcccctgtcattgatgggcacaatgacctcccctggcagctgctggatatgttcaacaaccggctgcaggacgagagggccaacctgaccaccttggccggcacacacaccaacatccccaagctgagggccggctttgtgggaggccagttctggtccgtgtacacgccctgcgacacccagaacaaagacgccgtgcggaggacgctggagcagatggacgtggtccaccgcatgtgccggatgtacccggagaccttcctgtatgtcaccagcagtgcaggcattcggcaggccttccgggaagggaaggtggccagcctgatcggcgtggagggcggccactccattgacagcagtttgggcgtcctgcgggcactctatcagctgggcatgcggtacctgaccctcacccacagctgcaacacgccctgggctgacaactggctggtggacacgggagacagcgagccccagagccaaggcttgtcaccctttgggcagcgtgtggtgaaggagctgaaccgtctgggggtcctcatcgacttggctcacgtgtctgtggccaccatgaaggccaccctgcagctgtccagagccccggtcatcttcagccactcctcggcctacagcgtgtgcgcaagccggcgcaacgtgcctgacgacgtcctgaggctggtgaaacagacagacagcctggtgatggtgaacttctacaacaattacatttcctgcaccaacaaggccaacctgtcccaagtggccgaccatctggatcacatcaaggaggtggcaggagccagagccgtgggttttggtggggactttgatggtgttccaagggtccctgaggggctggaggacgtctccaagtatccagacctgatcgctgagctgctcaggaggaactggacggaggcggaggtcaagggcgcactggctgacaacctgctgagggtcttcgaggctgtggaacaggccagcaacctcacacaggctcccgaggaggagcccatcccgctggaccagctgggtggctcctgcaggacccattacggctactcctctggggcttccagcctccatcgccactgggggctcctgctggcctccctcgctcccctggtcctctgtctgtctctcctgtgaaacctgggagaccagagtcccctttagggttcccggagctccgggaagacccgcccatcccaggactccagatgccaggagccctgctgcccacatgcaaggaccagcatctcctgagaggacgcctgggcttacctggggggcaggatgcctggggacagttcaggacacacacacagtaggcccgcaataaaagcaacaccccttc

SEQ ID NO: 126963 - DNA, 482 bp, Homo sapiens
  Payload ID: 4882
  Gene Symbol: DPEP1
  Gene Name: dipeptidase 1 (renal)
  ENST ID: ENST00000568281
  CDS Start-End: 149-482
aggaagcggccgggaagcaggcagagagcggccaggaagcgggcagagtggctcctcacagcctgaagctcatccttctgcacgggccagccaggccagcacagaggcaccagggcagcagtgcacacaggtccccggggaccccaccatgtggagcggatggtggctgtggccccttgtggccgtctgcactgcagacttctttcgggacgaggcagagaggatcatgagggactcccctgtcattgatgggcacaatgacctcccctggcagctgctggatatgttcaacaaccggctgcaggacgagagggccaacctgaccaccttggccggcacacacaccaacatccccaagctgagggccggctttgtgggaggccagttctggtccgtgtacacgccctgcgacacccagaacaaagacgccgtgcggaggacgctggagcagatggacgtggtccaccgcatgtgccggatgt

SEQ ID NO: 126964 - DNA, 525 bp, Homo sapiens
  Payload ID: 4882
  Gene Symbol: DPEP1
  Gene Name: dipeptidase 1 (renal)
  ENST ID: ENST00000570029
  CDS Start-End: 204-525
ggcacatccacacatgagggaaaaacactgccaggacatctcagggcactctcaggaaatgaggaagctgctggagaagtttctagccttgggggaggcagagtggctcctcacagcctgaagctcatccttctgcacgggccagccaggccagcacagaggcaccagggcagcagtgcacacaggtccccggggaccccaccatgtggagcggatggtggctgtggccccttgtggccgtctgcactgcagacttctttcgggacgaggcagagaggatcatgagggactcccctgtcattgatgggcacaatgacctcccctggcagctgctggatatgttcaacaaccggctgcaggacgagagggccaacctgaccaccttggccggcacacacaccaacatccccaagctgagggccggctttgtgggaggccagttctggtccgtgtacacgccctgcgacacccagaacaaagacgccgtgcggaggacgctggagcagatggacgtggtccaccgca

SEQ ID NO: 126965 - DNA, 1697 bp, Homo sapiens
  Payload ID: 4883
  Gene Symbol: DPEP2
  Gene Name: dipeptidase 2
  Uniprot ID: Q9H4A9
  ENST ID: ENST00000393847
  CDS Start-End: 125-1585
cggaattggtgggttcttggtctcactgagttctagaatgaagctgcagaccctcgcagtgagtgttacagctcttaaggctctctgactgccacccctgcctgcctgcccggccctgcacaacatgcagccctccggcctcgagggtcccggcacgtttggtcggtggcctctgctgagtctgctgctcctgctgctgctgctccagcctgtaacctgtgcctacaccacgccaggcccccccagagccctcaccacgctgggcgcccccagagcccacaccatgccgggcacctacgctccctcgaccacactcagtagtcccagcacccagggcctgcaagagcaggcacgggccctgatgcgggacttcccgctcgtggacggccacaacgacctgcccctggtcctaaggcaggtttaccagaaagggctacaggatgttaacctgcgcaatttcagctacggccagaccagcctggacaggcttagagatggcctcgtgggcgcccagttctggtcagcctatgtgccatgccagacccaggaccgggatgccctgcgcctcaccctggagcagattgacctcatacgccgcatgtgtgcctcctattctgagctggagcttgtgacctcggctaaagctctgaacgacactcagaaattggcctgcctcatcggtgtagagggtggccactcgctggacaatagcctctccatcttacgtaccttctacatgctgggagtgcgctacctgacgctcacccacacctgcaacacaccctgggcagagagctccgctaagggcgtccactccttctacaacaacatcagcgggctgactgactttggtgagaaggtggtggcagaaatgaaccgcctgggcatgatggtagacttatcccatgtctcagatgctgtggcacggcgggccctggaagtgtcacaggcacctgtgatcttctcccactcggctgcccggggtgtgtgcaacagtgctcggaatgttcctgatgacatcctgcagcttctgaagaagaacggtggcgtcgtgatggtgtctttgtccatgggagtaatacagtgcaacccatcagccaatgtgtccactgtggcagatcacttcgaccacatcaaggctgtcattggatccaagttcatcgggattggtggagattatgatggggccggcaaattccctcaggggctggaagacgtgtccacatacccggtcctgatagaggagttgctgagtcgtggctggagtgaggaagagcttcagggtgtccttcgtggaaacctgctgcgggtcttcagacaagtggaaaaggtacaggaagaaaacaaatggcaaagccccttggaggacaagttcccggatgagcagctgagcagttcctgccactccgacctctcacgtctgcgtcagagacagagtctgacttcaggccaggaactcactgagattcccatacactggacagccaagttaccagccaagtggtcagtctcagagtcctccccccacatggccccagtccttgcagttgtggccaccttcccagtccttattctgtggctctgatgacccagttagtcctgccagatgtcactgtagcaagccacagacaccccacaaagttcccctgttgtgcaggcacaaatatttcctgaaataaatgttttggacatagaaa

SEQ ID NO: 126966 - DNA, 2112 bp, Homo sapiens
  Payload ID: 4883
  Gene Symbol: DPEP2
  Gene Name: dipeptidase 2
  Uniprot ID: Q9H4A9
  ENST ID: ENST00000572888
  CDS Start-End: 652-2112
gagagagaaggtcagggccagggggccccttcctgaatccagtccacagggttaacccctcatttccagagcctatcttctcccccacacccacccacacaacccagcaccaggaaatccagagcccagagcactgtggtcacagggacacatgtggccctgggtgtggccgggacacgttgcaggcggttggggacatgacgtggtctgcagatctcccagggcagggcagagggccactgtttgggggaagcaccccaggccctctctcttagagagagagcctaggggcagcagaggagccacctgggtcggccccctggggacagtgggaggagtaaaagggagggtggagggccctaagacaggccgcgagtgggcgcccaggacagggatccgcccagccggcgggagcgcccttggggatgacggcgggagggctgggcgccccctggtggccgtactgggcggtgccgccgctctccgcacatccttcgcggggccctgtgacttcgttaccctcctcttgaggccacgccgccaggtggcctgaatcgagggtcgggactccatcgtcgcgctctgcccctcgcccgcccctctcaggctctctgactgccacccctgcctgcctgcccggccctgcacaacatgcagccctccggcctcgagggtcccggcacgtttggtcggtggcctctgctgagtctgctgctcctgctgctgctgctccagcctgtaacctgtgcctacaccacgccaggcccccccagagccctcaccacgctgggcgcccccagagcccacaccatgccgggcacctacgctccctcgaccacactcagtagtcccagcacccagggcctgcaagagcaggcacgggccctgatgcgggacttcccgctcgtggacggccacaacgacctgcccctggtcctaaggcaggtttaccagaaagggctacaggatgttaacctgcgcaatttcagctacggccagaccagcctggacaggcttagagatggcctcgtgggcgcccagttctggtcagcctatgtgccatgccagacccaggaccgggatgccctgcgcctcaccctggagcagattgacctcatacgccgcatgtgtgcctcctattctgagctggagcttgtgacctcggctaaagctctgaacgacactcagaaattggcctgcctcatcggtgtagagggtggccactcgctggacaatagcctctccatcttacgtaccttctacatgctgggagtgcgctacctgacgctcacccacacctgcaacacaccctgggcagagagctccgctaagggcgtccactccttctacaacaacatcagcgggctgactgactttggtgagaaggtggtggcagaaatgaaccgcctgggcatgatggtagacttatcccatgtctcagatgctgtggcacggcgggccctggaagtgtcacaggcacctgtgatcttctcccactcggctgcccggggtgtgtgcaacagtgctcggaatgttcctgatgacatcctgcagcttctgaagaagaacggtggcgtcgtgatggtgtctttgtccatgggagtaatacagtgcaacccatcagccaatgtgtccactgtggcagatcacttcgaccacatcaaggctgtcattggatccaagttcatcgggattggtggagattatgatggggccggcaaattccctcaggggctggaagacgtgtccacatacccggtcctgatagaggagttgctgagtcgtggctggagtgaggaagagcttcagggtgtccttcgtggaaacctgctgcgggtcttcagacaagtggaaaaggtacaggaagaaaacaaatggcaaagccccttggaggacaagttcccggatgagcagctgagcagttcctgccactccgacctctcacgtctgcgtcagagacagagtctgacttcaggccaggaactcactgagattcccatacactggacagccaagttaccagccaagtggtcagtctcagagtcctccccccacatggccccagtccttgcagttgtggccaccttcccagtccttattctgtggctctga

SEQ ID NO: 126967 - DNA, 2248 bp, Homo sapiens
  Payload ID: 4883
  Gene Symbol: DPEP2
  Gene Name: dipeptidase 2
  ENST ID: ENST00000575203
  CDS Start-End: 667-1443
agactattgtttcttgggaattgtctgtatcagacatcatgggagcagatccagggcgacatcaaagggaagcatgagtctccaggaccagaggggcttggatgcagatgatcatcatctgggcactgctggatactgaagttctcattatgttgcctagactggtctcaaacctccggcttcaagagatcctctcacctcgaccttcaaattactgggattacaggcatgagccaccatgtcctaccagactttgttaaaagaggaacaggccaggcatcgtgggctcacatgaacactcatgccccagaagtaaacaagtgttagccaaccaggaggcctatcctccccctaacctcacccaaagccatctctgtgccctcccccttgcaggggaaacagcacacactagtgaaatcttgtcttagtgtgtccggaattggtgggttcttggtctcactgagttctagaatgaagctgcagaccctcgcagtgagtgttacagctcttaaggtagcgcgtctggagtttgtttcttttgatgtttggatgtttggagtttcttccttctggtgggtttgtggtcttgttggctcaggagtgaagctgcagaccttcgtggctctctgactgccacccctgcctgcctgcccggccctgcacaacatgcagccctccggcctcgagggtcccggcacgtttggtcggtggcctctgctgagtctgctgctcctgctgctgctgctccagcctgtaacctgtgcctacaccacgccaggcccccccagagccctcaccacgctgggcgcccccagagcccacaccatgccgggcacctacgctccctcgaccacactcagtagtcccagcacccagggcctgcaagagcaggcacgggccctgatgcgggacttcccgctcgtggacggccacaacgacctgcccctggtcctaaggcaggtttaccagaaagggctacaggatgttaacctgcgcaatttcagctacggccagaccagcctggacaggcttagagatggcctcgtgggcgcccagttctggtcagcctatgtgccatgccagacccaggaccgggatgccctgcgcctcaccctggagcagattgacctcatacgccgcatgtgtgcctcctattctgagctggagcttgtgacctcggctaaagctctgaacgacactcagaaattggcctgcctcatcggtgtagagggtggccactcgctggacaatagcctctccatcttacgtaccttctacatgctgggagtgcgctacctgacgctcacccacacctgcaacacaccctgggcagagagctccgctaagggcgtccactccttctacaacaacatcagcgggctgactgactttggtgagatgctgtggcacggcgggccctggaagtgtcacaggcacctgtgatcttctcccactcggctgcccggggtgtgtgcaacagtgctcggaatgttcctgatgacatcctgcagcttctgaagaagaacggtggcgtcgtgatggtgtctttgtccatgggagtaatacagtgcaacccatcagccaatgtgtccactgtggcagatcacttcgaccacatcaaggctgtcattggatccaagttcatcgggattggtggagattatgatggggccggcaaaccctggactgtggttctgagtcatgatcagggaatcaggtctgaaacccactagctggtggccacacagattccctcaggggctggaagacgtgtccacatacccggtcctgatagaggagttgctgagtcgtggctggagtgaggaagagcttcagggtgtccttcgtggaaacctgctgcgggtcttcagacaagtggaaaaggtacaggaagaaaacaaatggcaaagccccttggaggacaagttcccggatgagcagctgagcagttcctgccactccgacctctcacgtctgcgtcagagacagagtctgacttcaggccaggaactcactgagattcccatacactggacagccaagttaccagccaagtggtcagtctcagagtcctccccccacatggccccagtccttgcagttgtggccaccttcccagtccttattctgtggctctgatgacccagttagtcctgccagatgtcactgtagcaagccacagacaccccacaaagttcccctgttgtgcaggcacaaatatttcctgaaataaatgttttggacatag

SEQ ID NO: 126968 - DNA, 579 bp, Homo sapiens
  Payload ID: 4883
  Gene Symbol: DPEP2
  Gene Name: dipeptidase 2
  ENST ID: ENST00000572624
  CDS Start-End: 169-579
atctctgtgccctcccccttgcaggggaaacagcacacactagtgaaatcttgtcttagtgtgtccggaattggtgggttcttggtctcactgagttctagaatgaagctgcagaccctcgcagctctctgactgccacccctgcctgcctgcccggccctgcacaacatgcagccctccggcctcgagggtcccggcacgtttggtcggtggcctctgctgagtctgctgctcctgctgctgctgctccagcctgtaacctgtgcctacaccacgccaggcccccccagagccctcaccacgctgggcgcccccagagcccacaccatgccgggcacctacgctccctcgaccacactcagtagtcccagcacccagggcctgcaagagcaggcacgggccctgatgcgggacttcccgctcgtggacggccacaacgacctgcccctggtcctaaggcaggtttaccagaaagggctacaggatgttaacctgcgcaatttcagctacggccagaccagcctggacaggcttagagatggcctcgtgggcgcccagttctggtcagcctatgtgcca

SEQ ID NO: 126969 - DNA, 559 bp, Homo sapiens
  Payload ID: 4883
  Gene Symbol: DPEP2
  Gene Name: dipeptidase 2
  ENST ID: ENST00000574865
  CDS Start-End: 217-559
ctgtgagagctcaagccacaggagccacaagataagaggagtgtggctgcagaacccaggtggcagggctttcctcaggccccttactcctgacctggacgaggccggggcttcctcaaggaggtaggaggtatcctggccagcagatcagccagaagctctaggaggaaggctctctgactgccacccctgcctgcctgcccggccctgcacaacatgcagccctccggcctcgagggtcccggcacgtttggtcggtggcctctgctgagtctgctgctcctgctgctgctgctccagcctgtaacctgtgcctacaccacgccaggcccccccagagccctcaccacgctgggcgcccccagagcccacaccatgccgggcacctacgctccctcgaccacactcagtagtcccagcacccagggcctgcaagagcaggcacgggccctgatgcgggacttcccgctcgtggacggccacaacgacctgcccctggtcctaaggcaggtttaccagaaagggctacaggatgttaacctgcgcaatttcagctacg

SEQ ID NO: 126970 - DNA, 447 bp, Homo sapiens
  Payload ID: 4883
  Gene Symbol: DPEP2
  Gene Name: dipeptidase 2
  ENST ID: ENST00000575510
  CDS Start-End: 80-447
gtctgtatcagacatcatgggagcagatccagggcgacatcaaagggaagcatgagtctccaggaccagaggggcttggatgcagatgatcatcatctgggcactgctggatactgaggcagagagctccgctaagggcgtccactccttctacaacaacatcagcgggctgactgactttggtgagaaggtggtggcagaaatgaaccgcctgggcatgatggtagacttatcccatgtctcagatgctgtggcacggcgggccctggaagtgtcacaggcacctgtgatcttctcccactcggctgcccggggtgtgtgcaacagtgctcggaatgttcctgatgacatcctgcagcttctgaagaagaacggtggcgtcgtgatggtgtctttgtccatgggagtaatacagtgcaacccatcagccaatgtgtccactgtggc

SEQ ID NO: 126971 - DNA, 580 bp, Homo sapiens
  Payload ID: 4883
  Gene Symbol: DPEP2
  Gene Name: dipeptidase 2
  ENST ID: ENST00000573808
  CDS Start-End: 97-580
gtgccctcccccttgcaggggaaacagcacacactagtgaaatcttgtcttagtgtgtccggaattggtgggttcttggtctcactgagttctagaatgaagctgcagaccctcgcagtgagtgttacagctcttaagttctggtcagcctatgtgccatgccagacccaggaccgggatgccctgcgcctcaccctggagcagattgacctcatacgccgcatgtgtgcctcctattctgagctggagcttgtgacctcggctaaagctctgaacgacactcagaaattggcctgcctcatcggtgtagagggtggccactcgctggacaatagcctctccatcttacgtaccttctacatgctgggagtgcgctacctgacgctcacccacacctgcaacacaccctgggcagagagctccgctaagggcgtccactccttctacaacaacatcagcgggctgactgactttggtgagaaggtggtggcagaaatgaaccgcctgggcatgatggtagacttatcccatgtctcagatgctgtggcacggcgggccctggaagtgtcacaggcacctg

SEQ ID NO: 126972 - DNA, 2018 bp, Homo sapiens
  Payload ID: 4884
  Gene Symbol: DPEP3
  Gene Name: dipeptidase 3
  Uniprot ID: Q9H4B8
  ENST ID: ENST00000268793
  CDS Start-End: 375-1916
gggaatctttctgtccatcaaaccagacagaccgaattaactcttctgagtcgcagcttagaatatttgacctgcctaggagctgggcacaagccggcagctaaccgccacgtgggcctgggtaggaggtgagatcaggaagatccctgggcccctactagttccctgcctggcctcctcccccactcgtgtgggggtctacggagccagcgctgggggtggaagggcgaggagtcctcgacgctgcagcggcggttccggcccatgggggcgctctcctgcttgggggcggaaaagccgtggcgcccccttgcgtggcgcgtcggtctcagagtcgcgtgacttcaaccccctcttcgggaggctgggtcgtcatgatccggaccccattgtcggcctctgcccatcgcctgctcctcccaggctcccgcggccgacccccgcgcaacatgcagcccacgggccgcgagggttcccgcgcgctcagccggcggtatctgcggcgtctgctgctcctgctactgctgctgctgctgcggcagcccgtaacccgcgcggagaccacgccgggcgcccccagagccctctccacgctgggctcccccagcctcttcaccacgccgggtgtccccagcgccctcactaccccaggcctcactacgccaggcacccccaaaaccctggaccttcggggtcgcgcgcaggccctgatgcggagtttcccactcgtggacggccacaatgacctgccccaggtcctgagacagcgttacaagaatgtgcttcaggatgttaacctgcgaaatttcagccatggtcagaccagcctggacaggcttagagacggcctcgtgggtgcccagttctggtcagcctccgtctcatgccagtcccaggaccagactgccgtgcgcctcgccctggagcagattgacctcattcaccgcatgtgtgcctcctactctgaactcgagcttgtgacctcagctgaaggtctgaacagctctcaaaagctggcctgcctcattggcgtggagggtggtcactcactggacagcagcctctctgtgctgcgcagtttctatgtgctgggggtgcgctacctgacacttaccttcacctgcagtacaccatgggcagagagttccaccaagttcagacaccacatgtacaccaacgtcagcggattgacaagctttggtgagaaagtagtagaggagttgaaccgcctgggcatgatgatagatttgtcctatgcatcggacaccttgataagaagggtcctggaagtgtctcaggctcctgtgatcttctcccactcagctgccagagctgtgtgtgacaatttgttgaatgttcccgatgatatcctgcagcttctgaagaagaacggtggcatcgtgatggtgacactgtccatgggggtgctgcagtgcaacctgcttgctaacgtgtccactgtggcagatcactttgaccacatcagggcagtcattggatctgagttcatcgggattggtggaaattatgacgggactggccggttccctcaggggctggaggatgtgtccacatacccagtcctgatagaggagttgctgagtcgtagctggagcgaggaagagcttcaaggtgtccttcgtggaaacctgctgcgggtcttcagacaagtggaaaaggtgagagaggagagcagggcgcagagccccgtggaggctgagtttccatatgggcaactgagcacatcctgccactcccacctcgtgcctcagaatggacaccaggctactcatctggaggtgaccaagcagccaaccaatcgggtcccctggaggtcctcaaatgcctccccataccttgttccaggccttgtggctgctgccaccatcccaaccttcacccagtggctctgctgacacagtcggtccccgcagaggtcactgtggcaaagcctcacaaagccccctctcctagttcattcacaagcatatgctgagaataaacatgttacacatgga

SEQ ID NO: 126973 - DNA, 3052 bp, Homo sapiens
  Payload ID: 4885
  Gene Symbol: DPP10
  Gene Name: dipeptidyl-peptidase 10 (non-functional)
  Uniprot ID: Q8N608
  ENST ID: ENST00000310323
  CDS Start-End: 128-2497
ggctgggctcccgcgcctccctcttctcaccctcccccgccccgccccagttccaggctctcctgcttctccacggactctgcgggaagttagagcctctgcgtgcgctccggggcccggcgagaggatgcgcaaggtggagagccgcggggaagggggcagagaggaactgggaagtaacagccctccacagagaaactggaagggaattgctattgctctgctggtgattttagttgtatgctcactcatcactatgtcagtcatcctcttaaccccagatgaactcacaaattcgtcagaaaccagattgtctttggaagacctctttaggaaagactttgtgcttcacgatccagaggctcggtggatcaatgatacagatgtggtgtataaaagcgagaatggacatgtcattaaactgaatatagaaacaaatgctaccacattattattggaaaacacaacttttgtaaccttcaaagcatcaagacattcagtttcaccagatttaaaatatgtccttctggcatatgatgtcaaacagatttttcattattcgtatactgcttcatatgtgatttacaacatacacactagggaagtttgggagttaaatcctccagaagtagaggactccgtcttgcagtacgcggcctggggtgtccaagggcagcagctgatttatatttttgaaaataatatctactatcaacctgatataaagagcagttcattgcgactgacatcttctggaaaagaagaaataatttttaatgggattgctgactggttatatgaagaggaactcctgcattctcacatcgcccactggtggtcaccagatggagaaagacttgccttcctgatgataaatgactctttggtacccaccatggttatccctcggtttactggagcgttgtatcccaaaggaaagcagtatccgtatcctaaggcaggtcaagtgaacccaacaataaaattatatgttgtaaacctgtatggaccaactcacactttggagctcatgccacctgacagctttaaatcaagagaatactatatcactatggttaaatgggtaagcaataccaagactgtggtaagatggttaaaccgagctcagaacatctccatcctcacagtctgtgagaccactacaggtgcttgtagtaaaaaatatgagatgacatcagatacgtggctctctcagcagaatgaggagcccgtgttttctagagacggcagcaaattctttatgacagtgcctgttaagcaagggggacgtggagaatttcaccacgtagctatgttcctcatccagagtaaaagtgagcaaattaccgtgcggcatctgacatcaggaaactgggaagtgataaagatcttggcatacgatgaaactactcaaaaaatttactttctgagcactgaatcttctcccagaggaaggcagctgtacagtgcttctactgaaggattattgaatcgccaatgcatttcatgtaatttcatgaaagaacaatgtacatattttgatgccagttttagtcccatgaatcaacatttcttattattctgtgaaggtccaagggtcccagtggtcagcctacatagtacggacaacccagcaaaatattttatattggaaagcaattctatgctgaaggaagctatcctgaagaagaagataggaaagccagaaattaaaatccttcatattgacgactatgaacttcctttacagttgtcccttcccaaagattttatggaccgaaaccagtatgctcttctgttaataatggatgaagaaccaggaggccagctggttacagataagttccatattgactgggattccgtactcattgacatggataatgtcattgtagcaagatttgatggcagaggaagtggattccagggtctgaaaattttgcaggagattcatcgaagattaggttcagtagaagtaaaggaccaaataacagctgtgaaatttttgctgaaactgccttacattgactccaaaagattaagcatttttggaaagggttatggtggctatattgcatcaatgatcttaaaatcagatgaaaagctttttaaatgtggatccgtggttgcacctatcacagacttgaaattgtatgcctcagctttctctgaaagataccttgggatgccatctaaggaagaaagcacttaccaggcagccagtgtgctacataatgttcatggcttgaaagaagaaaatatattaataattcatggaactgctgacacaaaagttcatttccaacactcagcagaattaatcaagcacctaataaaagctggagtgaattatactatgcaggtctacccagatgaaggtcataacgtatctgagaagagcaagtatcatctctacagcacaatcctcaaattcttcagtgattgtttgaaggaagaaatatctgtgctaccacaggaaccagaagaagatgaataatggactgtatttatacagaactgaagggaatattgaggctcaatgaaacctgacaaagagactgtaatattgtagttgctccagaatgtcaagggcagcttacggagatgtcactggagcagcacgctcagagacagtgaactagcatttgaatacacaagtccaagtctactgtgttgctaggggtgcagaacccgtttctttgtatgagagaggtcaaagggttggtttcctgggagaaattagttttgcattaaagtaggagtagtgcatgttttcttctgttatccccctgtttgttctgtaactagttgctctcattttaatttcactggccaccatcatctttgcatataatgcacaatctatcatctgtcctacagtccctgatctttcatggctgagctgcaatctaacactttactgtacctttataataagtgcaattctttcattgtctattattatgcttaagaaaatattcagttaataaaaaacagagtattttatgtaatttctgtttttaaaaagacattattaaatgggtcaaaggac

SEQ ID NO: 126974 - DNA, 862 bp, Homo sapiens
  Payload ID: 4885
  Gene Symbol: DPP10
  Gene Name: dipeptidyl-peptidase 10 (non-functional)
  ENST ID: ENST00000393146
  CDS Start-End: 87-862
gagtgacatgcaaggaactgacattgaagtaagattctgtgagggtgaggttgcatttgtagaaagtggttatagtccacttagcaatggtcatcacagaggtggctgagggaccagtagatggttctgaaaaggaactgggaagtaacagccctccacagagaaactggaagggaattgctattgctctgctggtgattttagttgtatgctcactcatcactatgtcagtcatcctcttaaccccagatgaactcacaaattcgtcagaaaccagattgtctttggaagacctctttaggaaagactttgtgcttcacgatccagaggctcggtggatcaatgatacagatgtggtgtataaaagcgagaatggacatgtcattaaactgaatatagaaacaaatgctaccacattattattggaaaacacaacttttgtaaccttcaaagcatcaagacattcagtttcaccagatttaaaatatgtccttctggcatatgatgtcaaacagatttttcattattcgtatactgcttcatatgtgatttacaacatacacactagggaagtttgggagttaaatcctccagaagtagaggactccgtcttgcagtacgcggcctggggtgtccaagggcagcagctgatttatatttttgaaaataatatctactatcaacctgatataaagagcagttcattgcgactgacatcttctggaaaagaagaaataatttttaatgggattgctgactggttatatgaagaggaactcctgcattctcacatcgcccactggtggtcaccagatggagaaagacttgccttcctgatgataaatgactctttggtacccac

SEQ ID NO: 126975 - DNA, 2758 bp, Homo sapiens
  Payload ID: 4885
  Gene Symbol: DPP10
  Gene Name: dipeptidyl-peptidase 10 (non-functional)
  Uniprot ID: Q8N608
  ENST ID: ENST00000393147
  CDS Start-End: 356-2758
aagaaggcacgaggcgtcgccgcagctcggtcaggggccggggccccgccgctcgccgctgcactaacttgccgcttggtctcgcctcgccgccgcggctcgctgcgctttgggtggcggggggcggggagagcggggagtcagagggtctgcggtggccgagggagggaccctacgacggggagcccgcccggtgccgctcttcttcccctccccgcccctccgctccccccaccccgtcccttccgccgattccgggagcgacgggcgcccgtgacctgcgaacgctgccaagtgacggtccccgagtctgaagcgcccgcgaggaagcgagcgccagcgcgggccgccggcgatgacggccgcgaagcaggagccgcagcccaccccgggggccagggcgagccaggcgcagccggcggaccaggaactgggaagtaacagccctccacagagaaactggaagggaattgctattgctctgctggtgattttagttgtatgctcactcatcactatgtcagtcatcctcttaaccccagatgaactcacaaattcgtcagaaaccagattgtctttggaagacctctttaggaaagactttgtgcttcacgatccagaggctcggtggatcaatgatacagatgtggtgtataaaagcgagaatggacatgtcattaaactgaatatagaaacaaatgctaccacattattattggaaaacacaacttttgtaaccttcaaagcatcaagacattcagtttcaccagatttaaaatatgtccttctggcatatgatgtcaaacagatttttcattattcgtatactgcttcatatgtgatttacaacatacacactagggaagtttgggagttaaatcctccagaagtagaggactccgtcttgcagtacgcggcctggggtgtccaagggcagcagctgatttatatttttgaaaataatatctactatcaacctgatataaagagcagttcattgcgactgacatcttctggaaaagaagaaataatttttaatgggattgctgactggttatatgaagaggaactcctgcattctcacatcgcccactggtggtcaccagatggagaaagacttgccttcctgatgataaatgactctttggtacccaccatggttatccctcggtttactggagcgttgtatcccaaaggaaagcagtatccgtatcctaaggcaggtcaagtgaacccaacaataaaattatatgttgtaaacctgtatggaccaactcacactttggagctcatgccacctgacagctttaaatcaagagaatactatatcactatggttaaatgggtaagcaataccaagactgtggtaagatggttaaaccgagctcagaacatctccatcctcacagtctgtgagaccactacaggtgcttgtagtaaaaaatatgagatgacatcagatacgtggctctctcagcagaatgaggagcccgtgttttctagagacggcagcaaattctttatgacagtgcctgttaagcaagggggacgtggagaatttcaccacgtagctatgttcctcatccagagtaaaagtgagcaaattaccgtgcggcatctgacatcaggaaactgggaagtgataaagatcttggcatacgatgaaactactcaaaaaatttactttctgagcactgaatcttctcccagaggaaggcagctgtacagtgcttctactgaaggattattgaatcgccaatgcatttcatgtaatttcatgaaagaacaatgtacatattttgatgccagttttagtcccatgaatcaacatttcttattattctgtgaaggtccaagggtcccagtggtcagcctacatagtacggacaacccagcaaaatattttatattggaaagcaattctatgctgaaggaagctatcctgaagaagaagataggaaagccagaaattaaaatccttcatattgacgactatgaacttcctttacagttgtcccttcccaaagattttatggaccgaaaccagtatgctcttctgttaataatggatgaagaaccaggaggccagctggttacagataagttccatattgactgggattccgtactcattgacatggataatgtcattgtagcaagatttgatggcagaggaagtggattccagggtctgaaaattttgcaggagattcatcgaagattaggttcagtagaagtaaaggaccaaataacagctgtgaaatttttgctgaaactgccttacattgactccaaaagattaagcatttttggaaagggttatggtggctatattgcatcaatgatcttaaaatcagatgaaaagctttttaaatgtggatccgtggttgcacctatcacagacttgaaattgtatgcctcagctttctctgaaagataccttgggatgccatctaaggaagaaagcacttaccaggcagccagtgtgctacataatgttcatggcttgaaagaagaaaatatattaataattcatggaactgctgacacaaaagttcatttccaacactcagcagaattaatcaagcacctaataaaagctggagtgaattatactatgcaggtctacccagatgaaggtcataacgtatctgagaagagcaagtatcatctctacagcacaatcctcaaattcttcagtgattgtttgaaggaagaaatatctgtgctaccacaggaaccagaagaagatgaataa

SEQ ID NO: 126976 - DNA, 6278 bp, Homo sapiens
  Payload ID: 4885
  Gene Symbol: DPP10
  Gene Name: dipeptidyl-peptidase 10 (non-functional)
  Uniprot ID: Q8N608
  ENST ID: ENST00000410059
  CDS Start-End: 481-2871
aaatattttgcactggaaaaactataatctggagagacagaggagttgagagtgcccctttaaactgcaggactgcaattgatctctgtatgttttctggttttcgtccctttgaaaggggaatgagagccaggatcattggctgtactgtggagctgtcacatctccatactgaaaaggtacactgcaagtgaatttaaaccgtttttggctttctattgcatattgccaagagctttgagactgatgaaccaagtaaatgctctatttagggctaagtgagatacagattcctccaatctgatagcgtttcagcctccggagtgaggaagcagcagaaacagaagcagcagaagcaacagcagtagcagcggcagcagcaacagcagcagcccctactgaagtccaatagaggagacttgatctctagttcattctggaactccgcctgggattgtgcactgtccagggtcctgaaacatgaaccaaactgccagcgtgtcccatcacatcaagtgtcaaccctcaaaaacaatcaaggaactgggaagtaacagccctccacagagaaactggaagggaattgctattgctctgctggtgattttagttgtatgctcactcatcactatgtcagtcatcctcttaaccccagatgaactcacaaattcgtcagaaaccagattgtctttggaagacctctttaggaaagactttgtgcttcacgatccagaggctcggtggatcaatgatacagatgtggtgtataaaagcgagaatggacatgtcattaaactgaatatagaaacaaatgctaccacattattattggaaaacacaacttttgtaaccttcaaagcatcaagacattcagtttcaccagatttaaaatatgtccttctggcatatgatgtcaaacagatttttcattattcgtatactgcttcatatgtgatttacaacatacacactagggaagtttgggagttaaatcctccagaagtagaggactccgtcttgcagtacgcggcctggggtgtccaagggcagcagctgatttatatttttgaaaataatatctactatcaacctgatataaagagcagttcattgcgactgacatcttctggaaaagaagaaataatttttaatgggattgctgactggttatatgaagaggaactcctgcattctcacatcgcccactggtggtcaccagatggagaaagacttgccttcctgatgataaatgactctttggtacccaccatggttatccctcggtttactggagcgttgtatcccaaaggaaagcagtatccgtatcctaaggcaggtcaagtgaacccaacaataaaattatatgttgtaaacctgtatggaccaactcacactttggagctcatgccacctgacagctttaaatcaagagaatactatatcactatggttaaatgggtaagcaataccaagactgtggtaagatggttaaaccgagctcagaacatctccatcctcacagtctgtgagaccactacaggtgcttgtagtaaaaaatatgagatgacatcagatacgtggctctctcagcagaatgaggagcccgtgttttctagagacggcagcaaattctttatgacagtgcctgttaagcaagggggacgtggagaatttcaccacgtagctatgttcctcatccagagtaaaagtgagcaaattaccgtgcggcatctgacatcaggaaactgggaagtgataaagatcttggcatacgatgaaactactcaaaaaatttactttctgagcactgaatcttctcccagaggaaggcagctgtacagtgcttctactgaaggattattgaatcgccaatgcatttcatgtaatttcatgaaagaacaatgtacatattttgatgccagttttagtcccatgaatcaacatttcttattattctgtgaaggtccaagggtcccagtggtcagcctacatagtacggacaacccagcaaaatattttatattggaaagcaattctatgctgaaggaagctatcctgaagaagaagataggaaagccagaaattaaaatccttcatattgacgactatgaacttcctttacagttgtcccttcccaaagattttatggaccgaaaccagtatgctcttctgttaataatggatgaagaaccaggaggccagctggttacagataagttccatattgactgggattccgtactcattgacatggataatgtcattgtagcaagatttgatggcagaggaagtggattccagggtctgaaaattttgcaggagattcatcgaagattaggttcagtagaagtaaaggaccaaataacagctgtgaaatttttgctgaaactgccttacattgactccaaaagattaagcatttttggaaagggttatggtggctatattgcatcaatgatcttaaaatcagatgaaaagctttttaaatgtggatccgtggttgcacctatcacagacttgaaattgtatgcctcagctttctctgaaagataccttgggatgccatctaaggaagaaagcacttaccaggcagccagtgtgctacataatgttcatggcttgaaagaagaaaatatattaataattcatggaactgctgacacaaaagttcatttccaacactcagcagaattaatcaagcacctaataaaagctggagtgaattatactatgcaggtctacccagatgaaggtcataacgtatctgagaagagcaagtatcatctctacagcacaatcctcaaattcttcagtgattgtttgaaggaagaaatatctgtgctaccacaggaaccagaagaagatgaataatggactgtatttatacagaactgaagggaatattgaggctcaatgaaacctgacaaagagactgtaatattgtagttgctccagaatgtcaagggcagcttacggagatgtcactggagcagcacgctcagagacagtgaactagcatttgaatacacaagtccaagtctactgtgttgctaggggtgcagaacccgtttctttgtatgagagaggtcaaagggttggtttcctgggagaaattagttttgcattaaagtaggagtagtgcatgttttcttctgttatccccctgtttgttctgtaactagttgctctcattttaatttcactggccaccatcatctttgcatataatgcacaatctatcatctgtcctacagtccctgatctttcatggctgagctgcaatctaacactttactgtacctttataataagtgcaattctttcattgtctattattatgcttaagaaaatattcagttaataaaaaacagagtattttatgtaatttctgtttttaaaaagacattattaaatgggtcaaaggacatatagaaatgtggatttcagcaccttccaaagttcagccagttatcagtagatacaatatctttaaatgaacacacgagtgtatgtctcacaatatatatacacaagtgtgcatatacagttaatgaaactatctttaaatgttattcatgctataaagagtaaacgtttgatgaattagaagagatgctcttttccaagctataatggatgctttgtttaatgagccaaatatgatgaaacattttttccaattcaaattctagctattgctttcctataaatgtttgggttgtgtttggtattgtttttagtggttaatagttttccagttgcatttaattttttgaatatgataccttgtcacatgtaaattagatacttaaatattaaattatagtttctgataaagaaattttgttaacaatgcaatgccactgagtgctattttgctcttttggtggagaaggcttttttcaaaactcttggtccttttacttctttctctcagtgcagaatcaattctcattttcatcgtaaaagcaaatagctggattatttcatttgccagtttctatttagtattccatgcctgcccaattcatctgttactgtttaatttcaattcttctggtgagaattagaaatgaaatattttttattcattggccaaaaagttcacagacagcagtgtttgctatttactttgaattgaaggcacaaaatgcatcaattcctgtgctgtgttgacttgcagtagtaagtaactgagagcataaaataaacctgactgtatgaagtcaatttaagtgatgagaacatttaactttggtgactaaagtcagaatatcttctcacttcacttaagggatcttccagaagatatctaaaagtctgtaataagcttagaagttcagataaatctaggcaggatactgcatttttgtggttttaaaaaagtccttaggacagactgaattatcataacttatggcatcaggaggaaactttaaaatatcaaggaatcactcagtcaccctcctgttttgttgaaggatcaaccccaaattctgggtatttgagtacatgtgaatcatggatttggtattcaactttttccctggatgctttggaatcgtgtcttccatgctccactgggttcaatttaaaataggagaggctttctcttctgaaagatccattttaggtctttttcaagaatagtgaacacattttttaacaaaataagttgtaattttaaaaggaaagttttgcctattttattaagatggaaatttctttttaggctaatttgaaatccaactgaagctttttaaccaatattttaaatttgaaccactagagttttttatgatgcaaatgattatgttgtctgaaaggtgtggttttattgaatgtctatttgagtatcatttaaaaagtatttgccttttactgtcatcatttctcttgttttattattattatcaatgtttatctatttttcaattaatttaatacagtttctaatgtgaaagacatttttctggaacccgttttccccttaaacactaaagagacctcaagtgaaagcatattgcttagtaggaaggtagaaaatgttaatccctgcgattctttgagttttaatgacagggtcattttcagtaaaggaaatgctcaccaacacatagtcaccaactattaaaggaatcatgtgattggattttcccctgtatacatgtacccttggtcataatcccactatttcatacatatttatgcattgctagattttcctaggactccaatagcatgctttccaagtgttattattcccttaatgttaaagaaaaaaatcaatatattgaattctttaattaaataggtaagcagtattaaatcatccacagagataaacaatctcttgaaactcttttgaaagagaaaagtgtttgttcactttcattgccttcattaagatctccaaatactcagagactaagcaggctattctcatctctttgagtttcctgacagaactaaaggaaggaatcactcttcaaaagatggatctcacttcactctgaaaatgtgcctttttttaattgggtgtttagcataaaaatcactattggggatcttacagatgtctgttgtagatctattacaatgaggtgacttagacattgggctttaccatattagagaattacttaagccattgtccttcaaatgttgggcttggagacagaagtaccttggactgaattgctttcaagtctctagaatcactgacagcacatagcttctatgaggagttatatatgaaataccacttgtgtccctcctcaagttctctgaccaccttcacatcctgcggccaccaacactgtatggatacaatctggcctctcagctctgctcactttcactttctgttctggggattctctgatactaattttggctacttggtagaaccaagagacaaatcgcttacatgctgcaaaccgatgtgaaggtgttactaacccgctaaaacacaattaatgaaagactgtagcaggtaactgatctttccctcagatattctacatggtccatggaagactctgtgggccgcagaagcccatagctgcatacccttctattttcctcttccccatttcactcttttaagctccctactcctattccctatgatcactttccaaaataaacggcaggtgtgctagctgttgtcttagactctgctttctggaaactatttttcccctccacaagaaattatcactgtgaatattacaggaggagaaataaaataagaataaatcagtggtttattttca

SEQ ID NO: 126977 - DNA, 3883 bp, Homo sapiens
  Payload ID: 4885
  Gene Symbol: DPP10
  Gene Name: dipeptidyl-peptidase 10 (non-functional)
  Uniprot ID: Q8N608
  ENST ID: ENST00000409163
  CDS Start-End: 661-2901
aagacctagaaggctttaagaaagacagggtaatattttgctggtgtagagggcctgctcttcggagacaaatacttgcttttcattttgatcagccgtctgcacttaaaagcctcctagccagggacatgttaattaaacagtctggggctcagtgctgccatccgtaaattggaggattagagaaataatatacacaagtacctggtacataccaaatatgatagaagatatcttcaacctttagctataagaagaatggaaaatgaaaaagagacaggtggagagagggagggagatgagagctgcgtggagctggtatgctggttaggaggtaggaaataatgaggcctcgaccatctaagatacagaagtctccctgctgaatcgaaaggaagtgctacaatattctttcaaattcatcgcagttgagagaaaactggagcagagtgtgatatcaagaaagggcttcaccaggatgatcaatgcaaatggatatggagctttcttggaatgaaacattatcccgtaacaccaggtatacatacatgaagagtggcttcaggactggaactgggaagtaacagccctccacagagaaactggaagggaattgctattgctctgctggtgattttagttgtatgctcactcatcactatgtcagtcatcctcttaaccccagatgaactcacaaattcgtcagaaaccagattgtctttggaagacctctttaggaaagactttgtgcttcacgatccagaggctcggtggatcaatgatacagatgtggtgtataaaagcgagaatggacatgtcattaaactgaatatagaaacaaatgctaccacattattattggaaaacacaacttttgtaaccttcaaagcatcaagacattcagtttcaccagatttaaaatatgtccttctggcatatgatgtcaaacagatttttcattattcgtatactgcttcatatgtgatttacaacatacacactagggaagtttgggagttaaatcctccagaagtagaggactccgtcttgcagtacgcggcctggggtgtccaagggcagcagctgatttatatttttgaaaataatatctactatcaacctgatataaagagcagttcattgcgactgacatcttctggaaaagaagaaataatttttaatgggattgctgactggttatatgaagaggaactcctgcattctcacatcgcccactggtggtcaccagatggagaaagacttgccttcctgatgataaatgactctttggtacccaccatggttatccctcggtttactggagcgttgtatcccaaaggaaagcagtatccgtatcctaaggcaggtcaagtgaacccaacaataaaattatatgttgtaaacctgtatggaccaactcacactttggagctcatgccacctgacagctttaaatcaagagaatactatatcactatggttaaatgggtaagcaataccaagactgtggtaagatggttaaaccgagctcagaacatctccatcctcacagtctgtgagaccactacaggtgcttgtagtaaaaaatatgagatgacatcagatacgtggctctctcagcagaatgaggagcccgtgttttctagagacggcagcaaattctttatgacagtgcctgttaagcaagggggacgtggagaatttcaccacgtagctatgttcctcatccagagtaaaagtgagcaaattaccgtgcggcatctgacatcaggaaactgggaagtgataaagatcttggcatacgatgaaactactcaaaaaatttactttctgagcactgaatcttctcccagaggaaggcagctgtacagtgcttctactgaaggattattgaatcgccaatgcatttcatgtaatttcatgaaagaacaatgtacatattttgatgccagttttagtcccatgaatcaacatttcttattattctgtgaaggtccaagggtcccagtggtcagcctacatagtacggacaacccagcaaaatattttatattggaaagcaattctatgctgaaggaagctatcctgaagaagaagataggaaagccagaaattaaaatccttcatattgacgactatgaacttcctttacagttgtcccttcccaaagattttatggaccgaaaccagtatgctcttctgttaataatggatgaagaaccaggaggccagctggttacagataagttccatattgactgggattccgtactcattgacatggataatgtcattgtagcaagatttgatggcagaggaagtggattccagggtctgaaaattttgcaggagattcatcgaagattaggttcagtagaagtaaaggaccaaataacagctgtgaaatttttgctgaaactgccttacattgactccaaaagattaagcatttttggaaagggttatggtggctatattgcatcaatgatcttaaaatcagatgaaaagctttttaaatgtggatccgtggttgcacctatcacagacttgaaattgtatgcctcagctttctctgaaagataccttgggatgccatctaaggaagaaagcacttaccaggcagccagtgtgctacataatgttcatggcttgaaagaagaaaatatattaataattcatggaactgctgacacaaaagttcatttccaacactcagcagaattaatcaagcacctaataaaagctggagtgaattatactatgcaggtctacccagatgaaggtcataacgtatctgagaagagcaagtatcatctctacagcacaatcctcaaattcttcagtgattgtttgaaggaagaaatatctgtgctaccacaggaaccagaagaagatgaataatggactgtatttatacagaactgaagggaatattgaggctcaatgaaacctgacaaagagactgtaatattgtagttgctccagaatgtcaagggcagcttacggagatgtcactggagcagcacgctcagagacagtgaactagcatttgaatacacaagtccaagtctactgtgttgctaggggtgcagaacccgtttctttgtatgagagaggtcaaagggttggtttcctgggagaaattagttttgcattaaagtaggagtagtgcatgttttcttctgttatccccctgtttgttctgtaactagttgctctcattttaatttcactggccaccatcatctttgcatataatgcacaatctatcatctgtcctacagtccctgatctttcatggctgagctgcaatctaacactttactgtacctttataataagtgcaattctttcattgtctattattatgcttaagaaaatattcagttaataaaaaacagagtattttatgtaatttctgtttttaaaaagacattattaaatgggtcaaaggacatatagaaatgtggatttcagcaccttccaaagttcagccagttatcagtagatacaatatctttaaatgaacacacgagtgtatgtctcacaatatatatacacaagtgtgcatatacagttaatgaaactatctttaaatgttattcatgctataaagagtaaacgtttgatgaattagaagagatgctcttttccaagctataatggatgctttgtttaatgagccaaatatgatgaaacattttttccaattcaaattctagctattgctttcctataaatgtttgggttgtgtttggtattgtttttagtggttaatagttttccagttgcatttaattttttgaatatgataccttgtcacatgtaaattagatacttaaatattaaattatagtttctgataaagaaattttgttaacaa

SEQ ID NO: 126978 - DNA, 883 bp, Homo sapiens
  Payload ID: 4885
  Gene Symbol: DPP10
  Gene Name: dipeptidyl-peptidase 10 (non-functional)
  ENST ID: ENST00000436732
  CDS Start-End: 703-883
aaatattttgcactggaaaaactataatctggagagacagaggagttgagagtgcccctttaaactgcaggactgcaattgatctctgtatgttttctggttttcgtccctttgaaaggggaatgagagccaggatcattggctgtactgtggagctgtcacatctccatactgaaaaggtacactgcaagtgaatttaaaccgtttttggctttctattgcatattgccaagagctttgagactgatgaaccaagtaaatgctctatttagggctaagtgagatacagattcctccaatctgatagcgtttcagcctccggagtgaggaagcagcagaaacagaagcagcagaagcaacagcagtagcagcggcagcagcaacagcagcagcccctactgaagtccaatagaggagacttgatctctagttcattctggaactccgcctgggattgtgcactgtccagggtcctgaaacatgaaccaaactgccagcgtgtcccatcacatcaagtgtcaaccctcaaaaacaatcaagaattctgaaaactaactaagatgctggagaaattgggagaccatttgttgaagaaatacctactgaatcttggaactgggaagtaacagccctccacagagaaactggaagggaattgctattgctctgctggtgattttagttgtatgctcactcatcactatgtcagtcatcctcttaaccccagatgaactcacaaattcgtcagaaaccagattgtctttggaagacctctttaggaaagactttgtgcttcacgatccagaggctcggtggatcaatgatacagatgtggtgtataaaagcgagaatggacatgtcattaaactgaatatagaaacaa

SEQ ID NO: 126979 - DNA, 565 bp, Homo sapiens
  Payload ID: 4885
  Gene Symbol: DPP10
  Gene Name: dipeptidyl-peptidase 10 (non-functional)
  ENST ID: ENST00000419287
  CDS Start-End: 275-565
gtacaaaggattctcaggtcaatagctagattttactaaactggccctgaaaattttataattttgattctcaatagcagttttctgtactctagtctgtgagttactggggaacatttgaaggcaagaagaatagcagttaatacggcgtgccaccttctcaccatgcacactggattcgcaggaactgggaagtaacagccctccacagagaaactggaagggaattgctattgctctgctggtgattttagttgtatgctcactcatcactatgtcagtcatcctcttaaccccagatgaactcacaaattcgtcagaaaccagattgtctttggaagacctctttaggaaagactttgtgcttcacgatccagaggctcggtggatcaatgatacagatgtggtgtataaaagcgagaatggacatgtcattaaactgaatatagaaacaaatgctaccacattattattggaaaacacaacttttgtaaccttcaaagcatcaagacattcagtttcaccagatttaaaatatgtccttctggcatatgatgtcaaacag

SEQ ID NO: 126980 - DNA, 553 bp, Homo sapiens
  Payload ID: 4885
  Gene Symbol: DPP10
  Gene Name: dipeptidyl-peptidase 10 (non-functional)
  ENST ID: ENST00000429914
  CDS Start-End: 1-183
atgcgcaaggtggagagccgcggggaagggggcagagagatgaactcacaaattcgtcagaaaccagattgtctttggaagacctctttaggaaagactttgtgcttcacgatccagaggctcggtggatcaatgatacagatgtggtgtataaaagcgagaatggacatgtcattaaactgaatatagaaacaaatgctaccacattattattggaaaacacaacttttgtaaccttcaaagcatcaagacattcagtttcaccagatttaaaatatgtccttctggcatatgatgtcaaacaggagagcaatggagacagagttgcttatccaagggcagtctagcaagtggcagagctggggcatgagtccaggcagttttgttccagagtccgtgctcttggtcaccttactttgatgcgtatcctccaccagcacactttgagaaacaccacaatttttcattattcgtatactgcttcatatgtgatttacaacatacacactagggaagtttgggagttaaatcctccagaagtagaggactccgt

SEQ ID NO: 126981 - DNA, 547 bp, Homo sapiens
  Payload ID: 4886
  Gene Symbol: DPP3
  Gene Name: dipeptidyl-peptidase 3
  ENST ID: ENST00000526515
  CDS Start-End: 37-547
gagtttgcgaacggagcagctgctgcagcagggcccatggcggacacccagtacatcctgcccaatgacatcggcgtgtctagcctggactgccgtgaggccttccgcctgctgtcacccacagagcgcctctatgcctaccacctgtcccgtgccgcctggtacggaggcctggctgtgctgcttcagacctcccctgaggccccctacatctatgctctgctcagccgcctcttccgcgcccaggaccccgaccagctgcgccaacatgccctggctgaaggccttaccgaggaggagtatcaggaaaagctggaacgggtgatcctagggagtgaggctgctcagcagcacccagaagaagtcaggggcctctggcagacctgcggggagcttatgttctctctggagccaaggcttcgacacctcggactggggaaggagggaatcaccacctatttctctgggaattgtaccatggaagatgccaaattggcccaggactttctggactcacagaacctcagtgcctacaacacccggctct

SEQ ID NO: 126982 - DNA, 733 bp, Homo sapiens
  Payload ID: 4886
  Gene Symbol: DPP3
  Gene Name: dipeptidyl-peptidase 3
  ENST ID: ENST00000531354
  CDS Start-End: 131-733
tacaatagtattcccttccacatgggcttttgggaggattaaatgagatcataagagttcagagccaggtatgcaattggtatggggtaaacaacagctgtgatgacagtgatggttctcagcagggcccatggcggacacccagtacatcctgcccaatgacatcggcgtgtctagcctggactgccgtgaggccttccgcctgctgtcacccacagagcgcctctatgcctaccacctgtcccgtgccgcctggtacggaggcctggctgtgctgcttcagacctcccctgaggccccctacatctatgctctgctcagccgcctcttccgcgcccaggaccccgaccagctgcgccaacatgccctggctgaaggccttaccgaggaggagtatcaggcgttcctggtctatgccgcgggtgtttactccaacatgggcaactacaagtcctttggtgacaccaagtttgttcccaacttgcccaaggaaaagctggaacgggtgatcctagggagtgaggctgctcagcagcacccagaagaagtcaggggcctctggcagacctgcggggagcttatgttctctctggagccaaggcttcgacacctcggactggggaaggagggaatcaccacctatttctctgggaattgtaccatggaagatgccaaattggcccaggactttctggactcacagaacctcagtgcctacaacacccggctcttc

SEQ ID NO: 126983 - DNA, 2974 bp, Homo sapiens
  Payload ID: 4886
  Gene Symbol: DPP3
  Gene Name: dipeptidyl-peptidase 3
  ENST ID: ENST00000531863
  CDS Start-End: 402-2675
attactcctattgtgtaggttcccacctgcaagagtgctgtcgggtcctctgaggtgaaaccccaaaggaaagcgggatcgggactgggggagggggattcccaagtccctgacacccgcgccgtctcggcctgggcttggtgacctcgtcagtcccgtctgccgggactaggccgcggccaggccgggcacagcggtacccggtccggcgcgtgtgcggcctgctgacaaaaggccgagcccgcagggccaatccgcgcgccaccccgtagcgcctgggggcgggagcgggcgagccgagaagctcgtcttggcgcgtctattggctggtactgacgcccatccggaccccgaggccaggcagttggccaaggggggcggggttcgcagagccccaatgaatgggggagccggaagcaggaagtgagtttgcgaacggagcagctgctgcagcagggcccatggcggacacccagtacatcctgcccaatgacatcggcgtgtctagcctggactgccgtgaggccttccgcctgctgtcacccacagagcgcctctatgcctaccacctgtcccgtgccgcctggtacggaggcctggctgtgctgcttcagacctcccctgaggccccctacatctatgctctgctcagccgcctcttccgcgcccaggaccccgaccagctgcgccaacatgccctggctgaaggccttaccgaggaggagtatcaggcgttcctggtctatgccgcgggtgtttactccaacatgggcaactacaagtcctttggtgacaccaagtttgttcccaacttgcccaaggaaaagctggaacgggtgatcctagggagtgaggctgctcagcagcacccagaagaagtcaggggcctctggcagacctgcggggagcttatgttctctctggagccaaggcttcgacacctcggactggggaaggagggaatcaccacctatttctctgggaattgtaccatggaagatgccaaattggcccaggactttctggactcacagaacctcagtgcctacaacacccggctcttcaaagaggtcgatggagaagggaagccctactacgaggtgcggctggcttctgtgcttggctcagagccttccctggactctgaggtgacttccaagctgaagagctatgaattccggggaagccctttccaggtgacccggggggactacgcgcccatcctccagaaggtggtggagcagctggagaaagccaaggcctatgcagccaacagccaccaggggcagatgctggcccagtatatagagagcttcacccagggctccatcgaggcccacaagaggggctcccgcttctggatccaggacaaaggccccatcgtggagagttacatcgggttcatcgagagctaccgcgacccctttggttcccgaggagaatttgaaggtttcgtagctgtggtgaacaaggccatgagtgccaagtttgagcggctggtggcgagcgcagagcagctgctgaaggagctgccctggcccccaacctttgagaaggacaagttcctcacccctgacttcacctccctggatgttctcaccttcgctggctccggcatccctgccggcatcaacatccccaactacgatgatctgaggcagacggaaggctttaagaacgtgtcgctggggaatgtgctggctgtggcctacgccacgcagcgggagaagcttacctttctggaggaggatgacaaggacctgtacatcctctggaaggggccctccttcgatgtgcaggtgggcctgcacgagctgctgggccatggcagtggcaagctcttcgtacaggacgaaaaaggagcattcaactttgaccaggaaacagtgatcaacccagagacgggcgagcagattcagagctggtatcggagcggggagacctgggatagcaagttcagcaccatcgcctccagctacgaagagtgccgggctgagagcgtgggtctctacctctgtctccacccgcaagtgctggagatctttggctttgagggggctgatgcggaggacgtgatctacgtgaactggctcaacatggttcgggccgggctgctcgctctggagttctacacacctgaggccttcaactggcgacaggcccatatgcaggcccggtttgtgatcctgagagtcttgctggaggctggcgagggactcgttaccatcactcccaccacaggctccgatgggcgcccagatgcccgggtccgcctcgaccgcagcaagatccggtctgtgggcaagcctgctctagagcgcttcctgcggagacttcaggtgctgaagtccacaggggatgtggccggagggcgggccctgtacgaggggtatgcaacagtcactgatgcgccccccgagtgcttcctcaccctcagggacacggtgctgctgcgtaaggaatctcggaagctcattgttcagcccaacactcgccttgaaggctcagacgtgcagcttctggaatacgaggcgtcagctgctggcctcatccgatccttctctgagcgtttcccagaggatggacccgagttggaggagatcctcacacagctggccacagccgatgcccgattctggaagggccccagtgaggccccatctggccaagcttgaggaagatgtgtggccttgcccccaattccatcagaccaaggctgcaagtggccctccattcgtgtgtgtatttaggggctggggagggggaggggcaggagcttggaccttggtactacctcagctgagggtggtgacacaaccccttccatttgtcagcactttccagcctgccaattgcttcccctctgtgatctcatttcatctgcactgccatacgtggagtgagcaagacagggcttaccatcctgtctaccagatgaggaaatggcagttctgagaagtcactggtctagatc

SEQ ID NO: 126984 - DNA, 595 bp, Homo sapiens
  Payload ID: 4886
  Gene Symbol: DPP3
  Gene Name: dipeptidyl-peptidase 3
  ENST ID: ENST00000533725
  CDS Start-End: 64-595
agtttgcgaacggagcagctgctgcaggcgttcctggtctatgccgcgggtgtttactccaacatgggcaactacaagtcctttggtgacaccaagtttgttcccaacttgcccaaggaaaagctggaacgggtgatcctagggagtgaggctgctcagcagcacccagaagaagtcaggggcctctggcagacctgcggggagcttatgttctctctggagccaaggcttcgacacctcggactggggaaggagggaatcaccacctatttctctgggaattgtaccatggaagatgccaaattggcccaggactttctggactcacagaacctcagtgcctacaacacccggctcttcaaagaggtcgatggagaagggaagccctactacgaggtgcggctggcttctgtgcttggctcagagccttccctggactctgaggtgacttccaagctgaagagctatgaattccggggaagccctttccaggtgacccggggggactacgcgcccatcctccagaaggtggtggagcagctggagaaagccaaggcctatgcagccaacagccaccaggggcagatgctggccc

SEQ ID NO: 126985 - DNA, 3078 bp, Homo sapiens
  Payload ID: 4886
  Gene Symbol: DPP3
  Gene Name: dipeptidyl-peptidase 3
  ENST ID: ENST00000532677
  CDS Start-End: 402-2672
attactcctattgtgtaggttcccacctgcaagagtgctgtcgggtcctctgaggtgaaaccccaaaggaaagcgggatcgggactgggggagggggattcccaagtccctgacacccgcgccgtctcggcctgggcttggtgacctcgtcagtcccgtctgccgggactaggccgcggccaggccgggcacagcggtacccggtccggcgcgtgtgcggcctgctgacaaaaggccgagcccgcagggccaatccgcgcgccaccccgtagcgcctgggggcgggagcgggcgagccgagaagctcgtcttggcgcgtctattggctggtactgacgcccatccggaccccgaggccaggcagttggccaaggggggcggggttcgcagagccccaatgaatgggggagccggaagcaggaagtgagtttgcgaacggagcagctgctgcagggcccatggcggacacccagtacatcctgcccaatgacatcggcgtgtctagcctggactgccgtgaggccttccgcctgctgtcacccacagagcgcctctatgcctaccacctgtcccgtgccgcctggtacggaggcctggctgtgctgcttcagacctcccctgaggccccctacatctatgctctgctcagccgcctcttccgcgcccaggaccccgaccagctgcgccaacatgccctggctgaaggccttaccgaggaggagtatcaggcgttcctggtctatgccgcgggtgtttactccaacatgggcaactacaagtcctttggtgacaccaagtttgttcccaacttgcccaaggaaaagctggaacgggtgatcctagggagtgaggctgctcagcagcacccagaagaagtcaggggcctctggcagacctgcggggagcttatgttctctctggagccaaggcttcgacacctcggactggggaaggagggaatcaccacctatttctctgggaattgtaccatggaagatgccaaattggcccaggactttctggactcacagaacctcagtgcctacaacacccggctcttcaaagaggtcgatggagaagggaagccctactacgaggtgcggctggcttctgtgcttggctcagagccttccctggactctgaggtgacttccaagctgaagagctatgaattccggggaagccctttccaggtgacccggggggactacgcgcccatcctccagaaggtggtggagcagctggagaaagccaaggcctatgcagccaacagccaccaggggcagatgctggcccagtatatagagagcttcacccagggctccatcgaggcccacaagaggggctcccgcttctggatccaggacaaaggccccatcgtggagagttacatcgggttcatcgagagctaccgcgacccctttggttcccgaggagaatttgaaggtttcgtagctgtggtgaacaaggccatgagtgccaagtttgagcggctggtggcgagcgcagagcagctgctgaaggagctgccctggcccccaacctttgagaaggacaagttcctcacccctgacttcacctccctggatgttctcaccttcgctggctccggcatccctgccggcatcaacatccccaactacgatgatctgaggcagacggaaggctttaagaacgtgtcgctggggaatgtgctggctgtggcctacgccacgcagcgggagaagcttacctttctggaggaggatgacaaggacctgtacatcctctggaaggggccctccttcgatgtgcaggtgggcctgcacgagctgctgggccatggcagtggcaagctcttcgtacaggacgaaaaaggagcattcaactttgaccaggaaacagtgatcaacccagagacgggcgagcagattcagagctggtatcggagcggggagacctgggatagcaagttcagcaccatcgcctccagctacgaagagtgccgggctgagagcgtgggtctctacctctgtctccacccgcaagtgctggagatctttggctttgagggggctgatgcggaggacgtgatctacgtgaactggctcaacatggttcgggccgggctgctcgctctggagttctacacacctgaggccttcaactggcgacaggcccatatgcaggcccggtttgtgatcctgagagtcttgctggaggctggcgagggactcgttaccatcactcccaccacaggctccgatgggcgcccagatgcccgggtccgcctcgaccgcagcaagatccggtctgtgggcaagcctgctctagagcgcttcctgcggagacttcaggtgctgaagtccacaggggatgtggccggagggcgggccctgtacgaggggtatgcaacagtcactgatgcgccccccgagtgcttcctcaccctcagggacacggtgctgctgcgtaaggaatctcggaagctcattgttcagcccaacactcgccttgaaggctcagacgtgcagcttctggaatacgaggcgtcagctgctggcctcatccgatccttctctgagcgtttcccagaggatggacccgagttggaggagatcctcacacagctggccacagccgatgcccgattctggaagggccccagtgaggccccatctggccaagcttgaggaagatgtgtggccttgcccccaattccatcagaccaaggctgcaagtggccctccattcgtgtgtgtatttaggggctggggagggggaggggcaggagcttggaccttggtactacctcagctgagggtggtgacacaaccccttccatttgtcagcactttccagcctgccaattgcttcccctctgtgatctcatttcatctgcactgccatacgtggagtgagcaagacagggcttaccatcctgtctaccagatgaggaaatggcagttctgagaagtcactggtctagatcccgcaggtggcacgtgacagctagggttcaaaacgttctcaccaaatccaatgctcctcacatattaattttataaccagacaaataaatattagagacaaccacca

SEQ ID NO: 126986 - DNA, 563 bp, Homo sapiens
  Payload ID: 4886
  Gene Symbol: DPP3
  Gene Name: dipeptidyl-peptidase 3
  ENST ID: ENST00000531314
  CDS Start-End: 294-563
gagaatgccccgggttggggaatccccgggttccaacggggctgtcagaccttcagtaaattgttgccctttccaagcctcagtttccctatctgtaaaatgggctttcttctggttgtgaacttctgtggcttccctggtggagcacagggagcgagcaggagaatggagggccaaggaaaaggcatttagagggatgagaatgggacagtttcaagcaaaatcatttattgctgtggatactttccgtccagggcgacttcatctgattagcgcacccacctgcagggcccatggcggacacccagtacatcctgcccaatgacatcggcgtgtctagcctggactgccgtgaggccttccgcctgctgtcacccacagagcgcctctatgcctaccacctgtcccgtgccgcctggtacggaggcctggctgtgctgcttcagacctcccctgaggccccctacatctatgctctgctcagccgcctcttccgcgcccaggaccccgaccagctgcgccaacatgccctggctgaaggccttaccgaggaggagtatcag

SEQ ID NO: 126987 - DNA, 2251 bp, Homo sapiens
  Payload ID: 4886
  Gene Symbol: DPP3
  Gene Name: dipeptidyl-peptidase 3
  Uniprot ID: Q9NY33
  ENST ID: ENST00000530165
  CDS Start-End: 34-2157
gagtttgcgaacggagcagctgctgcagggcccatggcggacacccagtacatcctgcccaatgacatcggcgtgtctagcctggactgccgtgaggccttccgcctgctgtcacccacagagcgcctctatgcctaccacctgtcccgtgccgcctggtacggaggcctggctgtgctgcttcagacctcccctgaggccccctacatctatgctctgctcagccgcctcttccgcgcccaggaccccgaccagctgcgccaacatgccctggctgaaggccttaccgaggaggagtatcaggaaaagctggaacgggtgatcctagggagtgaggctgctcagcagcacccagaagaagtcaggggcctctggcagacctgcggggagcttatgttctctctggagccaaggcttcgacacctcggactggggaaggagggaatcaccacctatttctctgggaattgtaccatggaagatgccaaattggcccaggactttctggactcacagaacctcagtgcctacaacacccggctcttcaaagaggtcgatggagaagggaagccctactacgaggtgcggctggcttctgtgcttggctcagagccttccctggactctgaggtgacttccaagctgaagagctatgaattccggggaagccctttccaggtgacccggggggactacgcgcccatcctccagaaggtggtggagcagctggagaaagccaaggcctatgcagccaacagccaccaggggcagatgctggcccagtatatagagagcttcacccagggctccatcgaggcccacaagaggggctcccgcttctggatccaggacaaaggccccatcgtggagagttacatcgggttcatcgagagctaccgcgacccctttggttcccgaggagaatttgaaggtttcgtagctgtggtgaacaaggccatgagtgccaagtttgagcggctggtggcgagcgcagagcagctgctgaaggagctgccctggcccccaacctttgagaaggacaagttcctcacccctgacttcacctccctggatgttctcaccttcgctggctccggcatccctgccggcatcaacatccccaactacgatgatctgaggcagacggaaggctttaagaacgtgtcgctggggaatgtgctggctgtggcctacgccacgcagcgggagaagcttacctttctggaggaggatgacaaggacctgtacatcctctggaaggggccctccttcgatgtgcaggtgggcctgcacgagctgctgggccatggcagtggcaagctcttcgtacaggacgaaaaaggagcattcaactttgaccaggaaacagtgatcaacccagagacgggcgagcagattcagagctggtatcggagcggggagacctgggatagcaagttcagcaccatcgcctccagctacgaagagtgccgggctgagagcgtgggtctctacctctgtctccacccgcaagtgctggagatctttggctttgagggggctgatgcggaggacgtgatctacgtgaactggctcaacatggttcgggccgggctgctcgctctggagttctacacacctgaggccttcaactggcgacaggcccatatgcaggcccggtttgtgatcctgagagtcttgctggaggctggcgagggactcgttaccatcactcccaccacaggctccgatgggcgcccagatgcccgggtccgcctcgaccgcagcaagatccggtctgtgggcaagcctgctctagagcgcttcctgcggagacttcaggtgctgaagtccacaggggatgtggccggagggcgggccctgtacgaggggtatgcaacagtcactgatgcgccccccgagtgcttcctcaccctcagggacacggtgctgctgcgtaaggaatctcggaagctcattgttcagcccaacactcgccttgaaggctcagacgtgcagcttctggaatacgaggcgtcagctgctggcctcatccgatccttctctgagcgtttcccagaggatggacccgagttggaggagatcctcacacagctggccacagccgatgcccgattctggaagggccccagtgaggccccatctggccaagcttgaggaagatgtgtggccttgcccccaattccatcagaccaaggctgcaagtggccctccattcgtgtgtgtatttaggggctggggagggggaggg

SEQ ID NO: 126988 - DNA, 561 bp, Homo sapiens
  Payload ID: 4886
  Gene Symbol: DPP3
  Gene Name: dipeptidyl-peptidase 3
  ENST ID: ENST00000532019
  CDS Start-End: 250-561
agtgagtttgcgaacggagcagctgctgcagagcgcctctatgcctaccacctgtcccgtgccgcctggtacggaggcctggctgtgctgcttcagacctcccctgaggccccctacatctatgctctgctcagccgcctcttccgcgcccaggaccccgaccagctgcgccaacatgccctggctgaaggccttaccgaggaggagtatcaggcgttcctggtctatgccgcgggtgtttactccaacatgggcaactacaagtcctttggtgacaccaagtttgttcccaacttgcccaaggaaaagctggaacgggtgatcctagggagtgaggctgctcagcagcacccagaagaagtcaggggcctctggcagacctgcggggagcttatgttctctctggagccaaggcttcgacacctcggactggggaaggagggaatcaccacctatttctctgggaattgtaccatggaagatgccaaattggcccaggactttctggactcacagaacctcagtgcctacaacacccggctcttcaaagaggtcgatgga

SEQ ID NO: 126989 - DNA, 2676 bp, Homo sapiens
  Payload ID: 4886
  Gene Symbol: DPP3
  Gene Name: dipeptidyl-peptidase 3
  Uniprot ID: Q9NY33
  ENST ID: ENST00000541961
  CDS Start-End: 57-2270
aggaagtgagtttgcgaacggagcagctgctgcagtgatggttctcagcagggcccatggcggacacccagtacatcctgcccaatgacatcggcgtgtctagcctggactgccgtgaggccttccgcctgctgtcacccacagagcgcctctatgcctaccacctgtcccgtgccgcctggtacggaggcctggctgtgctgcttcagacctcccctgaggccccctacatctatgctctgctcagccgcctcttccgcgcccaggaccccgaccagctgcgccaacatgccctggctgaaggccttaccgaggaggagtatcaggcgttcctggtctatgccgcgggtgtttactccaacatgggcaactacaagtcctttggtgacaccaagtttgttcccaacttgcccaaggaaaagctggaacgggtgatcctagggagtgaggctgctcagcagcacccagaagaagtcaggggcctctggcagacctgcggggagcttatgttctctctggagccaaggcttcgacacctcggactggggaaggagggaatcaccacctatttctctgggaattgtaccatggaagatgccaaattggcccaggactttctggactcacagaacctcagtgcctacaacacccggctcttcaaagaggtcgatggagaagggaagccctactacgaggtgcggctggcttctgtgcttggctcagagccttccctggactctgaggtgacttccaagctgaagagctatgaattccggggaagccctttccaggtgacccggggggactacgcgcccatcctccagaaggtggtggagcagctggagaaagccaaggcctatgcagccaacagccaccaggggcagatgctggcccagtatatagagagcttcacccagggctccatcgaggcccacaagaggggctcccgcttctggatccaggacaaaggccccatcgtggagagttacatcgggttcatcgagagctaccgcgacccctttggttcccgaggagaatttgaaggtttcgtagctgtggtgaacaaggccatgagtgccaagtttgagcggctggtggcgagcgcagagcagctgctgaaggagctgccctggcccccaacctttgagaaggacaagttcctcacccctgacttcacctccctggatgttctcaccttcgctggctccggcatccctgccggcatcaacatccccaactacgatgatctgaggcagacggaaggctttaagaacgtgtcgctggggaatgtgctggctgtggcctacgccacgcagcgggagaagcttacctttctggaggaggatgacaaggacctgtacatcctctggaaggggccctccttcgatgtgcaggtgggcctgcacgagctgctgggccatggcagtggcaagctcttcgtacaggacgaaaaaggagcattcaactttgaccaggaaacagtgatcaacccagagacgggcgagcagattcagagctggtatcggagcggggagacctgggatagcaagttcagcaccatcgcctccagctacgaagagtgccgggctgagagcgtgggtctctacctctgtctccacccgcaagtgctggagatctttggctttgagggggctgatgcggaggacgtgatctacgtgaactggctcaacatggttcgggccgggctgctcgctctggagttctacacacctgaggccttcaactggcgacaggcccatatgcaggcccggtttgtgatcctgagagtcttgctggaggctggcgagggactcgttaccatcactcccaccacaggctccgatgggcgcccagatgcccgggtccgcctcgaccgcagcaagatccggtctgtgggcaagcctgctctagagcgcttcctgcggagacttcaggtgctgaagtccacaggggatgtggccggagggcgggccctgtacgaggggtatgcaacagtcactgatgcgccccccgagtgcttcctcaccctcagggacacggtgctgctgcgtaaggaatctcggaagctcattgttcagcccaacactcgccttgaaggctcagacgtgcagcttctggaatacgaggcgtcagctgctggcctcatccgatccttctctgagcgtttcccagaggatggacccgagttggaggagatcctcacacagctggccacagccgatgcccgattctggaagggccccagtgaggccccatctggccaagcttgaggaagatgtgtggccttgcccccaattccatcagaccaaggctgcaagtggccctccattcgtgtgtgtatttaggggctggggagggggaggggcaggagcttggaccttggtactacctcagctgagggtggtgacacaaccccttccatttgtcagcactttccagcctgccaattgcttcccctctgtgatctcatttcatctgcactgccatacgtggagtgagcaagacagggcttaccatcctgtctaccagatgaggaaatggcagttctgagaagtcactggtctagatcccgcaggtggcacgtgacagctagggttcaaaacgttctcaccaaatccaatgctcctcacatattaattttataaccagacaaataaatattagagacaaccacca

SEQ ID NO: 126990 - DNA, 3904 bp, Homo sapiens
  Payload ID: 4887
  Gene Symbol: DPP4
  Gene Name: dipeptidyl-peptidase 4
  Uniprot ID: P27487
  ENST ID: ENST00000360534
  CDS Start-End: 562-2862
ctttcactggcaagagacggagtcctgggtttcagttccagttgcctgcggtgggctgtgtgagtttgccaaagtcccctgccctctctgggtctcggttccctcgcctgtccacgtgaggttggaggagctgaacgccgacgtcatttttagctaagagggagcagggtccccgagtcgccggcccagggtctgcgcatccgaggccgcgcgccctttcccctcccccacggctcctccgggccccgcactctgcgccccggctgccgcccagcgccctacaccgccctcagggggccctcgcgggctccccccggccgggatgccagtgccccgcgccacgcgcgcctgctcccgcgccgcctgccctgcagcctgcccgcggcgcctttatacccagcgggctcggcgctcactaatgtttaactcggggccgaaacttgccagcggcgagtgactccaccgcccggagcagcggtgcaggacgcgcgtctccgccgcccgcggtgacttctgcctgcgctccttctctgaacgctcacttccgaggagacgccgacgatgaagacaccgtggaaggttcttctgggactgctgggtgctgctgcgcttgtcaccatcatcaccgtgcccgtggttctgctgaacaaaggcacagatgatgctacagctgacagtcgcaaaacttacactctaactgattacttaaaaaatacttatagactgaagttatactccttaagatggatttcagatcatgaatatctctacaaacaagaaaataatatcttggtattcaatgctgaatatggaaacagctcagttttcttggagaacagtacatttgatgagtttggacattctatcaatgattattcaatatctcctgatgggcagtttattctcttagaatacaactacgtgaagcaatggaggcattcctacacagcttcatatgacatttatgatttaaataaaaggcagctgattacagaagagaggattccaaacaacacacagtgggtcacatggtcaccagtgggtcataaattggcatatgtttggaacaatgacatttatgttaaaattgaaccaaatttaccaagttacagaatcacatggacggggaaagaagatataatatataatggaataactgactgggtttatgaagaggaagtcttcagtgcctactctgctctgtggtggtctccaaacggcacttttttagcatatgcccaatttaacgacacagaagtcccacttattgaatactccttctactctgatgagtcactgcagtacccaaagactgtacgggttccatatccaaaggcaggagctgtgaatccaactgtaaagttctttgttgtaaatacagactctctcagctcagtcaccaatgcaacttccatacaaatcactgctcctgcttctatgttgataggggatcactacttgtgtgatgtgacatgggcaacacaagaaagaatttctttgcagtggctcaggaggattcagaactattcggtcatggatatttgtgactatgatgaatccagtggaagatggaactgcttagtggcacggcaacacattgaaatgagtactactggctgggttggaagatttaggccttcagaacctcattttacccttgatggtaatagcttctacaagatcatcagcaatgaagaaggttacagacacatttgctatttccaaatagataaaaaagactgcacatttattacaaaaggcacctgggaagtcatcgggatagaagctctaaccagtgattatctatactacattagtaatgaatataaaggaatgccaggaggaaggaatctttataaaatccaacttagtgactatacaaaagtgacatgcctcagttgtgagctgaatccggaaaggtgtcagtactattctgtgtcattcagtaaagaggcgaagtattatcagctgagatgttccggtcctggtctgcccctctatactctacacagcagcgtgaatgataaagggctgagagtcctggaagacaattcagctttggataaaatgctgcagaatgtccagatgccctccaaaaaactggacttcattattttgaatgaaacaaaattttggtatcagatgatcttgcctcctcattttgataaatccaagaaatatcctctactattagatgtgtatgcaggcccatgtagtcaaaaagcagacactgtcttcagactgaactgggccacttaccttgcaagcacagaaaacattatagtagctagctttgatggcagaggaagtggttaccaaggagataagatcatgcatgcaatcaacagaagactgggaacatttgaagttgaagatcaaattgaagcagccagacaattttcaaaaatgggatttgtggacaacaaacgaattgcaatttggggctggtcatatggagggtacgtaacctcaatggtcctgggatcgggaagtggcgtgttcaagtgtggaatagccgtggcgcctgtatcccggtgggagtactatgactcagtgtacacagaacgttacatgggtctcccaactccagaagacaaccttgaccattacagaaattcaacagtcatgagcagagctgaaaattttaaacaagttgagtacctccttattcatggaacagcagatgataacgttcactttcagcagtcagctcagatctccaaagccctggtcgatgttggagtggatttccaggcaatgtggtatactgatgaagaccatggaatagctagcagcacagcacaccaacatatatatacccacatgagccacttcataaaacaatgtttctctttaccttagcacctcaaaataccatgccatttaaagcttattaaaactcatttttgttttcattatctcaaaactgcactgtcaagatgatgatgatctttaaaatacacactcaaatcaagaaacttaaggttacctttgttcccaaatttcatacctatcatcttaagtagggacttctgtcttcacaacagattattaccttacagaagtttgaattatccggtcgggttttattgtttaaaatcatttctgcatcagctgctgaaacaacaaataggaattgtttttatggaggctttgcatagattccctgagcaggattttaatctttttctaactggactggttcaaatgttgttctcttctttaaagggatggcaagatgtgggcagtgatgtcactagggcagggacaggataagagggattagggagagaagatagcagggcatggctgggaacccaagtccaagcataccaacacgagcaggctactgtcagctcccctcggagaagagctgttcacagccagactggcacagttttctgagaaagactattcaaacagtctcaggaaatcaaatatgcaaagcactgacttctaagtaaaaccacagcagttgaaaagactccaaagaaatgtaagggaaactgccagcaacgcaggcccccaggtgccagttatggctataggtgctacaaaaacacagcaagggtgatgggaaagcattgtaaatgtgcttttaaaaaaaaatactgatgttcctagtgaaagaggcagcttgaaactgagatgtgaacacatcagcttgccctgttaaaagatgaaaatatttgtatcacaaatcttaacttgaaggagtccttgcatcaatttttcttatttcatttctttgagtgtcttaattaaaagaatattttaacttccttggactcattttaaaaaatggaacataaaatacaatgttatgtattattattcccattctacatactatggaatttctcccagtcatttaataaatgtgccttcattttttcagaagtaa

SEQ ID NO: 126991 - DNA, 527 bp, Homo sapiens
  Payload ID: 4887
  Gene Symbol: DPP4
  Gene Name: dipeptidyl-peptidase 4
  ENST ID: ENST00000416189
  CDS Start-End: 1-260
atgatgctacagctgacagtcgcaaaacttacactctaactgattacttaaaaaatacttatagactgaagttatactccttaagatggatttcagatcatgaatatctctacaaacaagaaaataatatcttggtattcaatgctgaatatggaaacagctcagttttcttggagaacagtacatttcatatggcaaagtggatctttctctccttcttgaaatgctccctgccttggctactttttagtctcctttgacgattcctcttcctctgcccatatttttaaatgatgagtttggacattctatcaatgattattcaatatctcctgatgggcagtttattctcttagaatacaactacgtgaaggcagctgattacagaagagaggattccaaacaacacacagtgggtcacatggtcaccagtgggtcataaattggcatatgtttggaacaatgacatttatgttaaaattgaaccaaatttaccaagttacagaatcacatggacggggaaagaa

SEQ ID NO: 126992 - DNA, 2674 bp, Homo sapiens
  Payload ID: 4887
  Gene Symbol: DPP4
  Gene Name: dipeptidyl-peptidase 4
  ENST ID: ENST00000434918
  CDS Start-End: 142-654
gtttaactcggggccgaaacttgccagcggcgagtgactccaccgcccggagcagcggtgcaggacgcgcgtctccgccgcccgcggtgacttctgcctgcgctccttctctgaacgctcacttccgaggagacgccgacgatgaagacaccgtggaaggttcttctgggactgctgggtgctgctgcgcttgtcaccatcatcaccgtgcccgtggttctgctgaacaaaggcaatgatgctacagctgacagtcgcaaaacttacactctaactgattacttaaaaaatacttatagactgaagttatactccttaagatggatttcagatcatgaatatctctacaaacaagaaaataatatcttggtattcaatgctgaatatggaaacagctcagttttcttggagaacagtacatttgatgagtttggacattctatcaatgattattcaatatctcctgatgggcagtttattctcttagaatacaactacgtgaagcaatggaggcattcctacacagcttcatatgacatttatgatttaaataaaaggcagctgattacagaagagaggattccaaacaacacacagtgggtcacatggtcaccagtgggtcataaattggttagcatatgtttggaacaatgacatttatgttaaaattgaaccaaatttaccaagttacagaatcacatggacggggaaagaagatataatatataatggaataactgactgggtttatgaagaggaagtcttcagtgcctactctgctctgtggtggtctccaaacggcacttttttagcatatgcccaatttaacgacacagaagtcccacttattgaatactccttctactctgatgagtcactgcagtacccaaagactgtacgggttccatatccaaaggcaggagctgtgaatccaactgtaaagttctttgttgtaaatacagactctctcagctcagtcaccaatgcaacttccatacaaatcactgctcctgcttctatgttgataggataagaaaatgaggcctacagattaagaaaatgaccaagtacgaatctatattcaaacctgactttctggcttgaacgaacaagctattagatactgcttcgtgtctccctctgtgtgattacagctggtgccctcagattcctgaaggcaccatcacagcagtacggaagcatccattttctctggagttgcattaagtacatcaggaaggctgtgggctgtgctccgtgggatcactacttgtgtgatgtgacatgggcaacacaagaaagaatttctttgcagtggctcaggaggattcagaactattcggtcatggatatttgtgactatgatgaatccagtggaagatggaactgcttagtggcacggcaacacattgaaatgagtactactggctgggttggaagatttaggccttcagaacctcattttacccttgatggtaatagcttctacaagatcatcagcaatgaagaaggttacagacacatttgctatttccaaatagataaaaaagactgcacatttattacaaaaggcacctgggaagtcatcgggatagaagctctaaccagtgattatctatactacattagtaatgaatataaaggaatgccaggaggaaggaatctttataaaatccaacttagtgactatacaaaagtgacatgcctcagttgtgagctgaatccggaaaggtgtcagtactattctgtgtcattcagtaaagaggcgaagtattatcagctgagatgttccggtcctggtctgcccctctatactctacacagcagcgtgaatgataaagggctgagagtcctggaagacaattcagctttggataaaatgctgcagaatgtccagatgccctccaaaaaactggacttcattattttgaatgaaacaaaattttggtatcagatgatcttgcctcctcattttgataaatccaagaaatatcctctactattagatgtgtatgcaggcccatgtagtcaaaaagcagacactgtcttcagactgaactgggccacttaccttgcaagcacagaaaacattatagtagctagctttgatggcagaggaagtggttaccaaggagataagatcatgcatgcaatcaacagaagactgggaacatttgaagttgaagatcaaattgaagcagccagacaattttcaaaaatgggatttgtggacaacaaacgaattgcaatttggggctggtcatatggagggtacgtaacctcaatggtcctgggatcgggaagtggcgtgttcaagtgtggaatagccgtggcgcctgtatcccggtgggagtactatgactcagtgtacacagaacgttacatgggtctcccaactccagaagacaaccttgaccattacagaaattcaacagtcatgagcagagctgaaaattttaaacaagttgagtacctccttattcatggaacagcagatgataacgttcactttcagcagtcagctcagatctccaaagccctggtcgatgttggagtggatttccaggcaatgtggtatactgatgaagaccatggaatagctagcagcacagcacaccaacatatatatacccacatgagccacttcataaaacaatgtttctctttaccttag

SEQ ID NO: 126993 - DNA, 578 bp, Homo sapiens
  Payload ID: 4887
  Gene Symbol: DPP4
  Gene Name: dipeptidyl-peptidase 4
  ENST ID: ENST00000413651
  CDS Start-End: 22-378
acttccgaggagacgccgacgatgaagacaccgtggaaggttcttctgggactgctgggtgctgctgcgcttgtcaccatcatcaccgtgcccgtggttctgctgaacaaaggcacagatgatgctacagctgacagtcgcaaaacttacactctaactgattacttaaaaaatacttatagactgaagttatactccttaagatggatttcagatcatgaatatctctacaaacaagaaaataatatcttggtattcaatgctgaatatggaaacagctcagttttcttggagaacagtacatttcatatggcaaagtggatctttctctccttcttgaaatgctccctgccttggctactttttagtctcctttgacgattcctcttcctctgcccatatttttaaatgatgagtttggacattctatcaatgattattcaatatctcctgatgggcagtttattctcttagaatacaactacgtgaagcaatggaggcattcctacacagcttcatatgacatttatgatttaaataaaaggcagctgattacagaagagaggattccaaacaac

SEQ ID NO: 126994 - DNA, 433 bp, Homo sapiens
  Payload ID: 4887
  Gene Symbol: DPP4
  Gene Name: dipeptidyl-peptidase 4
  ENST ID: ENST00000628861
  CDS Start-End: 77-433
cgcgcgtctccgccgcccgcggtgacttctgcctgcgctccttctctgaacgctcacttccgaggagacgccgacgatgaagacaccgtggaaggttcttctgggactgctgggtgctgctgcgcttgtcaccatcatcaccgtgcccgtggttctgctgaacaaaggcacagatgatgctacagctgacagtcgcaaaacttacactctaactgattacttaaaaaatacttatagactgaagttatactccttaagatggatttcagatcatgaatatctctacaaacaagaaaataatatcttggtattcaatgctgaatatggaaacagctcagttttcttggagaacagtacatttcatatggcaaagtggatctttctctccttcttgaaatgctccctgccttggctactttttagtctcctttga

SEQ ID NO: 126995 - DNA, 3768 bp, Homo sapiens
  Payload ID: 4888
  Gene Symbol: DPP6
  Gene Name: dipeptidyl-peptidase 6
  Uniprot ID: P42658
  ENST ID: ENST00000332007
  CDS Start-End: 386-2797
tgcgccgtgggcgccgggccgggaggcgggcgaggaggcagcgcgcatcactcgggtccccttcctgcacccagccgccacttgccggttgctaagcagttatcattgtttctgtggcgattgcagaggctgttgctaattggagaagccccactaagcagcggcagcttcctgcttcggatcctctctctgctgcttgcatttaaagagcaaactcgtcttgtctacccaccctccctcccccatcctccccaaaatagccttgtgatttcggaagtatggactaaaatcacactcctccttaccttaccgcttggactctggtggctcccaactcgccgtcagaccccacctgccccggtggtgggaagcgcctggacagaccatgaccacagccaaggagccaagcgcttcggggaaatccgtgcagcagcaggaacaggagctggtggggagtaaccctccgcagaggaattggaaaggaatagcaattgcactgcttgtcattctggtcatctgctccttgatcgtcacctcggtcatacttctgacaccagcggaagataatagtctgtctcaaaagaagaaggtcactgtagaagatctcttcagtgaagacttcaaaattcatgaccccgaggctaagtggataagtgatacagaattcatctacagagaacagaaaggaacagtgagactgtggaatgttgaaacaaatacttctactgtcttaatagaaggcaaaaaaattgaatcattaagagccatcagatatgaaatatctccagatagagagtatgcacttttttcatacaatgtggaacccatatatcaacactcgtatactggatattacgtcctgagcaaaattcctcatggggatcctcaaagtctggacccaccagaagtcagcaatgcaaaacttcagtatgcaggatggggccctaaaggccaacagctgatatttatttttgaaaacaatatctactactgtgcacatgtcgggaaacaggccatccgtgtggtctccactggcaaggaaggtgtgatttacaatggcctcagtgactggctgtatgaagaggagattttgaagacacacatcgcacactggtggtctccggatggcacgagactcgcctacgccgccatcaatgattcccgtgtccccatcatggagctcccaacttacaccggctccatctaccccaccgtgaagccctaccactatcccaaggctggaagtgagaaccccagcatttccctacacgttattggcttaaatggacccacccatgatctggagatgatgccgcctgatgatccacggatgagggagtactacatcaccatggtgaagtgggccaccagcaccaaggtcgccgtgacctggctgaaccgggcgcagaacgtgtccatcctcaccctctgcgacgccaccacgggggtctgcacgaagaaacacgaggatgaaagtgaggcctggctccacagacagaatgaagaacctgtgttctccaaggatggccgaaagtttttcttcatcagagccatcccccagggaggacgagggaaattctatcacatcacggtgtcctcgtcccagcccaacagcagcaacgacaacatccagtccatcacctccggggactgggacgtgaccaagatcctagcctacgatgagaaggggaataagatctacttcctgagcacggaggacctgcctcggagacgacaactctacagtgccaacacggtgggcaacttcaacaggcagtgcctctcctgtgacctggttgagaactgcacctacttcagcgcttccttcagccatagcatggacttcttcctgctcaagtgcgaaggtcctggtgttcctatggtgacggtgcacaacacaacagataagaaaaaaatgtttgacctagaaacaaatgaacatgtcaagaaggccataaatgaccgacagatgcctaaagtggaatacagggacattgagattgatgattacaacctgcccatgcagatactgaagccagcaaccttcaccgacaccacccactaccctctgctcctggtggtggatggcaccccaggcagccagagtgtggctgagaagttcgaggtgagctgggagacggtgatggtgagcagccacggcgcggtggtggtaaagtgtgacggccgtggcagcggcttccaagggaccaagctcctgcacgaagtgaggcggcggctgggcttgctggaggagaaggaccagatggaggccgtgcggacgatgctgaaggagcagtacattgacaggacgcgcgtggccgtgtttgggaaggattacggtggctacctgagcacctacatcctcccagcaaagggagaaaatcaaggccagacattcacctgcggctctgctctctctccaataacagacttcaaactctatgcctctgcgttttccgagaggtacttgggcctccatggacttgacaacagagcatacgagatgaccaaggtagcccatcgagtctccgcgctggaagaacagcagttcctgatcattcatcccactgccgatgaaaaaattcatttccagcacacagcagaactcattacacaactaattaggggaaaggctaattacagcttacagatttacccggacgaaagccattactttaccagctccagcctcaaacagcatctgtaccggtccatcatcaacttcttcgtggaatgcttcaggatccaggacaaactgctgacagtcacagcgaaagaggacgaggaggaggactaagctcaggtcgctctaagcacaaacgtggctctttctacaaccagatgcaaccgagggatttccctgccctccctcttccctcggaggggcggggcggggcggggccgggtgttccatagcatgtgtgtctcggatgcggaaggcagttttgcttgggaaacaagctccttccccggggtcatcactcacggcctccatggcaccagggacaacgctgtccccgcagcagcgcctcctcccggcgcccgagagaccggcacgccacggcccctcccccaaggaacagagcaaaggatggtggccgcaggccccacgcgagcccacaggacaccggcccctagattccagccaccaagcggaagcatgagacccgcccacactagcctctgtgttcccgttagggacatcacaccctgtctcacgtcgcagtgccatggacgcagcagttacagcaccattgttttagcagtgcgtgttcatatatgggcttgctacttcctgtaatgaggacgttcaacatggtgaggggctacaagaaaacgcttttctgtacagagtcttactgtagctacgctaatggttaacctgatagaattaactcgtatttttctatggttttaacctgatgctccactgtctccgtcatggggttgttttgctgtttggggttgggccttgtttccctttcctttctccagtccacgtgtagactttgcgcttgatgaagaagcagatcggaagtaactgctccctcctcaaggttgtcttcagacgtcttggggacgttcctaaacactgagggggaagacagccaatagcacccattaaaagaaatacctaaataaaacctctctcccactcagctatgctagggcttggctgtaggtgtgcactgtctatttacatccgtccttacaaccatccttgtcctccttggtaccgtatcaagctctttcccatgacatttggtt

SEQ ID NO: 126996 - DNA, 3710 bp, Homo sapiens
  Payload ID: 4888
  Gene Symbol: DPP6
  Gene Name: dipeptidyl-peptidase 6
  Uniprot ID: P42658
  ENST ID: ENST00000377770
  CDS Start-End: 142-2739
gcttgccttgctgctgctgctgctgctgcctccccaccgcctttttttttttttaatctggagcggggtggggagtgggaaccggagagaaagcaaaatattaaaaagccccaaagacagccagcaggagcgcggtgcccgatggcttcgctgtaccagaggttcactggcaagatcaacacctcgaggtccttccccgcgcccccggaggcgagtcacctcctgggcggccaggggcccgaggaggacggcggcgcaggagccaagcccctcggcccgcgggcgcaggcggcggcgccccgggagcgcggcggcggcggcggcggcgcgggtggccggccccggttccagtaccaggcgcggagcgatggtgacgaggaggacgagctggtggggagtaaccctccgcagaggaattggaaaggaatagcaattgcactgcttgtcattctggtcatctgctccttgatcgtcacctcggtcatacttctgacaccagcggaagataatagtctgtctcaaaagaagaaggtcactgtagaagatctcttcagtgaagacttcaaaattcatgaccccgaggctaagtggataagtgatacagaattcatctacagagaacagaaaggaacagtgagactgtggaatgttgaaacaaatacttctactgtcttaatagaaggcaaaaaaattgaatcattaagagccatcagatatgaaatatctccagatagagagtatgcacttttttcatacaatgtggaacccatatatcaacactcgtatactggatattacgtcctgagcaaaattcctcatggggatcctcaaagtctggacccaccagaagtcagcaatgcaaaacttcagtatgcaggatggggccctaaaggccaacagctgatatttatttttgaaaacaatatctactactgtgcacatgtcgggaaacaggccatccgtgtggtctccactggcaaggaaggtgtgatttacaatggcctcagtgactggctgtatgaagaggagattttgaagacacacatcgcacactggtggtctccggatggcacgagactcgcctacgccgccatcaatgattcccgtgtccccatcatggagctcccaacttacaccggctccatctaccccaccgtgaagccctaccactatcccaaggctggaagtgagaaccccagcatttccctacacgttattggcttaaatggacccacccatgatctggagatgatgccgcctgatgatccacggatgagggagtactacatcaccatggtgaagtgggccaccagcaccaaggtcgccgtgacctggctgaaccgggcgcagaacgtgtccatcctcaccctctgcgacgccaccacgggggtctgcacgaagaaacacgaggatgaaagtgaggcctggctccacagacagaatgaagaacctgtgttctccaaggatggccgaaagtttttcttcatcagagccatcccccagggaggacgagggaaattctatcacatcacggtgtcctcgtcccagcccaacagcagcaacgacaacatccagtccatcacctccggggactgggacgtgaccaagatcctagcctacgatgagaaggggaataagatctacttcctgagcacggaggacctgcctcggagacgacaactctacagtgccaacacggtgggcaacttcaacaggcagtgcctctcctgtgacctggttgagaactgcacctacttcagcgcttccttcagccatagcatggacttcttcctgctcaagtgcgaaggtcctggtgttcctatggtgacggtgcacaacacaacagataagaaaaaaatgtttgacctagaaacaaatgaacatgtcaagaaggccataaatgaccgacagatgcctaaagtggaatacagggacattgagattgatgattacaacctgcccatgcagatactgaagccagcaaccttcaccgacaccacccactaccctctgctcctggtggtggatggcaccccaggcagccagagtgtggctgagaagttcgaggtgagctgggagacggtgatggtgagcagccacggcgcggtggtggtaaagtgtgacggccgtggcagcggcttccaagggaccaagctcctgcacgaagtgaggcggcggctgggcttgctggaggagaaggaccagatggaggccgtgcggacgatgctgaaggagcagtacattgacaggacgcgcgtggccgtgtttgggaaggattacggtggctacctgagcacctacatcctcccagcaaagggagaaaatcaaggccagacattcacctgcggctctgctctctctccaataacagacttcaaactctatgcctctgcgttttccgagaggtacttgggcctccatggacttgacaacagagcatacgagatgaccaaggtagcccatcgagtctccgcgctggaagaacagcagttcctgatcattcatcccactgccgatgaaaaaattcatttccagcacacagcagaactcattacacaactaattaggggaaaggctaattacagcttacagatttacccggacgaaagccattactttaccagctccagcctcaaacagcatctgtaccggtccatcatcaacttcttcgtggaatgcttcaggatccaggacaaactgctgacagtcacagcgaaagaggacgaggaggaggactaagctcaggtcgctctaagcacaaacgtggctctttctacaaccagatgcaaccgagggatttccctgccctccctcttccctcggaggggcggggcggggcggggccgggtgttccatagcatgtgtgtctcggatgcggaaggcagttttgcttgggaaacaagctccttccccggggtcatcactcacggcctccatggcaccagggacaacgctgtccccgcagcagcgcctcctcccggcgcccgagagaccggcacgccacggcccctcccccaaggaacagagcaaaggatggtggccgcaggccccacgcgagcccacaggacaccggcccctagattccagccaccaagcggaagcatgagacccgcccacactagcctctgtgttcccgttagggacatcacaccctgtctcacgtcgcagtgccatggacgcagcagttacagcaccattgttttagcagtgcgtgttcatatatgggcttgctacttcctgtaatgaggacgttcaacatggtgaggggctacaagaaaacgcttttctgtacagagtcttactgtagctacgctaatggttaacctgatagaattaactcgtatttttctatggttttaacctgatgctccactgtctccgtcatggggttgttttgctgtttggggttgggccttgtttccctttcctttctccagtccacgtgtagactttgcgcttgatgaagaagcagatcggaagtaactgctccctcctcaaggttgtcttcagacgtcttggggacgttcctaaacactgagggggaagacagccaatagcacccattaaaagaaatacctaaataaaacctctctcccactcagctatgctagggcttggctgtaggtgtgcactgtctatttacatccgtccttacaaccatccttgtcctccttggtaccgtatcaagctctttcccatgacatttggtt

SEQ ID NO: 126997 - DNA, 2012 bp, Homo sapiens
  Payload ID: 4888
  Gene Symbol: DPP6
  Gene Name: dipeptidyl-peptidase 6
  ENST ID: ENST00000406326
  CDS Start-End: 404-1465
ggtggtgccaaattctggggcctaggcatttccctcgctttatgtttttggttttttttcttccttcaatctctttgattaggccgtacgtggctgtggcaaggagttggggaaaaaaattataaaaacaggaaagagagaaagcacagccagagccccggcttcgcgagccgccggggagggggcggaggaggctgagccaggcagagtcgccagcggagactcgcgagtggcgcgcgggaggagcggccgccggcgctgggcttgccttgctgctgctgctgctgctgcctccccaccgcctttttttttttttaatctggagcggggtggggagtgggaaccggagagaaagcaaaatattaaaaagccccaaagacagccagcaggagcgcggtgcccgatggcttcgctgtaccagaggttcactggcaagatcaacacctcgaggtccttccccgcgcccccggaggcgagtcacctcctgggcggccaggggcccgaggaggacggcggcgcaggagccaagcccctcggcccgcgggcgcaggcggcggcgccccgggagcgcggcggcggcggcggcggcgcgggtggccggccccggttccagtaccaggcgcggagcgatggtgacgaggaggacgagctggtggggagtaaccctccgcagaggaattggaaaggaatagcaattgcactgcttgtcattctggtcatctgctccttgatcgtcacctcggtcatacttctgacaccagcggaagataatagtctgtctcaaaagaagaaggtcactgtagaagatctcttcagtgaagacttcaaaattcatgaccccgaggctaagtggataagtgatacagaattcatctacagagaacagaaaggaacagtgagactgtggaatgttgaaacaaatacttctactgtcttaatagaaggcaaaaaaattgaatcattaagagccatcagatatgaaatatctccagatagagagtatgcacttttttcatacaatgtggaacccatgaagaaagtgaagtccaggaagttgacattgcctcattcaaaatcatgtgactcattagcagtaagtcaagcctgtagcccagcttgtcaccagggctgttttcttcattacatcaccatgtctcttcctcttcactgcctgcgtgactatgtctcggcagtcaatggatacagcacagcattgccagcttgccatgtacaagggggacctgtttcagatattccatggagaccctggctggaggattgcaggagagtcccaggaggcaggactgccaatggcaccaggcttcgcagccatgcacctgcagccctcaggcagcactgtccattgtcatacgagtgtggcaggtgtgaggcatcgcatctgctcaccccggggataatgcacagcagctacaggcagatttcgggccagagagcaaccgagtgagccttgcagcctctgctgccagcacaggcttgttccttcaacactggtggagagagacacgctgtcatcaggcccaagaaatactgccttccccatcctatccctggtcactgggtgcccgcagagtgtcccagaggagggagggagggaccctccactggttcaaatggcctgttctcagagatgcagcaatggaccctcgtgaatactgaactgataatcatgggaaggagactggctctcctggattccctcatgattcctctgagtgacaatgtgatgttggccgactgtgtcttcttcagaatatcatatacacttgaggtctccaggagcctccaattacattattttcctggctcatacagtgacaagtaattcttatcctggattcctcgttactgagacttttcttgccttttttgttagcttatgatttattctaggacttcctccaacaggttatacttaactgtctacctcagtctctggaagttttaaaaatgttcagctaaataaaagaagtagattctccctggaaaccaaa

SEQ ID NO: 126998 - DNA, 4798 bp, Homo sapiens
  Payload ID: 4888
  Gene Symbol: DPP6
  Gene Name: dipeptidyl-peptidase 6
  ENST ID: ENST00000404039
  CDS Start-End: 588-2993
agttcagacagaaaacctggcgcgcgcgcgcgcacacacacacgcctcccctggcgtcgccgcccggccgggtccctgcccttagggaccagagcggcgaccgctgcaccccgcaccgcctgctggaggagcccccggagccggggccgagccgccggcgtccccgagtgcgccccctgtgcgtgccgccgcgctgttgctcgcagtgtgctggcgccgagctcggtggacacgcgcgcagtcagagctgcctctcgccctcgctagctgggctcgcagcctcttcctccctccctggctcctggctttttgtttaaagcaacacccaccctccatccaggctttttttctttctttctttattggtagcggccaaaaagagttgattgctattgggatccgctgagtaaagacacgggcaggggtgcgcggaggtgagaaaactgaagacctggaagatttttttttccttcaaaaacccgtttccatccagtcttcagccagtccagtctactttaatcctcaccaggacaatggattaagtttctcttccctggaccagaagtcgggttcggacttggggcaaaatgaaggaaaaggccatgatcaagaccgctaagatgcaggggaacgtgatggagctggtggggagtaaccctccgcagaggaattggaaaggaatagcaattgcactgcttgtcattctggtcatctgctccttgatcgtcacctcggtcatacttctgacaccagcggaagataatagtctgtctcaaaagaagaaggtcactgtagaagatctcttcagtgaagacttcaaaattcatgaccccgaggctaagtggataagtgatacagaattcatctacagagaacagaaaggaacagtgagactgtggaatgttgaaacaaatacttctactgtcttaatagaaggcaaaaaaattgaatcattaagagccatcagatatgaaatatctccagatagagagtatgcacttttttcatacaatgtggaacccatatatcaacactcgtatactggatattacgtcctgagcaaaattcctcatggggatcctcaaagtctggacccaccagaagtcagcaatgcaaaacttcagtatgcaggatggggccctaaaggccaacagctgatatttatttttgaaaacaatatctactactgtgcacatgtcgggaaacaggccatccgtgtggtctccactggcaaggaaggtgtgatttacaatggcctcagtgactggctgtatgaagaggagattttgaagacacacatcgcacactggtggtctccggatggcacgagactcgcctacgccgccatcaatgattcccgtgtccccatcatggagctcccaacttacaccggctccatctaccccaccgtgaagccctaccactatcccaaggctggaagtgagaaccccagcatttccctacacgttattggcttaaatggacccacccatgatctggagatgatgccgcctgatgatccacggatgagggagtactacatcaccatggtgaagtgggccaccagcaccaaggtcgccgtgacctggctgaaccgggcgcagaacgtgtccatcctcaccctctgcgacgccaccacgggggtctgcacgaagaaacacgaggatgaaagtgaggcctggctccacagacagaatgaagaacctgtgttctccaaggatggccgaaagtttttcttcatcagagccatcccccagggaggacgagggaaattctatcacatcacggtgtcctcgtcccagcccaacagcagcaacgacaacatccagtccatcacctccggggactgggacgtgaccaagatcctagcctacgatgagaaggggaataagatctacttcctgagcacggaggacctgcctcggagacgacaactctacagtgccaacacggtgggcaacttcaacaggcagtgcctctcctgtgacctggttgagaactgcacctacttcagcgcttccttcagccatagcatggacttcttcctgctcaagtgcgaaggtcctggtgttcctatggtgacggtgcacaacacaacagataagaaaaaaatgtttgacctagaaacaaatgaacatgtcaagaaggccataaatgaccgacagatgcctaaagtggaatacagggacattgagattgatgattacaacctgcccatgcagatactgaagccagcaaccttcaccgacaccacccactaccctctgctcctggtggtggatggcaccccaggcagccagagtgtggctgagaagttcgaggtgagctgggagacggtgatggtgagcagccacggcgcggtggtggtaaagtgtgacggccgtggcagcggcttccaagggaccaagctcctgcacgaagtgaggcggcggctgggcttgctggaggagaaggaccagatggaggccgtgcggacgatgctgaaggagcagtacattgacaggacgcgcgtggccgtgtttgggaaggattacggtggctacctgagcacctacatcctcccagcaaagggagaaaatcaaggccagacattcacctgcggctctgctctctctccaataacagacttcaaactctatgcctctgcgttttccgagaggtacttgggcctccatggacttgacaacagagcatacgagatgaccaaggtagcccatcgagtctccgcgctggaagaacagcagttcctgatcattcatcccactgccgatgaaaaaattcatttccagcacacagcagaactcattacacaactaattaggggaaaggctaattacagcttacagatttacccggacgaaagccattactttaccagctccagcctcaaacagcatctgtaccggtccatcatcaacttcttcgtggaatgcttcaggatccaggacaaactgctgacagtcacagcgaaagaggacgaggaggaggactaagctcaggtcgctctaagcacaaacgtggctctttctacaaccagatgcaaccgagggatttccctgccctccctcttccctcggaggggcggggcggggcggggccgggtgttccatagcatgtgtgtctcggatgcggaaggcagttttgcttgggaaacaagctccttccccggggtcatcactcacggcctccatggcaccagggacaacgctgtccccgcagcagcgcctcctcccggcgcccgagagaccggcacgccacggcccctcccccaaggaacagagcaaaggatggtggccgcaggccccacgcgagcccacaggacaccggcccctagattccagccaccaagcggaagcatgagacccgcccacactagcctctgtgttcccgttagggacatcacaccctgtctcacgtcgcagtgccatggacgcagcagttacagcaccattgttttagcagtgcgtgttcatatatgggcttgctacttcctgtaatgaggacgttcaacatggtgaggggctacaagaaaacgcttttctgtacagagtcttactgtagctacgctaatggttaacctgatagaattaactcgtatttttctatggttttaacctgatgctccactgtctccgtcatggggttgttttgctgtttggggttgggccttgtttccctttcctttctccagtccacgtgtagactttgcgcttgatgaagaagcagatcggaagtaactgctccctcctcaaggttgtcttcagacgtcttggggacgttcctaaacactgagggggaagacagccaatagcacccattaaaagaaatacctaaataaaacctctctcccactcagctatgctagggcttggctgtaggtgtgcactgtctatttacatccgtccttacaaccatccttgtcctccttggtaccgtatcaagctctttcccatgacatttggtttaaaaaaaaaaaaaaaaaaaaaaaaaaaacagaaaaaagacaaagcgtcaactccacccacaggcccgctgtgtgtgctcgggccacgggagtcctgagggttctgtgggcctgcgcgcatccctctcccatcgtgggggtggctccgtgaccttcctgccacgagcaggaggttgatgatgtgctacgttagccttgtaagatacacccccaccaaatgtgcagccggtgttcccagtgtatatttcattctcttgtatataaaggaagcaatgtgtgtcaggcctctgtgcagtcaacccagcctcctcccgccagtgctaaccccgtgttgagcctgcatgctgacactgtggccgatctggactctagaagtgctagtttgaaatatatccattactgtcatttccttttgagcttgtggacaagctgaatgtcaggactgacttcgccagctcccagccctgcgggggtgtccttggcatcccatcagcagaggagatgcgtccctgttgcattttggcgtttggggctttgggtttatccacatgagctctgaacgtccgttatagttagggtgattggaaggtctccatcactgggtgttttaaaggtgattcaccaccatttgtgaaaggaccaacgtgctgataaacaggaccgatccgagtgctacatgactgtgcgtttgctatttcaatgggcctgaacgactacaaagccagctaggtctggaaggggaagccagctctggccacgacatctggtcggagggaagtggggatgtggcatggtagcgtctgttcatccatggaataaaacattattttacca

SEQ ID NO: 126999 - DNA, 2388 bp, Homo sapiens
  Payload ID: 4888
  Gene Symbol: DPP6
  Gene Name: dipeptidyl-peptidase 6
  ENST ID: ENST00000427557
  CDS Start-End: 54-2330
aactcgccgtcagaccccacctgccccggtggtgggaagcgcctggacagaccatgaccacagccaaggagccaagcgcttcggggaaatccgtgcagcagcaggaacaggagctggtggggagtaaccctccgcagaggaattggaaaggaatagcaattgcactgcttgtcattctggtcatctgctccttgatcgtcacctcggtcatacttctgacaccagcggaagataatagtctgtctcaaaagaagaaggtcactgtagaagatctcttcagtgaagacttcaaaattcatgaccccgaggctaagtggataagtgatacagaattcatctacagagaacagaaaggaacagtgagactgtggaatgttgaaacaaatacttctactgtcttaatagaaggcaaaaaaattgaatcattaagagccatcagatatgaaatatctccagatagagagtatgcacttttttcatacaatgtggaacccatatttatttttgaaaacaatatctactactgtgcacatgtcgggaaacaggccatccgtgtggtctccactggcaaggaaggtgtgatttacaatggcctcagtgactggctgtatgaagaggagattttgaagacacacatcgcacactggtggtctccggatggcacgagactcgcctacgccgccatcaatgattcccgtgtccccatcatggagctcccaacttacaccggctccatctaccccaccgtgaagccctaccactatcccaaggctggaagtgagaaccccagcatttccctacacgttattggcttaaatggacccacccatgatctggagatgatgccgcctgatgatccacggatgagggagtactacatcaccatggtgaagtgggccaccagcaccaaggtcgccgtgacctggctgaaccgggcgcagaacgtgtccatcctcaccctctgcgacgccaccacgggggtctgcacgaagaaacacgaggatgaaagtgaggcctggctccacagacagaatgaagaacctgtgttctccaaggatggccgaaagtttttcttcatcagagccatcccccagggaggacgagggaaattctatcacatcacggtgtcctcgtcccagcccaacagcagcaacgacaacatccagtccatcacctccggggactgggacgtgaccaagatcctagcctacgatgagaaggggaataagatctacttcctgagcacggaggacctgcctcggagacgacaactctacagtgccaacacggtgggcaacttcaacaggcagtgcctctcctgtgacctggttgagaactgcacctacttcagcgcttccttcagccatagcatggacttcttcctgctcaagtgcgaaggtcctggtgttcctatggtgacggtgcacaacacaacagataagaaaaaaatgtttgacctagaaacaaatgaacatgtcaagaaggccataaatgaccgacagatgcctaaagtggaatacagggacattgagattgatgattacaacctgcccatgcagatactgaagccagcaaccttcaccgacaccacccactaccctctgctcctggtggtggatggcaccccaggcagccagagtgtggctgagaagttcgaggtgagctgggagacggtgatggtgagcagccacggcgcggtggtggtaaagtgtgacggccgtggcagcggcttccaagggaccaagctcctgcacgaagtgaggcggcggctgggcttgctggaggagaaggaccagatggaggccgtgcggacgatgctgaaggagcagtacattgacaggacgcgcgtggccgtgtttgggaaggattacggtggctacctgagcacctacatcctcccagcaaagggagaaaatcaaggccagacattcacctgcggctctgctctctctccaataacagacttcaaactctatgcctctgcgttttccgagaggtacttgggcctccatggacttgacaacagagcatacgagatgaccaaggtagcccatcgagtctccgcgctggaagaacagcagttcctgatcattcatcccactgccgatgaaaaaattcatttccagcacacagcagaactcattacacaactaattaggggaaaggctaattacagcttacagatttacccggacgaaagccattactttaccagctccagcctcaaacagcatctgtaccggtccatcatcaacttcttcgtggaatgcttcaggatccaggacaaactgctgacagtcacagcgaaagaggacgaggaggaggactaagctcaggtcgctctaagcacaaacgtggctctttctacaaccagatgcaaccgaggga

SEQ ID NO: 127000 - DNA, 1109 bp, Homo sapiens
  Payload ID: 4888
  Gene Symbol: DPP6
  Gene Name: dipeptidyl-peptidase 6
  ENST ID: ENST00000619756
  CDS Start-End: 234-1109
actaagcagcggcagcttcctgcttcggatcctctctctgctgcttgcatttaaagagcaaactcgtcttgtctacccaccctccctcccccatcctccccaaaatagccttgtgatttcggaagtatggactaaaatcacactcctccttaccttaccgcttggactctggtggctcccaactcgccgtcagaccccacctgccccggtggtgggaagcgcctggacagaccatgaccacagccaaggagccaagcgcttcggggaaatccgtgcagcagcaggaacaggagctggtggggagtaaccctccgcagaggaattggaaaggaatagcaattgcactgcttgtcattctggtcatctgctccttgatcgtcacctcggtcatacttctgacaccagcggaagataatagtctgtctcaaaagaagaaggtcactgtagaagatctcttcagtgaagacttcaaaattcatgaccccgaggctaagtggataagtgatacagaattcatctacagagaacagaaaggaacagtgagactgtggaatgttgaaacaaatacttctactgtcttaatagaaggcaaaaaaattgaatcattaagagccatcagatatgaaatatctccagatagagagtatgcacttttttcatacaatgtggaacccatgaagaaagtgaagtccaggaagttgacattgcctcattcaaaatcatgtgactcattagcagtaagtcaagcctgtagcccagcttgtcaccagggctgttttcttcattacatcaccatgtctcttcctcttcactgcctgcgtgactatgtctcggcagtcaatggatacagcacagcattgccagcttgccatgtacaagggggacctgtttcagatattccatggagaccctggctggaggattgcaggagagtcccaggaggcaggactgccaatggcaccaggcttcgcagccatgcacctgcagccctcaggcagcactgtccattgtcatacgagtgtggcaggtgtgaggcatcgcatctgctcaccccggggataatgcacagcagctacaggcagatttcgggccagagagcaaccgagtga

SEQ ID NO: 127001 - DNA, 1590 bp, Homo sapiens
  Payload ID: 4889
  Gene Symbol: DPP7
  Gene Name: dipeptidyl-peptidase 7
  Uniprot ID: Q9UHL4
  ENST ID: ENST00000371579
  CDS Start-End: 6-1484
gcgacatgggctccgctccctgggccccggtcctgctgctggcgctcgggctgcgcggcctccaggcgggggcccgcagggccccggaccccggcttccaggagcgcttcttccagcagcgtctggaccacttcaacttcgagcgcttcggcaacaagaccttccctcagcgcttcctggtgtcggacaggttctgggtccggggcgaggggcccatcttcttctacactgggaacgagggcgacgtgtgggccttcgccaacaactcggccttcgtcgcggagctggcggccgagcggggggctctactggtcttcgcggagcaccgctactacgggaagtcgctgccgttcggtgcgcagtccacgcagcgcgggcacacggagctgctgacggtggagcaggccctggccgacttcgcagagctgctccgcgcgctacgacgcgacctcggggcccaggatgcccccgccatcgccttcggtggaagttatggggggatgctcagtgcctacctgaggatgaagtatccccacctggtggcgggggcgctggcggccagcgcgcccgttctagctgtggcaggcctcggcgactccaaccagttcttccgggacgtcacggcggactttgagggccagagtcccaaatgcacccagggtgtgcgggaagcgttccgacagatcaaggacttgttcctacagggagcctacgacacggtccgctgggagttcggcacctgccagccgctgtcagacgagaaggacctgacccagctcttcatgttcgcccggaatgccttcaccgtgctggccatgatggactacccctaccccactgacttcctgggtcccctccctgccaaccccgtcaaggtgggctgtgatcggctgctgagtgaggcccagaggatcacggggctgcgagcactggcagggctggtctacaacgcctcgggctccgagcactgctacgacatctaccggctctaccacagctgtgctgaccccactggctgcggcaccggccccgacgccagggcctgggactaccaggcctgcaccgagatcaacctgaccttcgccagcaacaatgtgaccgatatgttcccggacctgcccttcactgacgagctccgccagcggtactgcctggacacctggggcgtgtggccccggcccgactggctgctgaccagcttctgggggggtgatctcagagccgccagcaacatcatcttctccaacgggaacctggacccctgggcagggggcgggattcggaggaacctgagtgcctcagtcatcgccgtcaccatccaggggggagcgcaccacctcgacctcagagcctcccacccagaagatcctgcttccgtggttgaggcgcggaagctggaggccaccatcatcggcgagtgggtaaaggcagccaggcgtgagcagcagccagctctgcgtggggggcccagactcagcctctgagcacaggactggaggggtctcaaggctcctcatggagtgggggcttcactcaagcagctggcggcagagggaaggggctgaataaacgcctggaggcctggccatg

SEQ ID NO: 127002 - DNA, 775 bp, Homo sapiens
  Payload ID: 4889
  Gene Symbol: DPP7
  Gene Name: dipeptidyl-peptidase 7
  ENST ID: ENST00000463619
  CDS Start-End: 1-733
cacggtccgctgggagttcggcacctgccagccgctgtcagacgagaaggacctgacccagctcttcatgttcgcccggaatgccttcaccgtgctggccatgatggactacccctaccccactgacttcctgggtcccctccctgccaaccccgtcaaggtgggctgtgatcggctgctgagtgaggcccagaggatcacggggctgcgagcactggcaggtgcccttcccccggccccagatggctgtgctgaccccactggctgcggcaccggccccgacgccagggcctgggactaccaggcctgcaccgagatcaacctgaccttcgccagcaacaatgtgaccgatatgttcccggacctgcccttcactgacgagctccgccagcggtactgcctggacacctggggcgtgtggccccggcccgactggctgctgaccagcttctgggggggtgatctcagagccgccagcaacatcatcttctccaacgggaacctggacccctgggcagggggcgggattcggaggaacctgagtgcctcagtcatcgccgtcaccatccaggggggagcgcaccacctcgacctcagagcctcccacccagaagatcctgcttccgtggttgaggcgcggaagctggaggccaccatcatcggcgagtgggtaaaggcagccaggcgtgagcagcagccagctctgcgtggggggcccagactcagcctctgagcacaggactggaggggtctcaaggctcctcatggagtgggg

SEQ ID NO: 127003 - DNA, 478 bp, Homo sapiens
  Payload ID: 4889
  Gene Symbol: DPP7
  Gene Name: dipeptidyl-peptidase 7
  ENST ID: ENST00000470766
  CDS Start-End: 1-185
cctcgggctccgagcactgctacgacatctaccggctctaccacagctgtgctgaccccactggctgcggcaccggccccgacgccagggcctgggactaccagatctcagagccgccagcaacatcatcttctccaacgggaacctggacccctgggcagggggcgggattcggaggaacctgagtgcctcagtcatcgccgtcaccatccaggggggagcgcaccacctcgacctcagagcctcccacccagaagatcctgcttccgtggttgaggcgcggaagctggaggccaccatcatcggcgagtgggtaaaggcagccaggcgtgagcagcagccagctctgcgtggggggcccagactcagcctctgagcacaggactggaggggtctcaaggctcctcatggagtgggggcttcactcaagcagctggcggcagagggaaggggctgaataaacgcctggaggcctggc

SEQ ID NO: 127004 - DNA, 919 bp, Homo sapiens
  Payload ID: 4889
  Gene Symbol: DPP7
  Gene Name: dipeptidyl-peptidase 7
  ENST ID: ENST00000472306
  CDS Start-End: 1-362
cggtcctgctgctggcgctcgggctgcgcggcctccaggcgggggcccgcagggccccggaccccggcttccaggagcgcttcttccagcagcgtctggaccacttcaacttcgagcgcttcggcaacaagaccttccctcagcgcttcctggtgtcgggttctgggtccggggcgaggggcccatcttcttctacactgggaacgagggcgacgtgtgggccttcgccaacaactcggccttcgtcgcggagctggcggccgagcggggggctctactggtcttcgcggagcaccgctactacgggaagtcgctgccgttcggtgcgcagtccacgcagcgcgggcacacggagctgctgacggtggagcaggccctggccgacttcgcagagctgctccgcgcgctacgacgcgacctcggggcccaggatgcccccgccatcgccttcggtggaaggactttgagggccagagtcccaaatgcacccagggtgtgcgggaagcgttccgacagatcaaggacttgttcctacagggagcctacgacacggtccgctgggagttcggcacctgccagccgctgtcagacgagaaggacctgacccagctcttcatgttcgcccggaatgccttcaccgtgctggccatgatggactacccctaccccactgacttcctgggtcccctccctgccaaccccgtcaaggtgggctgtgatcggctgctgagtgaggcccagaggatcacggggctgcgagcactggcagggctggtctacaacgcctcgggctccgagcactgctacgacatctaccggctctaccacagctgtgctgaccccactggctgcggcaccggccccgacgccagggcctgggactaccaggcctgcaccgagatcaacctgaccttcgcca

SEQ ID NO: 127005 - DNA, 1144 bp, Homo sapiens
  Payload ID: 4889
  Gene Symbol: DPP7
  Gene Name: dipeptidyl-peptidase 7
  ENST ID: ENST00000473532
  CDS Start-End: 1-467
agaccttccctcagcgcttcctggtgtcggacaggttctgggtccggggcgaggggcccatcttcttctacactgggaacgagggcgacgtgtgggccttcgccaacaactcggccttcgtcgcggagctggcggccgagcggggggctctactggtcttcgcggagcaccgctactacgggaagtcgctgccgttcggtgcgcagtccacgcagcgcgggcacacggagctgctgacggtggagcaggccctggccgacttcgcagagctgctccgcgcgctacgacgcgacctcggggcccaggatgcccccgccatcgccttcggtggaagcctacgacacggtccgctgggagttcggcacctgccagccgctgtcagacgagaaggacctgacccagctcttcatgttcgcccggaatgccttcaccgtgctggccatgatggactacccctaccccactgacttcctgggtcccctccctgccaaccccgtcaaggtgggctgtgatcggctgctgagtgaggcccagaggatcacggggctgcgagcactggcagggctggtctacaacgcctcgggctccgagcactgctacgacatctaccggctctaccacagctgtgctgaccccactggctgcggcaccggccccgacgccagggcctgggactaccaggcctgcaccgagatcaacctgaccttcgccagcaacaatgtgaccgatatgttcccggacctgcccttcactgacgagctccgccagcgatctcagagccgccagcaacatcatcttctccaacgggaacctggacccctgggcagggggcgggattcggaggaacctgagtgcctcagtcatcgccgtcaccatccaggggggagcgcaccacctcgacctcagagcctcccacccagaagatcctgcttccgtggttgaggcgcggaagctggaggccaccatcatcggcgagtgggtaaaggcagccaggcgtgagcagcagccagctctgcgtggggggcccagactcagcctctgagcacaggactggaggggtctcaaggctcctcatggagtgggggcttcactcaagcagctggcggcagagggaaggggctgaataaacgcctggaggcctggc

SEQ ID NO: 127006 - DNA, 817 bp, Homo sapiens
  Payload ID: 4889
  Gene Symbol: DPP7
  Gene Name: dipeptidyl-peptidase 7
  ENST ID: ENST00000497375
  CDS Start-End: 1-817
gctccctgggccccggtcctgctgctggcgctcgggctgcgcggcctccaggcgggggcccgcagggccccggaccccggcttccaggagcgcttcttccagcagcgtctggaccacttcaacttcgagcgcttcggcaacaagaccttccctcagcgcttcctggtgtcggacaggttctgggtccggggcgaggggcccatcttcttctacactgggaacgagggcgacgtgtgggccttcgccaacaactcggccttcgtcgcggagctggcggccgagcggggggctctactggtcttcgcggagcaccgctactacgggaagtcgctgccgttcggtgcgcagtccacgcagcgcgggcacacggagctgctgacggtggagcaggccctggccgacttcgcagagctgctccgcgcgctacgacgcgacctcggggcccaggatgcccccgccatcgccttcggtggaaggaagccctcccacctgtcctcccagccacctgctcagcttggatgtgcggccacactagcggcctttcccagtgagagctgcacccgcacctggcccagggttggaatttgtgggtctcagaagtgtcgtcctccttgtggcacctgtgggcccctgaggaggaaaagaggaaatggggtgttgggggcagcagccctaaccctgtgtccctcacccagttatggggggatgctcagtgcctacctgaggatgaagtatccccacctggtggcgggggcgctggcggccagcgcgcccgttctagctgtggcaggcctcggcgactccaaccagttcttcc

SEQ ID NO: 127007 - DNA, 3139 bp, Homo sapiens
  Payload ID: 4890
  Gene Symbol: DPP8
  Gene Name: dipeptidyl-peptidase 8
  Uniprot ID: Q6V1X1
  ENST ID: ENST00000300141
  CDS Start-End: 226-2874
gcaacgaaccggaagtgctaaagcctccgaggccaaggccgctgctactgccgccgctgcttcttagtgccgcgttcgccgcctgggttgtcaccggcgccgccgccgaggaagccactgcaaccaggaccggagtggaggcggcgcagcatgaagcggcgcaggcccgctccatagcgcacgtcgggacggtccgggcggggccggggggaaggaaaatgcaacatggcagcagcaatggaaacagaacagctgggtgttgagatatttgaaactgcggactgtgaggagaatattgaatcacaggatcggcctaaattggagcctttttatgttgagcggtattcctggagtcagcttaaaaagctgcttgccgataccagaaaatatcatggctacatgatggctaaggcaccacatgatttcatgtttgtgaagaggaatgatccagatggacctcattcagacagaatctattaccttgccatgtctggtgagaacagagaaaatacactgttttattctgaaattcccaaaactatcaatagagcagcagtcttaatgctctcttggaagcctcttttggatctttttcaggcaacactggactatggaatgtattctcgagaagaagaactattaagagaaagaaaacgcattggaacagtcggaattgcttcttacgattatcaccaaggaagtggaacatttctgtttcaagccggtagtggaatttatcacgtaaaagatggagggccacaaggatttacgcaacaacctttaaggcccaatctagtggaaactagttgtcccaacatacggatggatccaaaattatgccctgctgatccagactggattgcttttatacatagcaacgatatttggatatctaacatcgtaaccagagaagaaaggagactcacttatgtgcacaatgagctagccaacatggaagaagatgccagatcagctggagtcgctacctttgttctccaagaagaatttgatagatattctggctattggtggtgtccaaaagctgaaacaactcccagtggtggtaaaattcttagaattctatatgaagaaaatgatgaatctgaggtggaaattattcatgttacatcccctatgttggaaacaaggagggcagattcattccgttatcctaaaacaggtacagcaaatcctaaagtcacttttaagatgtcagaaataatgattgatgctgaaggaaggatcatagatgtcatagataaggaactaattcaaccttttgagattctatttgaaggagttgaatatattgccagagctggatggactcctgagggaaaatatgcttggtccatcctactagatcgctcccagactcgcctacagatagtgttgatctcacctgaattatttatcccagtagaagatgatgttatggaaaggcagagactcattgagtcagtgcctgattctgtgacgccactaattatctatgaagaaacaacagacatctggataaatatccatgacatctttcatgtttttccccaaagtcacgaagaggaaattgagtttatttttgcctctgaatgcaaaacaggtttccgtcatttatacaaaattacatctattttaaaggaaagcaaatataaacgatccagtggtgggctgcctgctccaagtgatttcaagtgtcctatcaaagaggagatagcaattaccagtggtgaatgggaagttcttggccggcatggatctaatatccaagttgatgaagtcagaaggctggtatattttgaaggcaccaaagactcccctttagagcatcacctgtacgtagtcagttacgtaaatcctggagaggtgacaaggctgactgaccgtggctactcacattcttgctgcatcagtcagcactgtgacttctttataagtaagtatagtaaccagaagaatccacactgtgtgtccctttacaagctatcaagtcctgaagatgacccaacttgcaaaacaaaggaattttgggccaccattttggattcagcaggtcctcttcctgactatactcctccagaaattttctcttttgaaagtactactggatttacattgtatgggatgctctacaagcctcatgatctacagcctggaaagaaatatcctactgtgctgttcatatatggtggtcctcaggtgcagttggtgaataatcggtttaaaggagtcaagtatttccgcttgaataccctagcctctctaggttatgtggttgtagtgatagacaacaggggatcctgtcaccgagggcttaaatttgaaggcgcctttaaatataaaatgggtcaaatagaaattgacgatcaggtggaaggactccaatatctagcttctcgatatgatttcattgacttagatcgtgtgggcatccacggctggtcctatggaggatacctctccctgatggcattaatgcagaggtcagatatcttcagggttgctattgctggggccccagtcactctgtggatcttctatgatacaggatacacggaacgttatatgggtcaccctgaccagaatgaacagggctattacttaggatctgtggccatgcaagcagaaaagttcccctctgaaccaaatcgtttactgctcttacatggtttcctggatgagaatgtccattttgcacataccagtatattactgagttttttagtgagggctggaaagccatatgatttacagatctatcctcaggagagacacagcataagagttcctgaatcgggagaacattatgaactgcatcttttgcactaccttcaagaaaaccttggatcacgtattgctgctctaaaagtgatataattttgacctgtgtagaactctctggtatacactggctatttaaccaaatgaggaggtttaatcaacagaaaacacagaattgatcatcacattttgatacctgccatgtaacatctactcctgaaaataaatgtggtgccatgcaggggtctacggtttgtggtagtaatctaataccttaaccccacatgctcaaaatcaaatgatacatattcctgagagacccagcaataccataagaattactaaaaaaaaaaaaaaaaaa

SEQ ID NO: 127008 - DNA, 3125 bp, Homo sapiens
  Payload ID: 4890
  Gene Symbol: DPP8
  Gene Name: dipeptidyl-peptidase 8
  Uniprot ID: Q6V1X1
  ENST ID: ENST00000321147
  CDS Start-End: 319-2862
ggatcgcaacgaaccggaagtgctaaagcctccgaggccaaggccgctgctactgccgccgctgcttcttagtgccgcgttcgccgcctgggttgtcaccggcgccgccgccgaggaagccactgcaaccaggaccggagtggaggcggcgcagcatgaagcggcgcaggcccgctccatagcgcacgtcgggacggtccgggcggggccggggggaaggctttgatggtgaggaaaggaaagattcctgtgagaagagcaggatgagcagagggattctatgcttgaagtcgagtcacttgaaaaagatctctttgaatgtggaagagatctgagcagatgaaaataaaatcaggaaaatgcaacatggcagcagcaatggaaacagaacagctgggtgttgagatatttgaaactgcggactgtgaggagaatattgaatcacaggatcggcctaaattggagcctttttatgttgagcggtattcctggagtcagcttaaaaagctgcttgccgataccagaaaatatcatggctacatgatggctaaggcaccacatgatttcatgtttgtgaagaggaatgatccagatggacctcattcagacagaatctattaccttgccatgtctggtgagaacagagaaaatacactgttttattctgaaattcccaaaactatcaatagagcagcagtcttaatgctctcttggaagcctcttttggatctttttcaggcaacactggactatggaatgtattctcgagaagaagaactattaagagaaagaaaacgcattggaacagtcggaattgcttcttacgattatcaccaaggaagtggaacatttctgtttcaagccggtagtggaatttatcacgtaaaagatggagggccacaaggatttacgcaacaacctttaaggcccaatctagtggaaactagttgtcccaacatacggatggatccaaaattatgccctgctgatccagactggattgcttttatacatagcaacgatatttggatatctaacatcgtaaccagagaagaaaggagactcacttatgtgcacaatgagctagccaacatggaagaagatgccagatcagctggagtcgctacctttgttctccaagaagaatttgatagatattctggctattggtggtgtccaaaagctgaaacaactcccagtggtggtaaaattcttagaattctatatgaagaaaatgatgaatctgaggtggaaattattcatgttacatcccctatgttggaaacaaggagggcagattcattccgttatcctaaaacaggtacagcaaatcctaaagtcacttttaagatgtcagaaataatgattgatgctgaaggaaggatcatagatgtcatagataaggaactaattcaaccttttgagattctatttgaaggagttgaatatattgccagagctggatggactcctgagggaaaatatgcttggtccatcctactagatcgctcccagactcgcctacagatagtgttgatctcacctgaattatttatcccagtagaagatgatgttatggaaaggcagagactcattgagtcagtgcctgattctgtgacgccactaattatctatgaagaaacaacagacatctggataaatatccatgacatctttcatgtttttccccaaagtcacgaagaggaaattgagtttatttttgcctctgaatgcaaaacaggtttccgtcatttatacaaaattacatctattttaaaggaaagcaaatataaacgatccagtggtgggctgcctgctccaagtgatttcaagtgtcctatcaaagaggagatagcaattaccagtggtgaatgggaagttcttggccggcatggatctaatatccaagttgatgaagtcagaaggctggtatattttgaaggcaccaaagactcccctttagagcatcacctgtacgtagtcagttacgtaaatcctggagaggtgacaaggctgactgaccgtggctactcacattcttgctgcatcagtcagcactgtgacttctttataagtaagtatagtaaccagaagaatccacactgtgtgtccctttacaagctatcaagtcctgaagatgacccaacttgcaaaacaaaggaattttgggccaccattttggattcagcaggtcctcttcctgactatactcctccagaaattttctcttttgaaagtactactggatttacattgtatgggatgctctacaagcctcatgatctacagcctggaaagaaatatcctactgtgctgttcatatatggtggtcctcaggtgcagttggtgaataatcggtttaaaggagtcaagtatttccgcttgaataccctagcctctctaggttatgtggttgtagtgatagacaacaggggatcctgtcaccgagggcttaaatttgaaggcgcctttaaatataaaatggttgctattgctggggccccagtcactctgtggatcttctatgatacaggatacacggaacgttatatgggtcaccctgaccagaatgaacagggctattacttaggatctgtggccatgcaagcagaaaagttcccctctgaaccaaatcgtttactgctcttacatggtttcctggatgagaatgtccattttgcacataccagtatattactgagttttttagtgagggctggaaagccatatgatttacagatctatcctcaggagagacacagcataagagttcctgaatcgggagaacattatgaactgcatcttttgcactaccttcaagaaaaccttggatcacgtattgctgctctaaaagtgatataattttgacctgtgtagaactctctggtatacactggctatttaaccaaatgaggaggtttaatcaacagaaaacacagaattgatcatcacattttgatacctgccatgtaacatctactcctgaaaataaatgtggtgccatgcaggggtctacggtttgtggtagtaatctaataccttaaccccacatgctcaaaatcaaatgatacatattcctgagagacccagcaataccataagaattactaaaaaaaaaaaaaaaa

SEQ ID NO: 127009 - DNA, 8699 bp, Homo sapiens
  Payload ID: 4890
  Gene Symbol: DPP8
  Gene Name: dipeptidyl-peptidase 8
  Uniprot ID: Q6V1X1
  ENST ID: ENST00000341861
  CDS Start-End: 1582-4278
agattccgagtcaaccaccgttcactgggcgccccttgagctctgggcgctggcctcctggcttccacgtccgttatcttaattgagtctcgctggggttgggaggccgggtattgtcagcgcttacagatgaggaaacggaagcccacagaggcgaagggattttccttaagtccgacttggcagatgggcttcggcctcagattttctggtttttcagctggtggtcttttttctctcctgcctcatgctaggtcgattccctccctgctcactgccctctcccattctgttccacccactcgcagcaggacactttcctttcctgccacacctgtcttctcacacacttttcttctaagacttggcattcctcccatctctcttctcaatattctctgctatgcctctcctcttgttcctcattcatagtttttcaaggtctttgccccctctgtgctattgaatctctcaactaggtgtggaccctaaagaatgagatagctaggcttcagtgaggctttaggtgtttaagtggacggctgtttggcccttgagttaaaaattaaggaatttcacttgagtggatccaaactcaagagtcctaaagctattttctgagtcaacatgctctatttctgagtgaggggcttagtgctatgaggtgtcttgacatcttagtccattgttgctgtgctggcataacctcgctgtttttcctgcacttgccacttagcttttcccaccccatcccttcatcacctacttgggctatgggagcccaaaattaaaacttatagagtaacagatgtaatagcagaccttcctttttttttttttcctaagccagaatttcaacaagtttaatgcttctttttccagaaaagttacctatttaaattattctcagagtaatgcagcaagaaaatggaatgcacttaagatgaatagaaaattgtttatctcgtgaaaagtcttaagttattaaattcaagttaattccctttctgcaaaaatggcctgtaactcttactggctatcctcctgagttaattctatctccatccagcttgatatgacattattatgtaaaagaggaacaggaataggcacataaaaataaattttattaatcatatgccgtttttgatgatttgcaatagtcactgagtaacttcacatctgtatgccttttgtaactttttaaagcctttccatggttttcctttgtctggacaccaaagtttgctatgttaggatattcttttgactatattgggctacacatctctgaaataaaataattcttgaattctgataacataaaacgcagatacaaaataatgtaggcattatatattgccccaaaaagtgatattttggtatcagttttaactactattttggggcttctctttttggccacatatggtccatcttaatgatcaaagtcttatcttatttcattatcctggtgagcaggctttgatggtgaggaaaggaaagattcctgtgagaagagcaggatgagcagagggattctatgcttgaagtcgagtcacttgaaaaagatctctttgaatgtggaagagatctgagcagatgaaaataaaatcaggaaaatgcaacatggcagcagcaatggaaacagaacagctgggtgttgagatatttgaaactgcggactgtgaggagaatattgaatcacaggatcggcctaaattggagcctttttatgttgagcggtattcctggagtcagcttaaaaagctgcttgccgataccagaaaatatcatggctacatgatggctaaggcaccacatgatttcatgtttgtgaagaggaatgatccagatggacctcattcagacagaatctattaccttgccatgtctggtgagaacagagaaaatacactgttttattctgaaattcccaaaactatcaatagagcagcagtcttaatgctctcttggaagcctcttttggatctttttcaggcaacactggactatggaatgtattctcgagaagaagaactattaagagaaagaaaacgcattggaacagtcggaattgcttcttacgattatcaccaaggaagtggaacatttctgtttcaagccggtagtggaatttatcacgtaaaagatggagggccacaaggatttacgcaacaacctttaaggcccaatctagtggaaactagttgtcccaacatacggatggatccaaaattatgccctgctgatccagactggattgcttttatacatagcaacgatatttggatatctaacatcgtaaccagagaagaaaggagactcacttatgtgcacaatgagctagccaacatggaagaagatgccagatcagctggagtcgctacctttgttctccaagaagaatttgatagatattctggctattggtggtgtccaaaagctgaaacaactcccagtggtggtaaaattcttagaattctatatgaagaaaatgatgaatctgaggtggaaattattcatgttacatcccctatgttggaaacaaggagggcagattcattccgttatcctaaaacaggtacagcaaatcctaaagtcacttttaagatgtcagaaataatgattgatgctgaaggaaggatcatagatgtcatagataaggaactaattcaaccttttgagattctatttgaaggagttgaatatattgccagagctggatggactcctgagggaaaatatgcttggtccatcctactagatcgctcccagactcgcctacagatagtgttgatctcacctgaattatttatcccagtagaagatgatgttatggaaaggcagagactcattgagtcagtgcctgattctgtgacgccactaattatctatgaagaaacaacagacatctggataaatatccatgacatctttcatgtttttccccaaagtcacgaagaggaaattgagtttatttttgcctctgaatgcaaaacaggtttccgtcatttatacaaaattacatctattttaaaggaaagcaaatataaacgatccagtggtgggctgcctgctccaagtgatttcaagtgtcctatcaaagaggagatagcaattaccagtggtgaatgggaagttcttggccggcatggatctaatatccaagttgatgaagtcagaaggctggtatattttgaaggcaccaaagactcccctttagagcatcacctgtacgtagtcagttacgtaaatcctggagaggtgacaaggctgactgaccgtggctactcacattcttgctgcatcagtcagcactgtgacttctttataagtaagtatagtaaccagaagaatccacactgtgtgtccctttacaagctatcaagtcctgaagatgacccaacttgcaaaacaaaggaattttgggccaccattttggattcagcaggtcctcttcctgactatactcctccagaaattttctcttttgaaagtactactggatttacattgtatgggatgctctacaagcctcatgatctacagcctggaaagaaatatcctactgtgctgttcatatatggtggtcctcaggtgcagttggtgaataatcggtttaaaggagtcaagtatttccgcttgaataccctagcctctctaggttatgtggttgtagtgatagacaacaggggatcctgtcaccgagggcttaaatttgaaggcgcctttaaatataaaatgggtcaaatagaaattgacgatcaggtggaaggactccaatatctagcttctcgatatgatttcattgacttagatcgtgtgggcatccacggctggtcctatggaggatacctctccctgatggcattaatgcagaggtcagatatcttcagggttgctattgctggggccccagtcactctgtggatcttctatgatacaggatacacggaacgttatatgggtcaccctgaccagaatgaacagggctattacttaggatctgtggccatgcaagcagaaaagttcccctctgaaccaaatcgtttactgctcttacatggtttcctggatgagaatgtccattttgcacataccagtatattactgagttttttagtgagggctggaaagccatatgatttacagatctatcctcaggagagacacagcataagagttcctgaatcgggagaacattatgaactgcatcttttgcactaccttcaagaaaaccttggatcacgtattgctgctctaaaagtgatataattttgacctgtgtagaactctctggtatacactggctatttaaccaaatgaggaggtttaatcaacagaaaacacagaattgatcatcacattttgatacctgccatgtaacatctactcctgaaaataaatgtggtgccatgcaggggtctacggtttgtggtagtaatctaataccttaaccccacatgctcaaaatcaaatgatacatattcctgagagacccagcaataccataagaattactaaaaaaaaaaaaaaaaaaaagacattagcaccatgtattcatactaccctattttcacttttaatagtattataaacttcatgaacttaattagtgtatttttacagtatacttttgagtttgttaaaatatgatgatattagtgattggtttggttcagttccagaatctttgactagttacagatttgatagcacttaaatgtaattgaatagcttatgcttcattgcttgggcatatccagcatgttatgaactaataactattaaacttgacttaaccagtcattcattaataatttttcaaggataacttagtggcctcctaaagacacttgttttggcactgaccagtttttagccaatttaatctgtatctagtataaataattctcatttttctttgatgatattaacagagtgggcttttccttttgcataaaggctagtaactgtatatgtagcatggatttaattagtcatgatattgataattacaggcagaaaatttttaatcaaatgattagagcttaaatatttgcaggcaagtttttttttttcctttaagaaaaggaaaaagtacacattcactagaattcttcagaaaatttagtggtgccagtttccatttggtatttccttattaaaatattctagaattttaaggagattgaagggaatcacagtggggtggggagacctgggtttggggaatgacagagagaagaggtggtgagggcctgattaaaaactaagcagaagtagttttaacaaaaatactcatgaaaatgtttggaaactgaaatttaaacaactgtaatattaaggaaaccagaatcaataaatcactgtcttgccagcacagctacagagtaacatgattcaggggaggaaaagttccttagagttacttttataattctttttttttttcctcttaggtttagaaatcttacaaatttaaactttatccttttaaaattatttgaacataatttagatattgtaagcttaaaatacaaatgtttatagataacctctttaccataaactaatccctggcaagccatggctctctttttttttttggtgtttaaagcctgtaaacagtttttctgaatgatcatgaacttttcttggtttagcactaggatttagctatgaagagagctcataggctttcaggtgctaattgagatctgccctgttagagtcttggggtgctagattggtcacattgacaccagtggcagggaaggcatctatgagtttgatgctttttatcacacacttcagtgtttagaaagttattaccaatacttttaaacaacactccaagaaaatttgctatatttctttctcatcactacagagagagtagatttccccatagagagcacagcctccattagtaaggttggtgactattggtaagaggtggacttcattgacaccaagtgggaggtagggaaagcccagaaatggcaggatgatatggtggttctgtcgttgggaaaggtattgggttttgctgtttgtatttatactgtataatagataccacgctttttcttattatctgtatatgtattgcttttcatgtttgatattttcccatgccaagatttgtttatatatattttcaatgttaaattaaattgatttgggtaactttcttccccaagaaagtattttcccccttaagtatatatctgactgtggagggtgttttgttttgttttgttttgttttgtttggactaactggcctcgaaggatctatccttataatatatgcaaagtagaaatggtatacagtagcttttaagcagctactccattgaaacctctcacccattaaggctgtttcttcaaagtggcatctcttattttaccgaaacaaacttagaaaacttcatgtactctggagttcacaggtgttttccttttgcatgttgccttctcctttcctcctatcacaaagaatgcttctattatcactcccagtcacttaaatgccattctgcttctttagcaggaaaaaatacctgaatgaattctcttacagaaagacagtttgactgaatttgctttttacaatcagtgtggaaaatatcatagtcaattgaggcaatcagtagaaatctcactaaaagtttgtaccccctgagtatgggtaacagcttaaacggcaagaatatataaaagtagcaacagtttagtgggagccaaaaagcactaggttaaatatcatactacgtttttaaagacttgataaatgtgtacacttgaacaaccatccagagggatagttacttgagcattacagagtagtggaactcaaaatctaagattcatctgggatacttctaaaagaaatgtagagttttgaatctcactcttaaaaatgtgtattcccaggctaggcatggtggctcacgcctgtaatcctagcactttgggaggccaaggcgggtgaatcacttgaagtcaggagatcaagaccagcttggtcgacatggtgaaaccccgtctctactaaaagtacaaaaaaattagctgggcatgatggcgtgtgcctataatcccacctactcgggaggctgaggcaggagaatcgcttgaacctgggaggcggaagttgcagtgagccgagatggcgccactgtagtccagtctgggcgacagagtgagattctgcctcaaaataaataaataaataaaaatttgtattccattgatttgggtagacaccaggaatgtgcatttctaacaagctttccaggcgatcctatagtaagtcatctgtggactactttaagaaactcttctatagagaatggagttggattaataataggtgattttttacactggactgattcacaagaacctaaacagtagtccatgaagctgctcatctgtggtaactatttggccccgtctcactctgaaagcagcaggagatgttgtttactttgtttctatcccctttgtctggagattaattttggaatgaaagtttttctctctatgccattcctggttcttttccaaagcctcatacaagaggattaggtcacaatgcatgcattaccttttaaaagaatgcgatattgataccgatgcttacttttttttttttactacttgttttattcctt[450 bp omitted]cttccttggtatagtggaggatttgaggattggaatatagagtagagtgcttgcttaagcctgggagcccatctttatagctatttgatgtaagaaaagagacatggccatttctaaactatataaggtgagtgtgtctattcccagcagatataaaggaaaaaggaaacttttttgattcccaccttcccagcctcacctagccatcttccagcctcaaatatagagatgttagtgcaaggtcctgggctctaggtgatcatttcataagtcctttacagataaagaaaaagtagtgtttgtatgtttgtttttaagtaaccccaaaacaaatttatattgtattcagcaaaattggaattcaggtgtttaattttagaacatgaagtgcctgctgttttaagcattgacttgtataaaaagaattgcatgtctccagtaagcttatgggttttctcatttttaggtatatggcttttaatcatgtaaagtgaaacattagttttcttgcattttattacaggttctttgttgcaataaagatgctgctgaaattaattga

SEQ ID NO: 127010 - DNA, 2822 bp, Homo sapiens
  Payload ID: 4890
  Gene Symbol: DPP8
  Gene Name: dipeptidyl-peptidase 8
  Uniprot ID: Q6V1X1
  ENST ID: ENST00000358939
  CDS Start-End: 207-2555
aaagcctccgaggccaaggccgctgctactgccgccgctgcttcttagtgccgcgttcgccgcctgggttgtcaccggcgccgccgccgaggaagccactgcaaccaggaccggagtggaggcggcgcagcatgaagcggcgcaggcccgctccatagcgcacgtcgggacggtccgggcggggccggggggaaggaaaatgcaacatggcagcagcaatggaaacagaacagctgggtgttgagatatttgaaactgcggactgtgaggagaatattgaatcacaggatcggcctaaattggagcctttttatgttgagcggtattcctggagtcagcttaaaaagctgcttgccgataccagaaaatatcatggctacatgatggctaaggcaccacatgatttcatgtttgtgaagaggaatgatccagatggacctcattcagacagaatctattaccttgccatgtctggtgagaacagagaaaatacactgttttattctgaaattcccaaaactatcaatagagcagcagtcttaatgctctcttggaagcctcttttggatctttttcaggcaacactggactatggaatgtattctcgagaagaagaactattaagagaaagaaaacgcattggaacagtcggaattgcttcttacgattatcaccaaggaagtggaacatttctgtttcaagccggtagtggaatttatcacgtaaaagatggagggccacaaggatttacgcaacaacctttaaggcccaatctagtggaaactagttgtcccaacatacggatggatccaaaattatgccctgctgatccagactggattgcttttatacatagcaacgatatttggatatctaacatcgtaaccagagaagaaaggagactcacttatgtgcacaatgagctagccaacatggaagaagatgccagatcagctggagtcgctacctttgttctccaagaagaatttgatagatattctggctattggtggtgtccaaaagctgaaacaactcccagtggtggtaaaattcttagaattctatatgaagaaaatgatgaatctgaggtggaaattattcatgttacatcccctatgttggaaacaaggagggcagattcattccgttatcctaaaacaggtacagcaaatcctaaagtcacttttaagatgtcagaaataatgattgatgctgaaggaaggatcatagatgtcatagataaggaactaattcaaccttttgagattctatttgaaggagttgaatatattgccagagctggatggactcctgagggaaaatatgcttggtccatcctactagatcgctcccagactcgcctacagatagtgttgatctcacctgaattatttatcccagtagaagatgatgttatggaaaggcagagactcattgagtcagtgcctgattctgtgacgccactaattatctatgaagaaacaacagacatctggataaatatccatgacatctttcatgtttttccccaaagtcacgaagaggaaattgagtttatttttgcctctgaatgcaaaacaggtttccgtcatttatacaaaattacatctattttaaaggaaagcaaatataaacgatccagtggtgggctgcctgctccaagtgatttcaagtgtcctatcaaagaggagatagcaattaccagtggtgaatgggaagttcttggccggcatggatctaatatccaagttgatgaagtcagaaggctggtatattttgaaggcaccaaagactcccctttagagcatcacctgtacgtagtcagttacgtaaatcctggagaggtgacaaggctgactgaccgtggctactcacattcttgctgcatcagtcagcactgtgacttctttataagtaagtatagtaaccagaagaatccacactgtgtgtccctttacaagctatcaagtcctgaagatgacccaacttgcaaaacaaaggaattttgggccaccattttggattcagcaggtcctcttcctgactatactcctccagaaattttctcttttgaaagtactactggatttacattgtatgggatgctctacaagcctcatgatctacagcctggaaagaaatatcctactgtgctgttcatatatggtggtcctcaggttgctattgctggggccccagtcactctgtggatcttctatgatacaggatacacggaacgttatatgggtcaccctgaccagaatgaacagggctattacttaggatctgtggccatgcaagcagaaaagttcccctctgaaccaaatcgtttactgctcttacatggtttcctggatgagaatgtccattttgcacataccagtatattactgagttttttagtgagggctggaaagccatatgatttacagatctatcctcaggagagacacagcataagagttcctgaatcgggagaacattatgaactgcatcttttgcactaccttcaagaaaaccttggatcacgtattgctgctctaaaagtgatataattttgacctgtgtagaactctctggtatacactggctatttaaccaaatgaggaggtttaatcaacagaaaacacagaattgatcatcacattttgatacctgccatgtaacatctactcctgaaaataaatgtggtgccatgcaggggtctacggtttgtggtagtaatctaataccttaaccccacatgctcaaaatcaaatgatacatattcctgagagacccagcaataccataagaattactaaaaaaaaaaaaaaaaaaaa

SEQ ID NO: 127011 - DNA, 3082 bp, Homo sapiens
  Payload ID: 4890
  Gene Symbol: DPP8
  Gene Name: dipeptidyl-peptidase 8
  ENST ID: ENST00000395652
  CDS Start-End: 113-2302
tcctggtgagcaggctttgatggtgaggaaaggaaagattcctgtgagaagagcaggatgagcagagggattctatgcttgaagtcgagtcacttgaaaaagatctctttgaatgtggaagagatctgagcagatgaaaataaaatcaggaaaatgcaacatggcagcagcaatggaaacagaacagctgggtgttgagatatttgaaactgcggactgtgaggagaatattgaatcacaggatcggcctaaattggagcctttttatgttgagcggtattcctggagtcagcttaaaaagctgcttgccgataccagaaaatatcatggctacatgatggctaaggcaccacatgatttcatgtttgtgaagaggaatgatccagatggacctcattcagacagaatctattaccttgccatgtctggtgagaacagagaaaatacactgttttattctgaaattcccaaaactatcaatagagcagcagtcttaatgctctcttggaagcctcttttggatctttttcaggcaacactggactatggaatgtattctcgagaagaagaactattaagagaaagaaaacgcattggaacagtcggaattgcttcttacgattatcaccaaggaagtggaacatttctgtttcaagccggtagtggaatttatcacgtaaaagatggagggccacaaggatttacgcaacaacctttaaggcccaatctagtggaaactagttgtcccaacatacggatggatccaaaattatgccctgctgatccagactggattgcttttatacatagcaacgatatttggatatctaacatcgtaaccagagaagaaaggagactcacttatgtgcacaatgagctagccaacatggaagaagatgccagatcagctggagtcgctacctttgttctccaagaagaatttgatagatattctggctattggtggtgtccaaaagctgaaacaactcccagtggtggtaaaattcttagaattctatatgaagaaaatgatgaatctgaggtggaaattattcatgttacatcccctatgttggaaacaaggagggcagattcattccgttatcctaaaacaggtacagcaaatcctaaagtcacttttaagatgtcagaaataatgattgatgctgaaggaaggatcatagatgtcatagataaggaactaattcaaccttttgagattctatttgaaggagttgaatatattgccagagctggatggactcctgagggaaaatatgcttggtccatcctactagatcgctcccagactcgcctacagatagtgttgatctcacctgaattatttatcccagtagaagatgatgttatggaaaggcagagactcattgagtcagtgcctgattctgtgacgccactaattatctatgaagaaacaacagacatctggataaatatccatgacatctttcatgtttttccccaaagtcacgaagaggaaattgagtttatttttgcctctgaatgcaaaacaggtttccgtcatttatacaaaattacatctattttaaaggaaagcaaatataaacgatccagtggtgggctgcctgctccaagtgatttcaagtgtcctatcaaagaggagatagcaattaccagtggtgaatgggaagttcttggccggcatggatctaatatccaagttgatgaagtcagaaggctggtatattttgaaggcaccaaagactcccctttagagcatcacctgtacgtagtcagttacgtaaatcctggagaggtgacaaggctgactgaccgtggctactcacattcttgctgcatcagtcagcactgtgacttctttataagtaagtatagtaaccagaagaatccacactgtgtgtccctttacaagctatcaagtcctgaagatgacccaacttgcaaaacaaaggaattttgggccaccattttggattcagcaggtcctcttcctgactatactcctccagaaattttctcttttgaaagtactactggatttacattgtatgggatgctctacaagcctcatgatctacagcctggaaagaaatatcctactgtgctgttcatatatggtggtcctcaggtgcagttggtgaataatcggtttaaaggagtcaagtatttccgcttgaataccctagcctctctaggttatgtggttgtagtgatagacaacaggggatcctgtcaccgagggcttaaatttgaaggcgcctttaaatataaaatggaagctttaaatgctaccttttagagatgccccatgtcctttctgctgctttgggaaatgatgagaatccgatgttccttttgcacagtaaggcagttactgtgtttgccagtgttattggacatgctgaggtcaaatagaaattgacgatcaggtggaaggactccaatatctagcttctcgatatgatttcattgacttagatcgtgtgggcatccacggctggtcctatggaggatacctctccctgatggcattaatgcagaggtcagatatcttcagggttgctattgctggggccccagtcactctgtggatcttctatgatacaggatacacggaacgttatatgggtcaccctgaccagaatgaacagggctattacttaggatctgtggccatgcaagcagaaaagttcccctctgaaccaaatcgtttactgctcttacatggtttcctggatgagaatgtccattttgcacataccagtatattactgagttttttagtgagggctggaaagccatatgatttacagatctatcctcaggagagacacagcataagagttcctgaatcgggagaacattatgaactgcatcttttgcactaccttcaagaaaaccttggatcacgtattgctgctctaaaagtgatataattttgacctgtgtagaactctctggtatacactggctatttaaccaaatgaggaggtttaatcaacagaaaacacagaattgatcatcacattttgatacctgccatgtaacatctactcctgaaaataaatgtggtgccatg

SEQ ID NO: 127012 - DNA, 1083 bp, Homo sapiens
  Payload ID: 4890
  Gene Symbol: DPP8
  Gene Name: dipeptidyl-peptidase 8
  ENST ID: ENST00000558559
  CDS Start-End: 1-1083
ggaagaagatgccagatcagctggagtcgctacctttgttctccaagaagaatttgatagatattctggctattggtggtgtccaaaagctgaaacaactcccagtggtggtaaaattcttagaattctatatgaagaaaatgatgaatctgaggtggaaattattcatgttacatcccctatgttggaaacaaggagggcagattcattccgttatcctaaaacaggtacagcaaatcctaaagtcacttttaagatgtcagaaataatgattgatgctgaaggaaggatccaagttgatgaagtcagaaggctggtatattttgaaggcaccaaagactcccctttagagcatcacctgtacgtagtcagttacgtaaatcctggagaggtgacaaggctgactgaccgtggctactcacattcttgctgcatcagtcagcactgtgacttctttataagtaagtatagtaaccagaagaatccacactgtgtgtccctttacaagctatcaagtcctgaagatgacccaacttgcaaaacaaaggaattttgggccaccattttggattcagcaggtcctcttcctgactatactcctccagaaattttctcttttgaaagtactactggatttacattgtatgggatgctctacaagcctcatgatctacagcctggaaagaaatatcctactgtgctgttcatatatggtggtcctcaggtgcagttggtgaataatcggtttaaaggagtcaagtatttccgcttgaataccctagcctctctaggttatgtggttgtagtgatagacaacaggggatcctgtcaccgagggcttaaatttgaaggcgcctttaaatataaaatgggtcaaatagaaattgacgatcaggtggaaggactccaatatctagcttctcgatatgatttcattgacttagatcgtgtgggcatccacggctggtcctatggaggatacctctccctgatggcattaatgcagaggtcagatatcttcagggttgctattgctggggccccagtcactctgtggatcttctatgatacaggatacacgga

SEQ ID NO: 127013 - DNA, 906 bp, Homo sapiens
  Payload ID: 4890
  Gene Symbol: DPP8
  Gene Name: dipeptidyl-peptidase 8
  ENST ID: ENST00000558529
  CDS Start-End: 249-906
aaggagagccttttataaaagctaccaaagggatttataggcactgtgaagtagacctgacctcaatttttttttaatttcatttttaaactgaacacagagaagggagagctgttgcttttcttactaagtttcattgcagctgtgctaaaaagcatttttttcttgccctccccactcccccgctttttttttgaccctctcagagaatcattctgataatagaagatagacccgtgaacagcttcatgtgccttgtttttctaggaaaatgcaacatggcagcagcaatggaaacagaacagctgggtgttgagatatttgaaactgcggactgtgaggagaatattgaatcacaggatcggcctaaattggagcctttttatgttgagcggtattcctggagtcagcttaaaaagctgcttgccgataccagaaaatatcatggctacatgatggctaaggcaccacatgatttcatgtttgtgaagaggaatgatccagatggacctcattcagacagaatctattaccttgccatgtctggtgagaacagagaaaatacactgttttattctgaaattcccaaaactatcaatagagcagcagtcttaatgctctcttggaagcctcttttggatctttttcaggcaacactggactatggaatgtattctcgagaagaagaactattaagagaaagaaaacgcattggaacagtcggaattgcttcttacgattatcaccaaggaagtggaacatttctgtttcaagccggtagtggaatttatcacgtaaaagatggagggccacaaggatttacgcaacaacctttaaggcccaatctagtggaaactagttgtcccaacatacggatggatccaaaattatgccctgctgatccag

SEQ ID NO: 127014 - DNA, 564 bp, Homo sapiens
  Payload ID: 4890
  Gene Symbol: DPP8
  Gene Name: dipeptidyl-peptidase 8
  ENST ID: ENST00000560665
  CDS Start-End: 313-564
taaagcctccgaggccaaggccgctgctactgccgccgctgcttcttagtgccgcgttcgccgcctgggttgtcaccggcgccgccgccgaggaagccactgcaaccaggaccggagtggaggcggcgcagcatgaagcggcgcaggcccgctccatagcgcacgtcgggacggtccgggcggggccggggggaaggtgcagtatccgcccccttctccttctcctgcgccggcgaggcctgggccacggctcaccaggccctttccgcctcacggagggactgctcggcgcgttctcagggaaaatgcaacatggcagcagcaatggaaacagaacagctgggtgttgagatatttgaaactgcggactgtgaggagaatattgaatcacaggatcggcctaaattggagcctttttatgttgagcggtattcctggagtcagcttaaaaagctgcttgccgataccagaaaatatcatggctacatgatggctaaggcaccacatgatttcatgtttgtgaagaggaatgatccagatggacctcattcagacagaatctat

SEQ ID NO: 127015 - DNA, 592 bp, Homo sapiens
  Payload ID: 4890
  Gene Symbol: DPP8
  Gene Name: dipeptidyl-peptidase 8
  ENST ID: ENST00000560436
  CDS Start-End: 233-592
gtgcagagccggtggtgcccttcccccctcccccccacttgccggaagaggaagccgaggctctgagattccgagtcaaccaccgttcactgggcgccccttgagctctgggcgctggcctcctggcttccacgctttgatggtgaggaaaggaaagattcctgtgagaagagcaggatgagcagagggattctatgcttgaagtcgagtcacttgaaaaagatctctttgaatgtggaagagatctgagcagatgaaaataaaatcaggaaaatgcaacatggcagcagcaatggaaacagaacagctgggtgttgagatatttgaaactgcggactgtgaggagaatattgaatcacaggatcggcctaaattggagcctttttatgttgagcggtattcctggagtcagcttaaaaagctgcttgccgataccagaaaatatcatggctacatgatggctaaggcaccacatgatttcatgtttgtgaagaggaatgatccagatggacctcattcagacagaatctattaccttgccatgtctggtgagaacagagaaaatacactgttttattctgaaattcccaaa

SEQ ID NO: 127016 - DNA, 2953 bp, Homo sapiens
  Payload ID: 4890
  Gene Symbol: DPP8
  Gene Name: dipeptidyl-peptidase 8
  Uniprot ID: Q6V1X1
  ENST ID: ENST00000559233
  CDS Start-End: 113-2809
tcctggtgagcaggctttgatggtgaggaaaggaaagattcctgtgagaagagcaggatgagcagagggattctatgcttgaagtcgagtcacttgaaaaagatctctttgaatgtggaagagatctgagcagatgaaaataaaatcaggaaaatgcaacatggcagcagcaatggaaacagaacagctgggtgttgagatatttgaaactgcggactgtgaggagaatattgaatcacaggatcggcctaaattggagcctttttatgttgagcggtattcctggagtcagcttaaaaagctgcttgccgataccagaaaatatcatggctacatgatggctaaggcaccacatgatttcatgtttgtgaagaggaatgatccagatggacctcattcagacagaatctattaccttgccatgtctggtgagaacagagaaaatacactgttttattctgaaattcccaaaactatcaatagagcagcagtcttaatgctctcttggaagcctcttttggatctttttcaggcaacactggactatggaatgtattctcgagaagaagaactattaagagaaagaaaacgcattggaacagtcggaattgcttcttacgattatcaccaaggaagtggaacatttctgtttcaagccggtagtggaatttatcacgtaaaagatggagggccacaaggatttacgcaacaacctttaaggcccaatctagtggaaactagttgtcccaacatacggatggatccaaaattatgccctgctgatccagactggattgcttttatacatagcaacgatatttggatatctaacatcgtaaccagagaagaaaggagactcacttatgtgcacaatgagctagccaacatggaagaagatgccagatcagctggagtcgctacctttgttctccaagaagaatttgatagatattctggctattggtggtgtccaaaagctgaaacaactcccagtggtggtaaaattcttagaattctatatgaagaaaatgatgaatctgaggtggaaattattcatgttacatcccctatgttggaaacaaggagggcagattcattccgttatcctaaaacaggtacagcaaatcctaaagtcacttttaagatgtcagaaataatgattgatgctgaaggaaggatcatagatgtcatagataaggaactaattcaaccttttgagattctatttgaaggagttgaatatattgccagagctggatggactcctgagggaaaatatgcttggtccatcctactagatcgctcccagactcgcctacagatagtgttgatctcacctgaattatttatcccagtagaagatgatgttatggaaaggcagagactcattgagtcagtgcctgattctgtgacgccactaattatctatgaagaaacaacagacatctggataaatatccatgacatctttcatgtttttccccaaagtcacgaagaggaaattgagtttatttttgcctctgaatgcaaaacaggtttccgtcatttatacaaaattacatctattttaaaggaaagcaaatataaacgatccagtggtgggctgcctgctccaagtgatttcaagtgtcctatcaaagaggagatagcaattaccagtggtgaatgggaagttcttggccggcatggatctaatatccaagttgatgaagtcagaaggctggtatattttgaaggcaccaaagactcccctttagagcatcacctgtacgtagtcagttacgtaaatcctggagaggtgacaaggctgactgaccgtggctactcacattcttgctgcatcagtcagcactgtgacttctttataagtaagtatagtaaccagaagaatccacactgtgtgtccctttacaagctatcaagtcctgaagatgacccaacttgcaaaacaaaggaattttgggccaccattttggattcagcaggtcctcttcctgactatactcctccagaaattttctcttttgaaagtactactggatttacattgtatgggatgctctacaagcctcatgatctacagcctggaaagaaatatcctactgtgctgttcatatatggtggtcctcaggtgcagttggtgaataatcggtttaaaggagtcaagtatttccgcttgaataccctagcctctctaggttatgtggttgtagtgatagacaacaggggatcctgtcaccgagggcttaaatttgaaggcgcctttaaatataaaatgggtcaaatagaaattgacgatcaggtggaaggactccaatatctagcttctcgatatgatttcattgacttagatcgtgtgggcatccacggctggtcctatggaggatacctctccctgatggcattaatgcagaggtcagatatcttcagggttgctattgctggggccccagtcactctgtggatcttctatgatacaggatacacggaacgttatatgggtcaccctgaccagaatgaacagggctattacttaggatctgtggccatgcaagcagaaaagttcccctctgaaccaaatcgtttactgctcttacatggtttcctggatgagaatgtccattttgcacataccagtatattactgagttttttagtgagggctggaaagccatatgatttacagatctatcctcaggagagacacagcataagagttcctgaatcgggagaacattatgaactgcatcttttgcactaccttcaagaaaaccttggatcacgtattgctgctctaaaagtgatataattttgacctgtgtagaactctctggtatacactggctatttaaccaaatgaggaggtttaatcaacagaaaacacagaattgatcatcacattttgatacctgccatgtaacatctactcctgaaaataaatgtggtgccatgc

SEQ ID NO: 127017 - DNA, 1182 bp, Homo sapiens
  Payload ID: 4890
  Gene Symbol: DPP8
  Gene Name: dipeptidyl-peptidase 8
  ENST ID: ENST00000558786
  CDS Start-End: 1-935
attttgaaggcaccaaagactcccctttagagcatcacctgtacgtagtcagttacgtaaatcctggagaggtgacaaggctgactgaccgtggctactcacattcttgctgcatcagtcagcactgtgacttctttataagtaagtatagtaaccagaagaatccacactgtgtgtccctttacaagctatcaagtcctgaagatgacccaacttgcaaaacaaaggaattttgggccaccattttggattcagcaggtcctcttcctgactatactcctccagaaattttctcttttgaaagtactactggatttacattgtatgggatgctctacaagcctcatgatctacagcctggaaagaaatatcctactgtgctgttcatatatggtggtcctcagggtcaaatagaaattgacgatcaggtggaaggactccaatatctagcttctcgatatgatttcattgacttagatcgtgtgggcatccacggctggtcctatggaggatacctctccctgatggcattaatgcagaggtcagatatcttcagggttgctattgctggggccccagtcactctgtggatcttctatgatacaggatacacggaacgttatatgggtcaccctgaccagaatgaacagggctattacttaggatctgtggccatgcaagcagaaaagttcccctctgaaccaaatcgtttactgctcttacatggtttcctggatgagaatgtccattttgcacataccagtatattactgagttttttagtgagggctggaaagccatatgatttacagatctatcctcaggagagacacagcataagagttcctgaatcgggagaacattatgaactgcatcttttgcactaccttcaagaaaaccttggatcacgtattgctgctctaaaagtgatataattttgacctgtgtagaactctctggtatacactggctatttaaccaaatgaggaggtttaatcaacagaaaacacagaattgatcatcacattttgatacctgccatgtaacatctactcctgaaaataaatgtggtgccatgcaggggtctacggtttgtggtagtaatctaataccttaaccccacatgctcaaaatcaaatgatacatattcctgagagacccagcaataccataagaattact

SEQ ID NO: 127018 - DNA, 677 bp, Homo sapiens
  Payload ID: 4890
  Gene Symbol: DPP8
  Gene Name: dipeptidyl-peptidase 8
  ENST ID: ENST00000559526
  CDS Start-End: 190-677
ggccgctgctactgccgccgctgcttcttagtgccgcgttcgccgcctgggttgtcaccggcgccgccgccgaggaagccactgcaaccaggaccggagtggaggcggcgcagcatgaagcggcgcaggcccgctccatagcgcacgtcgggacggtccgggcggggccggggggaaggaaaatgcaacatggcagcagcaatggaaacagaacagctgggtgttgagatatttgaaactgcggactgtgaggagaatattgaatcacaggatcggcctaaattggagcctttttatgttgagcggtattcctggagtcagcttaaaaagctgcttgccgataccagaaaatatcatggctacatgatggctaaggcaccacatgatttcatgtttgtgaagaggaatgatccagatggacctcattcagacagaatctattaccttgccatgtctggtgagaacagagaaaatacactgttttattctgaaattcccaaaactatcaatagagcagcagtcttaatgctctcttggaagcctcttttggatctttttcagcaacaacctttaaggcccaatctagtggaaactagttgtcccaacatacggatggatccaaaattatgccctgctgatccagactggattgcttttatacatagcaacgatatttg

SEQ ID NO: 127019 - DNA, 4295 bp, Homo sapiens
  Payload ID: 4891
  Gene Symbol: DPP9
  Gene Name: dipeptidyl-peptidase 9
  Uniprot ID: Q86TI2
  ENST ID: ENST00000262960
  CDS Start-End: 279-2957
aggccgccgcctgggtcgctcaacttccgggtcaaaggtgcctgagccggcgggtcccctgtgtccgccgcggctgtcgtcccccgctcccgccacttccggggtcgcagtcccgggcatggagccgcgaccgtgaggcgccgctggacccgggacgacctgcccagtccggccgccgccccacgtcccggtctgtgtcccacgcctgcagctggaatggaggctctctggaccctttagaaggcacccctgccctcctgaggtcagctgagcggttaatgcggaaggttaagaaactgcgcctggacaaggagaacaccggaagttggagaagcttctcgctgaattccgagggggctgagaggatggccaccaccgggaccccaacggccgaccgaggcgacgcagccgccacagatgacccggccgcccgcttccaggtgcagaagcactcgtgggacgggctccggagcatcatccacggcagccgcaagtactcgggcctcattgtcaacaaggcgccccacgacttccagtttgtgcagaagacggatgagtctgggccccactcccaccgcctctactacctgggaatgccatatggcagccgagagaactccctcctctactctgagattcccaagaaggtccggaaagaggctctgctgctcctgtcctggaagcagatgctggatcatttccaggccacgccccaccatggggtctactctcgggaggaggagctgctgagggagcggaaacgcctgggggtcttcggcatcacctcctacgacttccacagcgagagtggcctcttcctcttccaggccagcaacagcctcttccactgccgcgacggcggcaagaacggcttcatggtgtcccctatgaaaccgctggaaatcaagacccagtgctcagggccccggatggaccccaaaatctgccctgccgaccctgccttcttctccttcatcaataacagcgacctgtgggtggccaacatcgagacaggcgaggagcggcggctgaccttctgccaccaaggtttatccaatgtcctggatgaccccaagtctgcgggtgtggccaccttcgtcatacaggaagagttcgaccgcttcactgggtactggtggtgccccacagcctcctgggaaggttcagagggcctcaagacgctgcgaatcctgtatgaggaagtcgatgagtccgaggtggaggtcattcacgtcccctctcctgcgctagaagaaaggaagacggactcgtatcggtaccccaggacaggcagcaagaatcccaagattgccttgaaactggctgagttccagactgacagccagggcaagatcgtctcgacccaggagaaggagctggtgcagcccttcagctcgctgttcccgaaggtggagtacatcgccagggccgggtggacccgggatggcaaatacgcctgggccatgttcctggaccggccccagcagtggctccagctcgtcctcctccccccggccctgttcatcccgagcacagagaatgaggagcagcggctagcctctgccagagctgtccccaggaatgtccagccgtatgtggtgtacgaggaggtcaccaacgtctggatcaatgttcatgacatcttctatcccttcccccaatcagagggagaggacgagctctgctttctccgcgccaatgaatgcaagaccggcttctgccatttgtacaaagtcaccgccgttttaaaatcccagggctacgattggagtgagcccttcagccccggggaagatgaatttaagtgccccattaaggaagagattgctctgaccagcggtgaatgggaggttttggcgaggcacggctccaagatctgggtcaatgaggagaccaagctggtgtacttccagggcaccaaggacacgccgctggagcaccacctctacgtggtcagctatgaggcggccggcgagatcgtacgcctcaccacgcccggcttctcccatagctgctccatgagccagaacttcgacatgttcgtcagccactacagcagcgtgagcacgccgccctgcgtgcacgtctacaagctgagcggccccgacgacgaccccctgcacaagcagccccgcttctgggctagcatgatggaggcagccagctgccccccggattatgttcctccagagatcttccatttccacacgcgctcggatgtgcggctctacggcatgatctacaagccccacgccttgcagccagggaagaagcaccccaccgtcctctttgtatatggaggcccccaggtgcagctggtgaataactccttcaaaggcatcaagtacttgcggctcaacacactggcctccctgggctacgccgtggttgtgattgacggcaggggctcctgtcagcgagggcttcggttcgaaggggccctgaaaaaccaaatgggccaggtggagatcgaggaccaggtggagggcctgcagttcgtggccgagaagtatggcttcatcgacctgagccgagttgccatccatggctggtcctacgggggcttcctctcgctcatggggctaatccacaagccccaggtgttcaaggtggccatcgcgggtgccccggtcaccgtctggatggcctacgacacagggtacactgagcgctacatggacgtccctgagaacaaccagcacggctatgaggcgggttccgtggccctgcacgtggagaagctgcccaatgagcccaaccgcttgcttatcctccacggcttcctggacgaaaacgtgcactttttccacacaaacttcctcgtctcccaactgatccgagcagggaaaccttaccagctccagatctaccccaacgagagacacagtattcgctgccccgagtcgggcgagcactatgaagtcacgttgctgcactttctacaggaatacctctgagcctgcccaccgggagccgccacatcacagcacaagtggctgcagcctccgcggggaaccaggcgggagggactgagtggcccgcgggccccagtgaggcactttgtcccgcccagcgctggccagccccgaggagccgctgccttcaccgccccgacgccttttatccttttttaaacgctcttgggttttatgtccgctgcttcttggttgccgagacagagagatggtggtctcgggccagcccctcctctccccgccttctgggaggaggaggtcacacgctgatgggcactggagaggccagaagagactcagaggagcgggctgccttccgcctggggctccctgtgacctctcagtcccctggcccggccagccaccgtccccagcacccaagcatgcaattgcctgtcccccccggccagcctccccaacttgatgtttgtgttttgtttggggggatatttttcataattatttaaaagacaggccgggcgcggtggctcacgtctgtaatcccagcactttgggaggctgaggcgggcggatcacctgaggttgggagttcaagaccagcctggccaacatggggaaaccccgtctctactaaaaatacaaaaaattagccgggtgtggtggcgcgtgcctataatcccagctactcgggaggctgaggcaggagaatcgcttgaacccgggaggtggaggttgcggtgagccaagatcgcaccattgcactccagcctgggcaacaagagcgaaactctgtctcaaaataaataaaaaataaaagacagaaagcaaggggtgcctaaatctagacttggggtccacaccgggcagcggggttgcaacccagcacctggtaggctccatttcttcccaagcccgagcagagggtcatgcgggccccacaggagaagcggccagggcccgcggggggcaccacctgtggacagccctcctgtccccaagctttcaggcaggcactgaaacgcaccgaacttccacgctctgctggtcagtggcggctgtcccctccccagcccagccgcccagccacatgtgtctgcctgacccgtacacaccaggggttccggggttgggagctgaaccatccccacctcagggttatatttccctctccccttccctccccgccaagagctctgccaggggcgggcaaaaaaaaaagtaaaaagaaaagaaaaaaaaaaaaaagaaacaaaccacctctacatattatggaaagaaaatatttttgtcgattcttattcttttataattatgcgtggaagaagtagacacattaaacgattccagttggaaacatgt

SEQ ID NO: 127020 - DNA, 408 bp, Homo sapiens
  Payload ID: 4891
  Gene Symbol: DPP9
  Gene Name: dipeptidyl-peptidase 9
  ENST ID: ENST00000599248
  CDS Start-End: 207-408
atagggtggtgctaggtggagaaagcccatcacaggctagccctcgctccctcactcttgcgccagcctctctgcaatccgggctgtgcccccgggtagaagagaggtcagcggagggccaggctccagcaccaagcctcggcctgtctggaagctcaagctaaagagtctagccacatccagaagattcctggaagtttctcgcgatgtttcatttcatttctcatctccgggatcgaatttttgcttcttgggctatcagtggtgatcagagcttctcgctgaattccgagggggctgagaggatggccaccaccgggaccccaacggccgaccgaggcgacgcagccgccacagatgacccggccgcccgcttccaggtgcagaagcactcgtgggacgggctcc

SEQ ID NO: 127021 - DNA, 542 bp, Homo sapiens
  Payload ID: 4891
  Gene Symbol: DPP9
  Gene Name: dipeptidyl-peptidase 9
  ENST ID: ENST00000598041
  CDS Start-End: 255-542
acacgcgaaaggtccccggttcgatcccgggcggaaacagacatttttatgggatttaaaaaaattttccgtgattgatggctcacgcctgtaatcccagcactttgaaaggccgaagagggcggatcacctgaagtcagagttcgagaccagcctggccaaaatggtctgtgtcccacgcctgcagctggaatggaggctctctggaccctttagaaggcacccctgccctcctgaggtcagctgagcggttaatgcggaaggttaagaaactgcgcctggacaaggagaacaccggaagttggagaagcttctcgctgaattccgagggggctgagaggatggccaccaccgggaccccaacggccgaccgaggcgacgcagccgccacagatgacccggccgcccgcttccaggtgcagaagcactcgtgggacgggctccggagcatcatccacggcagccgcaagtactcgggcctcattgtcaacaaggcgccccacgacttccagtttgtgcagaagacggatgagtctgggccc

SEQ ID NO: 127022 - DNA, 798 bp, Homo sapiens
  Payload ID: 4891
  Gene Symbol: DPP9
  Gene Name: dipeptidyl-peptidase 9
  ENST ID: ENST00000601720
  CDS Start-End: 1-661
cctgcacaagcagccccgcttctgggctagcatgatggaggcagccagctgccccccggattatgttcctccagagatcttccatttccacacgcgctcggatgtgcggctctacggcatgatctacaagccccacgccttgcagccagggaagaagcaccccaccgtcctctttgtatatggaggcccccaggtgcagctggtgaataactccttcaaaggcatcaagtacttgcggctcaacacactggcctccctgggctacgccgtggttgtgattgacggcaggggctcctgtcagcgagggcttcggttcgaaggggccctgaaaaaccaaatgggccaggtggagatcgaggaccaggtggagggcctgcagttcgtggccgagaagtatggcttcatcgacctgagccgagttgccatccatggctggtcctacgggggcttcctctcgctcatggggctaatccacaagccccaggtgttcaaggcccaaccgcttgcttatcctccacggcttcctggacgaaaacgtgcactttttccacacaaacttcctcgtctcccaactgatccgagcagggaaaccttaccagctccagatctaccccaacgagagacacagtattcgctgccccgagtcgggcgagcactatgaagtcacgttgctgcactttctacaggaatacctctgagcctgcccaccgggagccgccacatcacagcacaagtggctgcagcctccgcggggaaccaggcgggagggactgagtggcccgcgggccccagtgaggc

SEQ ID NO: 127023 - DNA, 555 bp, Homo sapiens
  Payload ID: 4891
  Gene Symbol: DPP9
  Gene Name: dipeptidyl-peptidase 9
  ENST ID: ENST00000593973
  CDS Start-End: 495-555
ttcccacttcctccaagcaagcagcgacttccccaagccaagctgttggtcccggaggacagggcttctggcaaggtcggcagtcactcggagcccacaaagggaagcgagaccagccccggtgccaccctttccagaccactggctctcgcagaactgggtcactgcggccatgtttagatttctgtaaaacaaatatttgcctggccagtccagtcaggtcaaggagtgtgctaagtgacgagggcgggagtggggtggtgggagatgtgacaccgcggcggccactcacggtggctgctttgcggacccagagtgtcctgagtgggaggagagagtgggatattctttggggaagggcgtgccattcaccctttcacctgcacctcccacatcccgaggctctggaacttccagtgaaggccaagcatctccccggctggacagcaagccaacagcacagcttctcgctgaattccgagggggctgagaggatggccaccaccgggaccccaacggccgaccgaggcgacgcagccgccacagatgacccgg

SEQ ID NO: 127024 - DNA, 3098 bp, Homo sapiens
  Payload ID: 4891
  Gene Symbol: DPP9
  Gene Name: dipeptidyl-peptidase 9
  Uniprot ID: Q86TI2
  ENST ID: ENST00000598800
  CDS Start-End: 507-3098
cctgtgtccgccgcggctgtcgtcccccgctcccgccacttccggggtcgcagtcccgggcatggagccgcgaccgtgaggcgccgctggacccgggacgacctgcccagtccggccgccgccccacgtcccggtctgtgtcccacgcctgcagctggaatggaggctctctggaccctttagaaggcacccctgccctcctgaggtcagctgagcggttaatgcggaaggttaagaaactgcgcctggacaaggagaacaccggaagttggagaaggctctggaacttccagtgaaggccaagcatctccccggctggacagcaagccaacagcacaggtgaccaggatggattttcattccttcacgcccgggcctctcccgagacccagcatgtctccccgcgagcccactgagagataatcattccacagtgctccgtggaatgcctgccacgtgccagccaccagctaagcttctcgctgaattccgagggggctgagaggatggccaccaccgggaccccaacggccgaccgaggcgacgcagccgccacagatgacccggccgcccgcttccaggtgcagaagcactcgtgggacgggctccggagcatcatccacggcagccgcaagtactcgggcctcattgtcaacaaggcgccccacgacttccagtttgtgcagaagacggatgagtctgggccccactcccaccgcctctactacctgggaatgccatatggcagccgagagaactccctcctctactctgagattcccaagaaggtccggaaagaggctctgctgctcctgtcctggaagcagatgctggatcatttccaggccacgccccaccatggggtctactctcgggaggaggagctgctgagggagcggaaacgcctgggggtcttcggcatcacctcctacgacttccacagcgagagtggcctcttcctcttccaggccagcaacagcctcttccactgccgcgacggcggcaagaacggcttcatggtgtcccctatgaaaccgctggaaatcaagacccagtgctcagggccccggatggaccccaaaatctgccctgccgaccctgccttcttctccttcatcaataacagcgacctgtgggtggccaacatcgagacaggcgaggagcggcggctgaccttctgccaccaaggtttatccaatgtcctggatgaccccaagtctgcgggtgtggccaccttcgtcatacaggaagagttcgaccgcttcactgggtactggtggtgccccacagcctcctgggaaggttcagagggcctcaagacgctgcgaatcctgtatgaggaagtcgatgagtccgaggtggaggtcattcacgtcccctctcctgcgctagaagaaaggaagacggactcgtatcggtaccccaggacaggcagcaagaatcccaagattgccttgaaactggctgagttccagactgacagccagggcaagatcgtctcgacccaggagaaggagctggtgcagcccttcagctcgctgttcccgaaggtggagtacatcgccagggccgggtggacccgggatggcaaatacgcctgggccatgttcctggaccggccccagcagtggctccagctcgtcctcctccccccggccctgttcatcccgagcacagagaatgaggagcagcggctagcctctgccagagctgtccccaggaatgtccagccgtatgtggtgtacgaggaggtcaccaacgtctggatcaatgttcatgacatcttctatcccttcccccaatcagagggagaggacgagctctgctttctccgcgccaatgaatgcaagaccggcttctgccatttgtacaaagtcaccgccgttttaaaatcccagggctacgattggagtgagcccttcagccccggggaagatgaatttaagtgccccattaaggaagagattgctctgaccagcggtgaatgggaggttttggcgaggcacggctccaagatctgggtcaatgaggagaccaagctggtgtacttccagggcaccaaggacacgccgctggagcaccacctctacgtggtcagctatgaggcggccggcgagatcgtacgcctcaccacgcccggcttctcccatagctgctccatgagccagaacttcgacatgttcgtcagccactacagcagcgtgagcacgccgccctgcgtgcacgtctacaagctgagcggccccgacgacgaccccctgcacaagcagccccgcttctgggctagcatgatggaggcagccagctgccccccggattatgttcctccagagatcttccatttccacacgcgctcggatgtgcggctctacggcatgatctacaagccccacgccttgcagccagggaagaagcaccccaccgtcctctttgtatatggaggcccccaggtgcagctggtgaataactccttcaaaggcatcaagtacttgcggctcaacacactggcctccctgggctacgccgtggttgtgattgacggcaggggctcctgtcagcgagggcttcggttcgaaggggccctgaaaaaccaaatgggccaggtggagatcgaggaccaggtggagggcctgcagttcgtggccgagaagtatggcttcatcgacctgagccgagttgccatccatggctggtcctacgggggcttcctctcgctcatggggctaatccacaagccccaggtgttcaaggtggccatcgcgggtgccccggtcaccgtctggatggcctacgacacagggtacactgagcgctacatggacgtccctgagaacaaccagcacggctatgaggcgggttccgtggccctgcacgtggagaagctgcccaatgagcccaaccgcttgcttatcctccacggcttcctggacgaaaacgtgcactttttccacacaaacttcctcgtctcccaactgatccgagcagggaaaccttaccagctccagatctaccccaacgagagacacagtattcgctgccccgagtcgggcgagcactatgaagtcacgttgctgcactttctacaggaatacctctga

SEQ ID NO: 127025 - DNA, 742 bp, Homo sapiens
  Payload ID: 4891
  Gene Symbol: DPP9
  Gene Name: dipeptidyl-peptidase 9
  ENST ID: ENST00000600556
  CDS Start-End: 236-424
gagccggcgggtcccctgtgtccgccgcggctgtcgtcccccgctcccgccacttccggggtcgcagtcccgggcatggagccgcgaccgtgaggcgccgctggacccgggacgacctgcccagtccggccgccgccccacgtcccggtctgtgtcccacgcctgcagctggaatggaggctctctggaccctttagaaggcacccctgccctcctgaggtcagctgagcggttaatgcggaaggttaagaaactgcgcctggacaaggagaacaccggaagttggagaagacggagtcttgctctgttacccaggctggagtgcagtggcacgatcttggctccctgcaacctccatctcccgggttcaagcgattcttctgcctcagcctcccaagtagctgggagtacagcttctcgctgaattccgagggggctgagaggatggccaccaccgggaccccaacggccgaccgaggcgacgcagccgccacagatgacccggccgcccgcttccaggtgcagaagcactcgtgggacgggctccggagcatcatccacggcagccgcaagtactcgggcctcattgtcaacaaggcgccccacgacttccagtttgtgcagaagacggatgagtctgggccccactcccaccgcctctactacctgggaatgccatatggcagccgagagaactccctcctctactctgagattcccaagaaggtccggaaagaggctc

SEQ ID NO: 127026 - DNA, 626 bp, Homo sapiens
  Payload ID: 4891
  Gene Symbol: DPP9
  Gene Name: dipeptidyl-peptidase 9
  ENST ID: ENST00000598360
  CDS Start-End: 269-626
gcttctctcccagattctgtccagggcatgcagacagtgctgcagggcttcaaggcagagctagaatctagccaggtagaatcgggcctgacagtctgcagctcctgagtgggggaggctgaacggctggccggtgcttccattaacctgccacattcatgacatgtttatcctataaaggtctgtgtcccacgcctgcagctggaatggaggctctctggaccctttagaaggcacccctgccctcctgaggtcagctgagcggttaatgcggaaggttaagaaactgcgcctggacaaggagaacaccggaagttggagaagcttctcgctgaattccgagggggctgagaggatggccaccaccgggaccccaacggccgaccgaggcgacgcagccgccacagatgacccggccgcccgcttccaggtgcagaagcactcgtgggacgggctccggagcatcatccacggcagccgcaagtactcgggcctcattgtcaacaaggcgccccacgacttccagtttgtgcagaagacggatgagtctgggccccactcccaccgcctctactacctgggaatgccatatggcagccgagagaactccctcctctactctgaga

SEQ ID NO: 127027 - DNA, 600 bp, Homo sapiens
  Payload ID: 4891
  Gene Symbol: DPP9
  Gene Name: dipeptidyl-peptidase 9
  ENST ID: ENST00000601130
  CDS Start-End: 368-600
aacttccgggtcaaaggtgcctgagccggcgggtcccctgtgtccgccgcggctgtcgtcccccgctcccgccacttccggggtcgcagtcccgggcatggagccgcgaccgtgaggcgccgctggacccgggacgacctgcccagtccggccgccgccccacgtcccggtctgtgtcccacgcctgcagctggaatggaggctctctggaccctttagaagctgcccctggaaggagctttttgaaggctttgaggagaggaaggggagagtgctgatttcagcaggatttggtggaggggtgcctggatccacctacactgcctgacccggcacccctgccctcctgaggtcagctgagcggttaatgcggaaggttaagaaactgcgcctggacaaggagaacaccggaagttggagaagcttctcgctgaattccgagggggctgagaggatggccaccaccgggaccccaacggccgaccgaggcgacgcagccgccacagatgacccggccgcccgcttccaggtgcagaagcactcgtgggacgggctccggagcatcatccacggcagccgcaagtactcgggcctcattgt

SEQ ID NO: 127028 - DNA, 835 bp, Homo sapiens
  Payload ID: 4891
  Gene Symbol: DPP9
  Gene Name: dipeptidyl-peptidase 9
  ENST ID: ENST00000599163
  CDS Start-End: 1-456
ggcggcaagaacggcttcatggtgtcccctatgaaaccgctggaaatcaagacccagtgctcagggccccggatggaccccaaaatctgccctgccgaccctgccttcttctccttcatcaataacagcgacctgtgggtggccaacatcgagacaggcgaggagcggcggctgaccttctgccaccaaggtttatccaatgtcctggatgaccccaagtctgcgggtgtggccaccttcgtcatacaggaagagttcgaccgcttcactgggtactggtggtgccccacagcctcctgggaaggttcagagggcctcaagacgctgcgaatcctgtatgaggaagtcgatgagtccgaggtggaggtcattcacgtcccctctcctgcgctagaagaaaggaagacggactcgtatcggtaccccaggacagcaagaatcccaagattgccttgaaactggctgagttccagactgacagccagggcaagatcgtctcgacccaggagaaggagctggtgcagcccttcagctcgctgttcccgaaggtggagtacatcgccagggccgggtggacccgggatggcaaatagttcatgacatcttctatcccttcccccaatcagagggagaggacgagctctgctttctccgcgccaatgaatgcaagaccggcttctgccatttgtacaaagtcaccgccgttttaaaatcccagggctacgattggagtgagcccttcagccccggggaagatgaatttaagtgccccattaaggaagagattgctctgaccagcggtgaatgggaggttttggcgaggcacggctccaag

SEQ ID NO: 127029 - DNA, 423 bp, Homo sapiens
  Payload ID: 4891
  Gene Symbol: DPP9
  Gene Name: dipeptidyl-peptidase 9
  ENST ID: ENST00000595327
  CDS Start-End: 1-423
gggaggttttggcgaggcacggctccaagggcaccaaggacacgccgctggagcaccacctctacgtggtcagctatgaggcggccggcgagatcgtacgcctcaccacgcccggcttctcccatagctgctccatgagccagaacttcgacatgttcgtcagccactacagcagcgtgagcacgccgccctgcgtgcacgtctacaagctgagcggccccgacgacgaccccctgcacaagcagccccgcttctgggctagcatgatggaggcagccagctgccccccggattatgttcctccagagatcttccatttccacacgcgctcggatgtgcggctctacggcatgatctacaagccccacgccttgcagccagggaagaagcaccccaccgtcctctttgtatatggaggccccc

SEQ ID NO: 127030 - DNA, 3851 bp, Homo sapiens
  Payload ID: 4891
  Gene Symbol: DPP9
  Gene Name: dipeptidyl-peptidase 9
  Uniprot ID: Q86TI2
  ENST ID: ENST00000594671
  CDS Start-End: 1-2511
atggccaccaccgggaccccaacggccgaccgaggcgacgcagccgccacagatgacccggccgcccgcttccaggtgcagaagcactcgtgggacgggctccggagcatcatccacggcagccgcaagtactcgggcctcattgtcaacaaggcgccccacgacttccagtttgtgcagaagacggatgagtctgggccccactcccaccgcctctactacctgggaatgccatatggcagccgagagaactccctcctctactctgagattcccaagaaggtccggaaagaggctctgctgctcctgtcctggaagcagatgctggatcatttccaggccacgccccaccatggggtctactctcgggaggaggagctgctgagggagcggaaacgcctgggggtcttcggcatcacctcctacgacttccacagcgagagtggcctcttcctcttccaggccagcaacagcctcttccactgccgcgacggcggcaagaacggcttcatggtgtcccctatgaaaccgctggaaatcaagacccagtgctcagggccccggatggaccccaaaatctgccctgccgaccctgccttcttctccttcatcaataacagcgacctgtgggtggccaacatcgagacaggcgaggagcggcggctgaccttctgccaccaaggtttatccaatgtcctggatgaccccaagtctgcgggtgtggccaccttcgtcatacaggaagagttcgaccgcttcactgggtactggtggtgccccacagcctcctgggaaggttcagagggcctcaagacgctgcgaatcctgtatgaggaagtcgatgagtccgaggtggaggtcattcacgtcccctctcctgcgctagaagaaaggaagacggactcgtatcggtaccccaggacaggcagcaagaatcccaagattgccttgaaactggctgagttccagactgacagccagggcaagatcgtctcgacccaggagaaggagctggtgcagcccttcagctcgctgttcccgaaggtggagtacatcgccagggccgggtggacccgggatggcaaatacgcctgggccatgttcctggaccggccccagcagtggctccagctcgtcctcctccccccggccctgttcatcccgagcacagagaatgaggagcagcggctagcctctgccagagctgtccccaggaatgtccagccgtatgtggtgtacgaggaggtcaccaacgtctggatcaatgttcatgacatcttctatcccttcccccaatcagagggagaggacgagctctgctttctccgcgccaatgaatgcaagaccggcttctgccatttgtacaaagtcaccgccgttttaaaatcccagggctacgattggagtgagcccttcagccccggggaagatgaatttaagtgccccattaaggaagagattgctctgaccagcggtgaatgggaggttttggcgaggcacggctccaagatctgggtcaatgaggagaccaagctggtgtacttccagggcaccaaggacacgccgctggagcaccacctctacgtggtcagctatgaggcggccggcgagatcgtacgcctcaccacgcccggcttctcccatagctgctccatgagccagaacttcgacatgttcgtcagccactacagcagcgtgagcacgccgccctgcgtgcacgtctacaagctgagcggccccgacgacgaccccctgcacaagcagccccgcttctgggctagcatgatggaggcagccagctgccccccggattatgttcctccagagatcttccatttccacacgcgctcggatgtgcggctctacggcatgatctacaagccccacgccttgcagccagggaagaagcaccccaccgtcctctttgtatatggaggcccccaggtgcagctggtgaataactccttcaaaggcatcaagtacttgcggctcaacacactggcctccctgggctacgccgtggttgtgattgacggcaggggctcctgtcagcgagggcttcggttcgaaggggccctgaaaaaccaaatgggccaggtggagatcgaggaccaggtggagggcctgcagttcgtggccgagaagtatggcttcatcgacctgagccgagttgccatccatggctggtcctacgggggcttcctctcgctcatggggctaatccacaagccccaggtgttcaaggtggccatcgcgggtgccccggtcaccgtctggatggcctacgacacagggtacactgagcgctacatggacgtccctgagaacaaccagcacggctatgaggcgggttccgtggccctgcacgtggagaagctgcccaatgagcccaaccgcttgcttatcctccacggcttcctggacgaaaacgtgcactttttccacacaaacttcctcgtctcccaactgatccgagcagggaaaccttaccagctccaggaatacctctgagcctgcccaccgggagccgccacatcacagcacaagtggctgcagcctccgcggggaaccaggcgggagggactgagtggcccgcgggccccagtgaggcactttgtcccgcccagcgctggccagccccgaggagccgctgccttcaccgccccgacgccttttatccttttttaaacgctcttgggttttatgtccgctgcttcttggttgccgagacagagagatggtggtctcgggccagcccctcctctccccgccttctgggaggaggaggtcacacgctgatgggcactggagaggccagaagagactcagaggagcgggctgccttccgcctggggctccctgtgacctctcagtcccctggcccggccagccaccgtccccagcacccaagcatgcaattgcctgtcccccccggccagcctccccaacttgatgtttgtgttttgtttggggggatatttttcataattatttaaaagacaggccgggcgcggtggctcacgtctgtaatcccagcactttgggaggctgaggcgggcggatcacctgaggttgggagttcaagaccagcctggccaacatggggaaaccccgtctctactaaaaatacaaaaaattagccgggtgtggtggcgcgtgcctataatcccagctactcgggaggctgaggcaggagaatcgcttgaacccgggaggtggaggttgcggtgagccaagatcgcaccattgcactccagcctgggcaacaagagcgaaactctgtctcaaaataaataaaaaataaaagacagaaagcaaggggtgcctaaatctagacttggggtccacaccgggcagcggggttgcaacccagcacctggtaggctccatttcttcccaagcccgagcagagggtcatgcgggccccacaggagaagcggccagggcccgcggggggcaccacctgtggacagccctcctgtccccaagctttcaggcaggcactgaaacgcaccgaacttccacgctctgctggtcagtggcggctgtcccctccccagcccagccgcccagccacatgtgtctgcctgacccgtacacaccaggggttccggggttgggagctgaaccatccccacctcagggttatatttccctctccccttccctccccgccaagagctctgccaggggcgggcaaaaaaaaaagtaaaaagaaaagaaaaaaaaaaaaaagaaacaaaccacctctacatattatggaaagaaaatatttttgtcgattcttattcttttataattatgcgtggaagaagtagacacattaaacgattccagttggaaacatgtca

SEQ ID NO: 127031 - DNA, 2025 bp, Homo sapiens
  Payload ID: 4891
  Gene Symbol: DPP9
  Gene Name: dipeptidyl-peptidase 9
  ENST ID: ENST00000597849
  CDS Start-End: 166-1722
cgggcatggagccgcgaccgtgaggcgccgctggacccgggacgacctgcccagtccggccgccgccccacgtcccggtctgtgtcccacgcctgcagctggaatggaggctctctggaccctttagaaggcacccctgccctcctgaggtcagctgagcggttaatgcggaaggttaagaaactgcgcctggacaaggagaacaccggaagttggagaagcttctcgctgaattccgagggggctgagaggatggccaccaccgggaccccaacggccgaccgaggcgacgcagccgccacagatgacccggccgcccgcttccaggtgcagaagcactcgtgggacgggctccggagcatcatccacggcagccgcaagtactcgggcctcattgtcaacaaggcgccccacgacttccagtttgtgcagaagacggatgagtctgggccccactcccaccgcctctactacctgggaatgccatatggcagccgagagaactccctcctctactctgagattcccaagaaggtccggaaagaggctctgctgctcctgtcctggaagcagatgctggatcatttccaggccacgccccaccatggggtctactctcgggaggaggagctgctgagggagcggaaacgcctgggggtcttcggcatcacctcctacgacttccacagcgagagtggcctcttcctcttccaggccagcaacagcctcttccactgccgcgacggcggcaagaacggcttcatggtgtcccctatgaaaccgctggaaatcaagacccagtgctcagggccccggatggaccccaaaatctgccctgccgaccctgccttcttctccttcatcaataacagcgacctgtgggtggccaacatcgagacaggcgaggagcggcggctgaccttctgccaccaaggtttatccaatgtcctggatgaccccaagtctgcgggtgtggccaccttcgtcatacaggaagagttcgaccgcttcactgggtactggtggtgccccacagcctcctgggaaggttcagagggcctcaagacgctgcgaatcctgtatgaggaagtcgatgagtccgaggtggaggtcattcacgtcccctctcctgcgctagaagaaaggaagacggactcgtatcggtaccccaggacaggcagcaagaatcccaagattgccttgaaactggctgagttccagactgacagccagggcaagatcgtctcgacccaggagaaggagctggtgcagcccttcagctcgctgttcccgaaggtggagtacatcgccagggccgggtggacccgggatggcaaatacgcctgggccatgttcctggaccggccccagcagtggctccagctcgtcctcctccccccggccctgttcatcccgagcacagagaatgaggagcagcggctagcctctgccagagctgtccccaggaatgtccagccgtatgtggtgtacgaggaggtcaccaacgtctggatcaatgttcatgacatcttctatcccttcccccaatcagagggagaggacgagctctgctttctccgcgccaatgaatgcaagaccggcttctgccatttgtacaaagtcaccgccgttttaaaatcccagggctacgattggagtgagcccttcagccccggggaaggtgagcagagcctgacgaatgctgtcgactcatcgcgttagtcacgtgtggttcaatatgctgtttgttcattggtcggcccccccactcagccagcacaccctgcgggagaaggaacagggatcggcaggaagccagccttccccagtgactgcatgatctggcagggcttagagcacccaactgttggcttattcaggcagcagatttactgagcacctcccctgtgccaggcccttagcacaaccaggggttggccacctacggcccacaggtcaaatccggcccaccacctgtgttcataaataaagttttattggcactgagccacagccacttgttta

SEQ ID NO: 127032 - DNA, 625 bp, Homo sapiens
  Payload ID: 4891
  Gene Symbol: DPP9
  Gene Name: dipeptidyl-peptidase 9
  ENST ID: ENST00000600621
  CDS Start-End: 205-625
ttcctctgctgggtcccaggggaatcggggcccgtgggatggcttctctcccagattctgtccagggcatgcagacagtgctgcagggcttcaaggcagagctagaatctagccaggtctgtgtcccacgcctgcagctggaatggaggctctctggaccctttagaaggcacccctgccctcctgaggtcagctgagcggttaatgcggaaggttaagaaactgcgcctggacaaggagaacaccggaagttggagaagcttctcgctgaattccgagggggctgagaggatggccaccaccgggaccccaacggccgaccgaggcgacgcagccgccacagatgacccggccgcccgcttccaggtgcagaagcactcgtgggacgggctccggagcatcatccacggcagccgcaagtactcgggcctcattgtcaacaaggcgccccacgacttccagtttgtgcagaagacggatgagtctgggccccactcccaccgcctctactacctgggaatgccatatggcagccgagagaactccctcctctactctgagattcccaagaaggtccggaaagaggctctgctgctcctgtcctggaagcagatgctggatcatt

SEQ ID NO: 127033 - DNA, 728 bp, Homo sapiens
  Payload ID: 4891
  Gene Symbol: DPP9
  Gene Name: dipeptidyl-peptidase 9
  ENST ID: ENST00000597900
  CDS Start-End: 1-188
cagagatcttccatttccacacgcgctcggatgtgcggctctacggcatgatctacaagccccacgccttgcagccagggaagaagcaccccaccgtcctctttgtatatggaggcccccaggcccgtcctgcccggcatctcgtgctggactgctggccctcacctccccacaggtgcagctggtgaataactccttcaaaggcatcaagtacttgcggctcaacacactggcctccctgggctacgccgtggttgtgattgacggcaggggctcctgtcagcgagggcttcggttcgaaggggccctgaaaaaccaaatgggccaggtggagatcgaggaccaggtggagggcctgcagttcgtggccgagaagtatggcttcatcgacctgagccgagttgccatccatggctggtcctacgggggcttcctctcgctcatggggctaatccacaagccccaggtgttcaaggtggccatcgcgggtgccccggtcaccgtctggatggcctacgacacagggtacactgagcgctacatggacgtccctgagaacaaccagcacggctatgaggcgggttccgtggccctgcacgtggagaagctgcccaatgagcccaaccgcttgcttatcctccacggcttcctggacgaaaacgtgcactttttccacacaaacttcctcgtctcccaactgatccgagcagggaaaccttaccagctcc

SEQ ID NO: 127034 - DNA, 566 bp, Homo sapiens
  Payload ID: 4891
  Gene Symbol: DPP9
  Gene Name: dipeptidyl-peptidase 9
  ENST ID: ENST00000602161
  CDS Start-End: 198-566
gggtcaaaggtgcctgagccggcgggtcccctgtgtccgccgcggctgtcgtcccccgctcccgccacttccggggtcgcagtcccgggcatggagccgcgaccgtgaggcgccgctggacccgggacgacctgcccagtccggccgccgccccacgtcccggcacccctgccctcctgaggtcagctgagcggttaatgcggaaggttaagaaactgcgcctggacaaggagaacaccggaagttggagaagcttctcgctgaattccgagggggctgagaggatggccaccaccgggaccccaacggccgaccgaggcgacgcagccgccacagatgacccggccgcccgcttccaggtgcagaagcactcgtgggacgggctccggagcatcatccacggcagccgcaagtactcgggcctcattgtcaacaaggcgccccacgacttccagtttgtgcagaagacggatgagtctgggccccactcccaccgcctctactacctgggaatgccatatggcagccgagagaactccctcctctactctgagattcccaagaag

SEQ ID NO: 127035 - DNA, 570 bp, Homo sapiens
  Payload ID: 4891
  Gene Symbol: DPP9
  Gene Name: dipeptidyl-peptidase 9
  ENST ID: ENST00000597726
  CDS Start-End: 366-570
aacttccgggtcaaaggtgcctgagccggcgggtcccctgtgtccgccgcggctgtcgtcccccgctcccgccacttccggggtcgcagtcccgggcatggagccgcgaccgtgaggcgccgctggacccgggacgacctgcccagtccggccgccgccccacgtcccggtctgtgtcccacgcctgcagctggaatggaggctctctggaccctttagaaggcacccctgccctcctgagggagcggaaacgcctgggggtcttcggcatcacctcctacgacttccacagcgagagtggcctcttcctcttccaggccagcaacagcctcttccactgccgcgacggcggcaagaacggcttcatggtgtcccctatgaaaccgctggaaatcaagacccagtgctcagggccccggatggaccccaaaatctgccctgccgaccctgccttcttctccttcatcaataacagcgacctgtgggtggccaacatcgagacaggcgaggagcggcggctgaccttctgccaccaaggtttatccaatgtcctggatgaccccaagtctg

SEQ ID NO: 127036 - DNA, 5433 bp, Homo sapiens
  Payload ID: 4892
  Gene Symbol: PPIP5K1
  Gene Name: diphosphoinositol pentakisphosphate kinase 1
  Uniprot ID: Q6PFW1
  ENST ID: ENST00000348806
  CDS Start-End: 1-4221
atgtggtcattgacggccagtgagggcgagagtaccacggcccacttcttccttggagctggagatgaggggctgggcacccgtggaataggcatgaggccagaagagagtgacagcgagctccttgaggatgaggaggatgaagtgcctcctgaacctcagatcattgttggcatctgtgccatgaccaagaaatccaagtccaagccaatgactcaaatcctagagcgactctgcagatttgactacctgactgttgtcattctgggagaagatgtaatccttaatgaacctgtggaaaactggccatcctgccactgcctcatctctttccactccaaaggctttcctctggacaaagctgttgcttactccaagcttcgaaacccctttcttatcaatgatctggccatgcagtattacatccaagataggagggaggtgtaccggatcctgcaggaagagggtattgatctgcctcgatatgctgtgctcaaccgtgatcctgcccggcctgaggaatgcaacctgatagaaggtgaagaccaagtagaggtcaatggagctgtctttcccaagccctttgtggagaagccagtgagtgcagaagaccacaatgtttacatctactaccccagctcagctggaggaggaagccagcgtctctttcgtaagattggcagccgaagcagtgtttactctcctgagagcagcgtccgaaagacggggtcgtacatctatgaggagtttatgccaacagatggcacagatgtcaaggtgtatacagtggggccagattatgcccatgctgaagctagaaaatctccagctttggatgggaaggttgaacgagacagtgaggggaaagagattcgatatccagtcatgctgactgccatggaaaagctggtggccaggaaagtctgcgtagctttcaagcaaacagtttgtggatttgaccttcttcgtgccaatggtcattcctttgtgtgtgatgtcaatggctttagttttgtcaagaactcgatgaaatactacgatgactgtgccaagattctggggaacaccataatgcgggagcttgccccacagttccagattccatggtccatccccacggaggctgaggacattcccattgttcccaccacatctggcactatgatggaacttcgttgtgtcattgcaattattcgtcatggggatcgtactcccaagcagaagatgaagatggaagtgaaacacccaaggttttttgctctgtttgaaaaacatggtggctacaagacagggaaattaaaactcaagcgacctgagcagctccaggaggtgctggatatcacaaggctgttgttggctgaactggagaaagaaccaggtggtgagatcgaggagaagactggaaaactagagcagctgaagtctgtactggagatgtatggtcacttctcaggtataaaccggaaggtacaattgacttactaccctcatggagtaaaagcttctaatgaggggcaagatccacagagggaaactctggccccatctctgttgctggtactgaagtggggtggagaactgactcctgctggccgtgttcaggctgaggagctggggcgagcttttcgctgcatgtaccctggaggacagggtgactatgctggcttccctggttgtgggctgcttcgtctccatagcactttccgccacgatctcaagatctatgcctctgatgagggtcgtgttcagatgactgctgctgccttcgccaagggccttctggctctagaaggggagctgacacccattttggtgcaaatggtgaagagtgccaacatgaatgggctactggacagcgatggggattccttgagcagctgccagcaccgggtgaaggctcggctgcaccatattctacagcaggatgcgccctttggccctgaggactacgatcagctggctcccaccagaagtacttccctgctcaactccatgactatcatccagaatcctgtgaaggtctgtgatcaggtatttgccctgatcgaaaacctcacccaccagatccgggaacgaatgcaggaccccaggtctgtagacctgcagctctaccacagtgagacactagagctaatgctacagcgttggagcaagctggagcgtgactttcgacagaagagtgggcgctatgatatcagtaagatccctgacatctatgactgtgtcaagtatgatgtgcagcacaatgggagtctgggacttcaaggcacagcagagttgctccgtctctctaaggcactggctgatgtggtcattccccaggagtacgggatcagtcgggaggagaaactggaaattgctgtgggcttctgtcttccactgttgcggaagatactacttgacctgcagagaacccacgaggatgagtctgtcaacaagctgcatcccctgtactcccgaggcgtgctctccccaggtcgccacgttcgaacgcgtctctatttcaccagtgagagccatgtccactccctgctcagtgtcttccgttatggaggacttcttgatgagacccaggatgcacaatggcagcgagctttggattatcttagtgccatctcagagcttaactacatgacccagattgtcatcatgctttatgaggacaacacacaggatcccttatcagaggaacggttccatgtggagctacacttcagccccggagtgaaaggtgttgaggaagaaggcagtgccccggctggctgtggattccgtccagcctcttctgagaatgaggagatgaaaaccaaccaaggcagtatggagaacctgtgtccaggaaaggcatcagatgaaccagaccgggcattgcagacttcaccccagcctcctgagggccctggccttccgaggagatcacccctcattcgtaaccgaaaagctggttccatggaggtactttctgagacttcatcctcgaggcctggtggctaccggctcttttcatcttcacggccacccacagaaatgaagcagagtggcctagggtttgaagggtgttccatggtgcctaccatctaccctctggaaacactgcataatgccctttccctacgtcaagtgagtgaattcttgagtagagtctgccagcgccacactgatgcccaggcacaggcatctgcagccctctttgattccatgcacagcagccaggcctcagataacccattttctccaccacgtactcttcattcacctcccctgcaactccagcagcgctctgagaagcccccttggttagagacaaggttttgccatgttggccaggctggtttagagctcctgacctcaagtgatctgcctgcctcggcctcccaaagtgctgggattacaggcgtgagccaccgcacccagccagacagcagtggcccttctagcactgtgtccagtgctggtccttcttcccctactacagtagatggtaactcccaatttggcttcagtgatcaaccctccctaaattcacacgtggctgaagaacatcaaggccttgggctgctccaggagacccctgggagtggagcacaagagctctccatagaaggggagcaagagctttttgaaccaaatcagtccccacaggtgccacctatggaaaccagccagccatacgaggaggtcagccagccatgtcaggaggtccctgacatcagccagccatgccaggacatttctgaggcgctcagccagccatgtcagaaggtccctgacatcagccagcaatgccaggagaaccatgacaatggtaaccacacatgccaggaggtccctcacatcagccagccatgccagaagtccagccaactgtgccagaaagtctctgaggaagtttgccagctatgtctggagaactccgaggaggtcagccagccatgccagggggtctctgtggaggttggcaagctggtccataagttccatgtaggggttggtagcttggtccaggaaacccttgtagaagttggcagcccagctgaagagatccctgaggaggtcatccagccataccaggagttctctgtggaggttggcaggctggcccaggagacttctgcgatcaatctgttatctcagggcatccctgagattgataaaccatcccaagagttccctgaggagattgatctgcaggcccaggaggtccctgaggagataaattagaagtcctgggtggtccctgaagtgattgatcagctgcctggagagggtattcctcaagcccagcatccatctggtgatccaaaccctcagagccagtctctagcccatgaccagcactcaccccttccaccagcaacatgtgattaattttctcattagtggtatcacactataccagccatttgagccagcaaccttttctgttggctaactcactggccagctctcaccagcggtgtctggggaagtagttctctttgtatgaagcatacctgtgccagagctgtggttgaggaggagccagttttaggttcgaagaagccattggctcctcacttagccattagacttgaataggatttccttggggtgggttggtctgtcattacccagccttctctgagcatcctaggaaatcacagattgttaaaggaaatgccgcttcactgctgaagacaccatctggcgacagcaaatgcaaaagaggggactctagggtcttcacttttctggggaaatgttcacgacttctcaaggtacgcttagaccatatgtgcattcaggggactcttgtctttgccagcactcctcaggtgagcccgggatggctatctgaaatgtctggaaaatagagtcccttccccaaacatctgacatggccactaaatctttagacttgccttatagatccttccatatcatccccaagtgccccttctgcctcagtcctgttcctctgggcaatagctctagggaaaagtaggtattagactgctgtgcaaaattcagagcaactacttaaaatgctctagaggattcttagccagtctgtgaaagtgggcctcctctgtggtggggctgtttggcttaggagatgctgtagtagtagagataatcaggttctattttaagcaatcagcagagatcaatattgtacagatacaagcaaaggtttaataaatatatatatatatatttatttctgtagttgtgccagggacagactggccaaagaccaaacactgcagggtccccaagaaatttgtccttatatcattgtgtctgagggccagatatgattatgaagctttttccaaagatccagggatgggaatgggagtgggtaggaggggtaatgcggtcattggagtcgggggctggaacattatgagtgctcaataaatataaactaatgagaatggtggtgatgga

SEQ ID NO: 127037 - DNA, 5586 bp, Homo sapiens
  Payload ID: 4892
  Gene Symbol: PPIP5K1
  Gene Name: diphosphoinositol pentakisphosphate kinase 1
  Uniprot ID: Q6PFW1
  ENST ID: ENST00000334933
  CDS Start-End: 148-4374
aggttcggctgcgcgagcggagggaggcggttccctcttatgcttttcatctccatccccagccccacccacagccagggggcttgggttctgagctgatggggtacccccctctgcagagcgggatgagtgggtgttccggcagggatgtggtcattgacggccagtgagggcgagagtaccacggcccacttcttccttggagctggagatgaggggctgggcacccgtggaataggcatgaggccagaagagagtgacagcgagctccttgaggatgaggaggatgaagtgcctcctgaacctcagatcattgttggcatctgtgccatgaccaagaaatccaagtccaagccaatgactcaaatcctagagcgactctgcagatttgactacctgactgttgtcattctgggagaagatgtaatccttaatgaacctgtggaaaactggccatcctgccactgcctcatctctttccactccaaaggctttcctctggacaaagctgttgcttactccaagcttcgaaacccctttcttatcaatgatctggccatgcagtattacatccaagataggagggaggtgtaccggatcctgcaggaagagggtattgatctgcctcgatatgctgtgctcaaccgtgatcctgcccggcctgaggaatgcaacctgatagaaggtgaagaccaagtagaggtcaatggagctgtctttcccaagccctttgtggagaagccagtgagtgcagaagaccacaatgtttacatctactaccccagctcagctggaggaggaagccagcgtctctttcgtaagattggcagccgaagcagtgtttactctcctgagagcagcgtccgaaagacggggtcgtacatctatgaggagtttatgccaacagatggcacagatgtcaaggtgtatacagtggggccagattatgcccatgctgaagctagaaaatctccagctttggatgggaaggttgaacgagacagtgaggggaaagagattcgatatccagtcatgctgactgccatggaaaagctggtggccaggaaagtctgcgtagctttcaagcaaacagtttgtggatttgaccttcttcgtgccaatggtcattcctttgtgtgtgatgtcaatggctttagttttgtcaagaactcgatgaaatactacgatgactgtgccaagattctggggaacaccataatgcgggagcttgccccacagttccagattccatggtccatccccacggaggctgaggacattcccattgttcccaccacatctggcactatgatggaacttcgttgtgtcattgcaattattcgtcatggggatcgtactcccaagcagaagatgaagatggaagtgaaacacccaaggttttttgctctgtttgaaaaacatggtggctacaagacagggaaattaaaactcaagcgacctgagcagctccaggaggtgctggatatcacaaggctgttgttggctgaactggagaaagaaccaggtggtgagatcgaggagaagactggaaaactagagcagctgaagtctgtactggagatgtatggtcacttctcaggtataaaccggaaggtacaattgacttactaccctcatggagtaaaagcttctaatgaggggcaagatccacagagggaaactctggccccatctctgttgctggtactgaagtggggtggagaactgactcctgctggccgtgttcaggctgaggagctggggcgagcttttcgctgcatgtaccctggaggacagggtgactatgctggcttccctggttgtgggctgcttcgtctccatagcactttccgccacgatctcaagatctatgcctctgatgagggtcgtgttcagatgactgctgctgccttcgccaagggccttctggctctagaaggggagctgacacccattttggtgcaaatggtgaagagtgccaacatgaatgggctactggacagcgatggggattccttgagcagctgccagcaccgggtgaaggctcggctgcaccatattctacagcaggatgcgccctttggccctgaggactacgatcagctggctcccaccagaagtacttccctgctcaactccatgactatcatccagaatcctgtgaaggtctgtgatcaggtatttgccctgatcgaaaacctcacccaccagatccgggaacgaatgcaggaccccaggtctgtagacctgcagctctaccacagtgagacactagagctaatgctacagcgttggagcaagctggagcgtgactttcgacagaagagtgggcgctatgatatcagtaagatccctgacatctatgactgtgtcaagtatgatgtgcagcacaatgggagtctgggacttcaaggcacagcagagttgctccgtctctctaaggcactggctgatgtggtcattccccaggagtacgggatcagtcgggaggagaaactggaaattgctgtgggcttctgtcttccactgttgcggaagatactacttgacctgcagagaacccacgaggatgagtctgtcaacaagctgcatcccctgtactcccgaggcgtgctctccccaggtcgccacgttcgaacgcgtctctatttcaccagtgagagccatgtccactccctgctcagtgtcttccgttatggaggacttcttgatgagacccaggatgcacaatggcagcgagctttggattatcttagtgccatctcagagcttaactacatgacccagattgtcatcatgctttatgaggacaacacacaggatcccttatcagaggaacggttccatgtggagctacacttcagccccggagtgaaaggtgttgaggaagaaggcagtgccccggctggctgtggattccgtccagcctcttctgagaatgaggagatgaaaaccaaccaaggcagtatggagaacctgtgtccaggaaaggcatcagatgaaccagaccgggcattgcagacttcaccccagcctcctgagggccctggccttccgaggagatcacccctcattcgtaaccgaaaagctggttccatggaggtactttctgagacttcatcctcgaggcctggtggctaccggctcttttcatcttcacggccacccacagaaatgaagcagagtggcctaggctcacagtgcacagggctgttcagcaccacagtgctgggtggctcctccagtgccccgaatcttcaggactacgcccgcagccatggcaaaaagctaccacctgccagtctgaagcaccgagatgggtttgaagggtgttccatggtgcctaccatctaccctctggaaacactgcataatgccctttccctacgtcaagtgagtgaattcttgagtagagtctgccagcgccacactgatgcccaggcacaggcatctgcagccctctttgattccatgcacagcagccaggcctcagataacccattttctccaccacgtactcttcattcacctcccctgcaactccagcagcgctctgagaagcccccttggtacagcagtggcccttctagcactgtgtccagtgctggtccttcttcccctactacagtagatggtaactcccaatttggcttcagtgatcaaccctccctaaattcacacgtggctgaagaacatcaaggccttgggctgctccaggagacccctgggagtggagcacaagagctctccatagaaggggagcaagagctttttgaaccaaatcagtccccacaggtgccacctatggaaaccagccagccatacgaggaggtcagccagccatgtcaggaggtccctgacatcagccagccatgccaggacatttctgaggcgctcagccagccatgtcagaaggtccctgacatcagccagcaatgccaggagaaccatgacaatggtaaccacacatgccaggaggtccctcacatcagccagccatgccagaagtccagccaactgtgccagaaagtctctgaggaagtttgccagctatgtctggagaactccgaggaggtcagccagccatgccagggggtctctgtggaggttggcaagctggtccataagttccatgtaggggttggtagcttggtccaggaaacccttgtagaagttggcagcccagctgaagagatccctgaggaggtcatccagccataccaggagttctctgtggaggttggcaggctggcccaggagacttctgcgatcaatctgttatctcagggcatccctgagattgataaaccatcccaagagttccctgaggagattgatctgcaggcccaggaggtccctgaggagataaattagaagtcctgggtggtccctgaagtgattgatcagctgcctggagagggtattcctcaagcccagcatccatctggtgatccaaaccctcagagccagtctctagcccatgaccagcactcaccccttccaccagcaacatgtgattaattttctcattagtggtatcacactataccagccatttgagccagcaaccttttctgttggctaactcactggccagctctcaccagcggtgtctggggaagtagttctctttgtatgaagcatacctgtgccagagctgtggttgaggaggagccagttttaggttcgaagaagccattggctcctcacttagccattagacttgaataggatttccttggggtgggttggtctgtcattacccagccttctctgagcatcctaggaaatcacagattgttaaaggaaatgccgcttcactgctgaagacaccatctggcgacagcaaatgcaaaagaggggactctagggtcttcacttttctggggaaatgttcacgacttctcaaggtacgcttagaccatatgtgcattcaggggactcttgtctttgccagcactcctcaggtgagcccgggatggctatctgaaatgtctggaaaatagagtcccttccccaaacatctgacatggccactaaatctttagacttgccttatagatccttccatatcatccccaagtgccccttctgcctcagtcctgttcctctgggcaatagctctagggaaaagtaggtattagactgctgtgcaaaattcagagcaactacttaaaatgctctagaggattcttagccagtctgtgaaagtgggcctcctctgtggtggggctgtttggcttaggagatgctgtagtagtagagataatcaggttctattttaagcaatcagcagagatcaatattgtacagatacaagcaaaggtttaataaatatatatatatatatttatttctgtagttgtgccagggacagactggccaaagaccaaacactgcagggtccccaagaaatttgtccttatatcattgtgtctgagggccagatatgattatgaagctttttccaaagatccagggatgggaatgggagtgggtaggaggggtaatgcggtcattggagtcgggggctggaacattatgagtgctcaataaatataaactaatgagaatggtggtgatgga

SEQ ID NO: 127038 - DNA, 5559 bp, Homo sapiens
  Payload ID: 4892
  Gene Symbol: PPIP5K1
  Gene Name: diphosphoinositol pentakisphosphate kinase 1
  Uniprot ID: Q6PFW1
  ENST ID: ENST00000360135
  CDS Start-End: 127-4347
gcgggactcaagagtagccttcctcgaggacctgcctttcccatttgctgcctgaagttaatgtttcttgctggccaaatcagggacatgccggcattagcgggatgagtgggtgttccggcagggatgtggtcattgacggccagtgagggcgagagtaccacggcccacttcttccttggagctggagatgaggggctgggcacccgtggaataggcatgaggccagaagagagtgacagcgagctccttgaggatgaggaggatgaagtgcctcctgaacctcagatcattgttggcatctgtgccatgaccaagaaatccaagtccaagccaatgactcaaatcctagagcgactctgcagatttgactacctgactgttgtcattctgggagaagatgtaatccttaatgaacctgtggaaaactggccatcctgccactgcctcatctctttccactccaaaggctttcctctggacaaagctgttgcttactccaagcttcgaaacccctttcttatcaatgatctggccatgcagtattacatccaagataggagggaggtgtaccggatcctgcaggaagagggtattgatctgcctcgatatgctgtgctcaaccgtgatcctgcccggcctgaggaatgcaacctgatagaaggtgaagaccaagtagaggtcaatggagctgtctttcccaagccctttgtggagaagccagtgagtgcagaagaccacaatgtttacatctactaccccagctcagctggaggaggaagccagcgtctctttcgtaagattggcagccgaagcagtgtttactctcctgagagcagcgtccgaaagacggggtcgtacatctatgaggagtttatgccaacagatggcacagatgtcaaggtgtatacagtggggccagattatgcccatgctgaagctagaaaatctccagctttggatgggaaggttgaacgagacagtgaggggaaagagattcgatatccagtcatgctgactgccatggaaaagctggtggccaggaaagtctgcgtagctttcaagcaaacagtttgtggatttgaccttcttcgtgccaatggtcattcctttgtgtgtgatgtcaatggctttagttttgtcaagaactcgatgaaatactacgatgactgtgccaagattctggggaacaccataatgcgggagcttgccccacagttccagattccatggtccatccccacggaggctgaggacattcccattgttcccaccacatctggcactatgatggaacttcgttgtgtcattgcaattattcgtcatggggatcgtactcccaagcagaagatgaagatggaagtgaaacacccaaggttttttgctctgtttgaaaaacatggtggctacaagacagggaaattaaaactcaagcgacctgagcagctccaggaggtgctggatatcacaaggctgttgttggctgaactggagaaagaaccaggtggtgagatcgaggagaagactggaaaactagagcagctgaagtctgtactggagatgtatggtcacttctcaggtataaaccggaaggtacaattgacttactaccctcatggagtaaaagcttctaatgaggggcaagatccacagagggaaactctggccccatctctgttgctggtactgaagtggggtggagaactgactcctgctggccgtgttcaggctgaggagctggggcgagcttttcgctgcatgtaccctggaggacagggtgactatgctggcttccctggttgtgggctgcttcgtctccatagcactttccgccacgatctcaagatctatgcctctgatgagggtcgtgttcagatgactgctgctgccttcgccaagggccttctggctctagaaggggagctgacacccattttggtgcaaatggtgaagagtgccaacatgaatgggctactggacagcgatggggattccttgagcagctgccagcaccgggtgaaggctcggctgcaccatattctacagcaggatgcgccctttggccctgaggactacgatcagctggctcccaccagaagtacttccctgctcaactccatgactatcatccagaatcctgtgaaggtctgtgatcaggtatttgccctgatcgaaaacctcacccaccagatccgggaacgaatgcaggaccccaggtctgtagacctgcagctctaccacagtgagacactagagctaatgctacagcgttggagcaagctggagcgtgactttcgacagaagagtgggcgctatgatatcagtaagatccctgacatctatgactgtgtcaagtatgatgtgcagcacaatgggagtctgggacttcaaggcacagcagagttgctccgtctctctaaggcactggctgatgtggtcattccccaggagtacgggatcagtcgggaggagaaactggaaattgctgtgggcttctgtcttccactgttgcggaagatactacttgacctgcagagaacccacgaggatgagtctgtcaacaagctgcatcccctgtactcccgaggcgtgctctccccaggtcgccacgttcgaacgcgtctctatttcaccagtgagagccatgtccactccctgctcagtgtcttccgttatggaggacttcttgatgagacccaggatgcacaatggcagcgagctttggattatcttagtgccatctcagagcttaactacatgacccagattgtcatcatgctttatgaggacaacacacaggatcccttatcagaggaacggttccatgtggagctacacttcagccccggagtgaaaggtgttgaggaagaaggcagtgccccggctggctgtggattccgtccagcctcttctgagaatgaggagatgaaaaccaaccaaggcagtatggagaacctgtgtccaggaaaggcatcagatgaaccagaccgggcattgcagacttcaccccagcctcctgagggccctggccttccgaggagatcacccctcattcgtaaccgaaaagctggttccatggaggtactttctgagacttcatcctcgaggcctggtggctaccggctcttttcatcttcacggccacccacagaaatgaagcagagtggcctagggtttgaagggtgttccatggtgcctaccatctaccctctggaaacactgcataatgccctttccctacgtcaagtgagtgaattcttgagtagagtctgccagcgccacactgatgcccaggcacaggcatctgcagccctctttgattccatgcacagcagccaggcctcagataacccattttctccaccacgtactcttcattcacctcccctgcaactccagcagcgctctgagaagcccccttggttagagacaaggttttgccatgttggccaggctggtttagagctcctgacctcaagtgatctgcctgcctcggcctcccaaagtgctgggattacaggcgtgagccaccgcacccagccagacagcagtggcccttctagcactgtgtccagtgctggtccttcttcccctactacagtagatggtaactcccaatttggcttcagtgatcaaccctccctaaattcacacgtggctgaagaacatcaaggccttgggctgctccaggagacccctgggagtggagcacaagagctctccatagaaggggagcaagagctttttgaaccaaatcagtccccacaggtgccacctatggaaaccagccagccatacgaggaggtcagccagccatgtcaggaggtccctgacatcagccagccatgccaggacatttctgaggcgctcagccagccatgtcagaaggtccctgacatcagccagcaatgccaggagaaccatgacaatggtaaccacacatgccaggaggtccctcacatcagccagccatgccagaagtccagccaactgtgccagaaagtctctgaggaagtttgccagctatgtctggagaactccgaggaggtcagccagccatgccagggggtctctgtggaggttggcaagctggtccataagttccatgtaggggttggtagcttggtccaggaaacccttgtagaagttggcagcccagctgaagagatccctgaggaggtcatccagccataccaggagttctctgtggaggttggcaggctggcccaggagacttctgcgatcaatctgttatctcagggcatccctgagattgataaaccatcccaagagttccctgaggagattgatctgcaggcccaggaggtccctgaggagataaattagaagtcctgggtggtccctgaagtgattgatcagctgcctggagagggtattcctcaagcccagcatccatctggtgatccaaaccctcagagccagtctctagcccatgaccagcactcaccccttccaccagcaacatgtgattaattttctcattagtggtatcacactataccagccatttgagccagcaaccttttctgttggctaactcactggccagctctcaccagcggtgtctggggaagtagttctctttgtatgaagcatacctgtgccagagctgtggttgaggaggagccagttttaggttcgaagaagccattggctcctcacttagccattagacttgaataggatttccttggggtgggttggtctgtcattacccagccttctctgagcatcctaggaaatcacagattgttaaaggaaatgccgcttcactgctgaagacaccatctggcgacagcaaatgcaaaagaggggactctagggtcttcacttttctggggaaatgttcacgacttctcaaggtacgcttagaccatatgtgcattcaggggactcttgtctttgccagcactcctcaggtgagcccgggatggctatctgaaatgtctggaaaatagagtcccttccccaaacatctgacatggccactaaatctttagacttgccttatagatccttccatatcatccccaagtgccccttctgcctcagtcctgttcctctgggcaatagctctagggaaaagtaggtattagactgctgtgcaaaattcagagcaactacttaaaatgctctagaggattcttagccagtctgtgaaagtgggcctcctctgtggtggggctgtttggcttaggagatgctgtagtagtagagataatcaggttctattttaagcaatcagcagagatcaatattgtacagatacaagcaaaggtttaataaatatatatatatatatttatttctgtagttgtgccagggacagactggccaaagaccaaacactgcagggtccccaagaaatttgtccttatatcattgtgtctgagggccagatatgattatgaagctttttccaaagatccagggatgggaatgggagtgggtaggaggggtaatgcggtcattggagtcgggggctggaacattatgagtgctcaataaatataaactaatgagaatggtggtgatgga

SEQ ID NO: 127039 - DNA, 5565 bp, Homo sapiens
  Payload ID: 4892
  Gene Symbol: PPIP5K1
  Gene Name: diphosphoinositol pentakisphosphate kinase 1
  Uniprot ID: Q6PFW1
  ENST ID: ENST00000360301
  CDS Start-End: 127-4353
gcgggactcaagagtagccttcctcgaggacctgcctttcccatttgctgcctgaagttaatgtttcttgctggccaaatcagggacatgccggcattagcgggatgagtgggtgttccggcagggatgtggtcattgacggccagtgagggcgagagtaccacggcccacttcttccttggagctggagatgaggggctgggcacccgtggaataggcatgaggccagaagagagtgacagcgagctccttgaggatgaggaggatgaagtgcctcctgaacctcagatcattgttggcatctgtgccatgaccaagaaatccaagtccaagccaatgactcaaatcctagagcgactctgcagatttgactacctgactgttgtcattctgggagaagatgtaatccttaatgaacctgtggaaaactggccatcctgccactgcctcatctctttccactccaaaggctttcctctggacaaagctgttgcttactccaagcttcgaaacccctttcttatcaatgatctggccatgcagtattacatccaagataggagggaggtgtaccggatcctgcaggaagagggtattgatctgcctcgatatgctgtgctcaaccgtgatcctgcccggcctgaggaatgcaacctgatagaaggtgaagaccaagtagaggtcaatggagctgtctttcccaagccctttgtggagaagccagtgagtgcagaagaccacaatgtttacatctactaccccagctcagctggaggaggaagccagcgtctctttcgtaagattggcagccgaagcagtgtttactctcctgagagcagcgtccgaaagacggggtcgtacatctatgaggagtttatgccaacagatggcacagatgtcaaggtgtatacagtggggccagattatgcccatgctgaagctagaaaatctccagctttggatgggaaggttgaacgagacagtgaggggaaagagattcgatatccagtcatgctgactgccatggaaaagctggtggccaggaaagtctgcgtagctttcaagcaaacagtttgtggatttgaccttcttcgtgccaatggtcattcctttgtgtgtgatgtcaatggctttagttttgtcaagaactcgatgaaatactacgatgactgtgccaagattctggggaacaccataatgcgggagcttgccccacagttccagattccatggtccatccccacggaggctgaggacattcccattgttcccaccacatctggcactatgatggaacttcgttgtgtcattgcaattattcgtcatggggatcgtactcccaagcagaagatgaagatggaagtgaaacacccaaggttttttgctctgtttgaaaaacatggtggctacaagacagggaaattaaaactcaagcgacctgagcagctccaggaggtgctggatatcacaaggctgttgttggctgaactggagaaagaaccaggtggtgagatcgaggagaagactggaaaactagagcagctgaagtctgtactggagatgtatggtcacttctcaggtataaaccggaaggtacaattgacttactaccctcatggagtaaaagcttctaatgaggggcaagatccacagagggaaactctggccccatctctgttgctggtactgaagtggggtggagaactgactcctgctggccgtgttcaggctgaggagctggggcgagcttttcgctgcatgtaccctggaggacagggtgactatgctggcttccctggttgtgggctgcttcgtctccatagcactttccgccacgatctcaagatctatgcctctgatgagggtcgtgttcagatgactgctgctgccttcgccaagggccttctggctctagaaggggagctgacacccattttggtgcaaatggtgaagagtgccaacatgaatgggctactggacagcgatggggattccttgagcagctgccagcaccgggtgaaggctcggctgcaccatattctacagcaggatgcgccctttggccctgaggactacgatcagctggctcccaccagaagtacttccctgctcaactccatgactatcatccagaatcctgtgaaggtctgtgatcaggtatttgccctgatcgaaaacctcacccaccagatccgggaacgaatgcaggaccccaggtctgtagacctgcagctctaccacagtgagacactagagctaatgctacagcgttggagcaagctggagcgtgactttcgacagaagagtgggcgctatgatatcagtaagatccctgacatctatgactgtgtcaagtatgatgtgcagcacaatgggagtctgggacttcaaggcacagcagagttgctccgtctctctaaggcactggctgatgtggtcattccccaggagtacgggatcagtcgggaggagaaactggaaattgctgtgggcttctgtcttccactgttgcggaagatactacttgacctgcagagaacccacgaggatgagtctgtcaacaagctgcatcccctgtactcccgaggcgtgctctccccaggtcgccacgttcgaacgcgtctctatttcaccagtgagagccatgtccactccctgctcagtgtcttccgttatggaggacttcttgatgagacccaggatgcacaatggcagcgagctttggattatcttagtgccatctcagagcttaactacatgacccagattgtcatcatgctttatgaggacaacacacaggatcccttatcagaggaacggttccatgtggagctacacttcagccccggagtgaaaggtgttgaggaagaaggcagtgccccggctggctgtggattccgtccagcctcttctgagaatgaggagatgaaaaccaaccaaggcagtatggagaacctgtgtccaggaaaggcatcagatgaaccagaccgggcattgcagacttcaccccagcctcctgagggccctggccttccgaggagatcacccctcattcgtaaccgaaaagctggttccatggaggtactttctgagacttcatcctcgaggcctggtggctaccggctcttttcatcttcacggccacccacagaaatgaagcagagtggcctaggctcacagtgcacagggctgttcagcaccacagtgctgggtggctcctccagtgccccgaatcttcaggactacgcccgcagccatggcaaaaagctaccacctgccagtctgaagcaccgagatgggtttgaagggtgttccatggtgcctaccatctaccctctggaaacactgcataatgccctttccctacgtcaagtgagtgaattcttgagtagagtctgccagcgccacactgatgcccaggcacaggcatctgcagccctctttgattccatgcacagcagccaggcctcagataacccattttctccaccacgtactcttcattcacctcccctgcaactccagcagcgctctgagaagcccccttggtacagcagtggcccttctagcactgtgtccagtgctggtccttcttcccctactacagtagatggtaactcccaatttggcttcagtgatcaaccctccctaaattcacacgtggctgaagaacatcaaggccttgggctgctccaggagacccctgggagtggagcacaagagctctccatagaaggggagcaagagctttttgaaccaaatcagtccccacaggtgccacctatggaaaccagccagccatacgaggaggtcagccagccatgtcaggaggtccctgacatcagccagccatgccaggacatttctgaggcgctcagccagccatgtcagaaggtccctgacatcagccagcaatgccaggagaaccatgacaatggtaaccacacatgccaggaggtccctcacatcagccagccatgccagaagtccagccaactgtgccagaaagtctctgaggaagtttgccagctatgtctggagaactccgaggaggtcagccagccatgccagggggtctctgtggaggttggcaagctggtccataagttccatgtaggggttggtagcttggtccaggaaacccttgtagaagttggcagcccagctgaagagatccctgaggaggtcatccagccataccaggagttctctgtggaggttggcaggctggcccaggagacttctgcgatcaatctgttatctcagggcatccctgagattgataaaccatcccaagagttccctgaggagattgatctgcaggcccaggaggtccctgaggagataaattagaagtcctgggtggtccctgaagtgattgatcagctgcctggagagggtattcctcaagcccagcatccatctggtgatccaaaccctcagagccagtctctagcccatgaccagcactcaccccttccaccagcaacatgtgattaattttctcattagtggtatcacactataccagccatttgagccagcaaccttttctgttggctaactcactggccagctctcaccagcggtgtctggggaagtagttctctttgtatgaagcatacctgtgccagagctgtggttgaggaggagccagttttaggttcgaagaagccattggctcctcacttagccattagacttgaataggatttccttggggtgggttggtctgtcattacccagccttctctgagcatcctaggaaatcacagattgttaaaggaaatgccgcttcactgctgaagacaccatctggcgacagcaaatgcaaaagaggggactctagggtcttcacttttctggggaaatgttcacgacttctcaaggtacgcttagaccatatgtgcattcaggggactcttgtctttgccagcactcctcaggtgagcccgggatggctatctgaaatgtctggaaaatagagtcccttccccaaacatctgacatggccactaaatctttagacttgccttatagatccttccatatcatccccaagtgccccttctgcctcagtcctgttcctctgggcaatagctctagggaaaagtaggtattagactgctgtgcaaaattcagagcaactacttaaaatgctctagaggattcttagccagtctgtgaaagtgggcctcctctgtggtggggctgtttggcttaggagatgctgtagtagtagagataatcaggttctattttaagcaatcagcagagatcaatattgtacagatacaagcaaaggtttaataaatatatatatatatatttatttctgtagttgtgccagggacagactggccaaagaccaaacactgcagggtccccaagaaatttgtccttatatcattgtgtctgagggccagatatgattatgaagctttttccaaagatccagggatgggaatgggagtgggtaggaggggtaatgcggtcattggagtcgggggctggaacattatgagtgctcaataaatataaactaatgagaatggtggtgatgga

SEQ ID NO: 127040 - DNA, 5487 bp, Homo sapiens
  Payload ID: 4892
  Gene Symbol: PPIP5K1
  Gene Name: diphosphoinositol pentakisphosphate kinase 1
  ENST ID: ENST00000381879
  CDS Start-End: 59-4288
aggttcggctgcgcgagcggagggaggcggagcgggatgagtgggtgttccggcagggatgtggtcattgacggccagtgagggcgagagtaccacggcccacttcttccttggagctggagatgaggggctgggcacccgtggaataggcatgaggccagaagagagtgacagcgagctccttgaggatgaggaggatgaagtgcctcctgaacctcagatcattgttggcatctgtgccatgaccaagaaatccaagtccaagccaatgactcaaatcctagagcgactctgcagatttgactacctgactgttgtcattctgggagaagatgtaatccttaatgaacctgtggaaaactggccatcctgccactgcctcatctctttccactccaaaggctttcctctggacaaagctgttgcttactccaagcttcgaaacccctttcttatcaatgatctggccatgcagtattacatccaagataggagggaggtgtaccggatcctgcaggaagagggtattgatctgcctcgatatgctgtgctcaaccgtgatcctgcccggcctgaggaatgcaacctgatagaaggtgaagaccaagtagaggtcaatggagctgtctttcccaagccctttgtggagaagccagtgagtgcagaagaccacaatgtttacatctactaccccagctcagctggaggaggaagccagcgtctctttcgtaagattggcagccgaagcagtgtttactctcctgagagcagcgtccgaaagacggggtcgtacatctatgaggagtttatgccaacagatggcacagatgtcaaggtgtatacagtggggccagattatgcccatgctgaagctagaaaatctccagctttggatgggaaggttgaacgagacagtgaggggaaagagattcgatatccagtcatgctgactgccatggaaaagctggtggccaggaaagtctgcgtagctttcaagcaaacagtttgtggatttgaccttcttcgtgccaatggtcattcctttgtgtgtgatgtcaatggctttagttttgtcaagaactcgatgaaatactacgatgactgtgccaagattctggggaacaccataatgcgggagcttgccccacagttccagattccatggtccatccccacggaggctgaggacattcccattgttcccaccacatctggcactatgatggaacttcgttgtgtcattgcaattattcgtcatggggatcgtactcccaagcagaagatgaagatggaagtgaaacacccaaggttttttgctctgtttgaaaaacatggtggctacaagacagggaaattaaaactcaagcgacctgagcagctccaggaggtgctggatatcacaaggctgttgttggctgaactggagaaagaaccaggtggtgagatcgaggagaagactggaaaactagagcagctgaagtctgtactggagatgtatggtcacttctcaggtataaaccggaaggtacaattgacttactaccctcatggagtaaaagcttctaatgaggggcaagatccacagagggaaactctggccccatctctgttgctggtactgaagtggggtggagaactgactcctgctggccgtgttcaggctgaggagctggggcgagcttttcgctgcatgtaccctggaggacagggtgactatgctggcttccctggttgtgggctgcttcgtctccatagcactttccgccacgatctcaagatctatgcctctgatgagggtcgtgttcagatgactgctgctgccttcgccaagggccttctggctctagaaggggagctgacacccattttggtgcaaatggtgaagagtgccaacatgaatgggctactggacagcgatggggattccttgagcagctgccagcaccgggtgaaggctcggctgcaccatattctacagcaggatgcgccctttggccctgaggactacgatcagctggctcccaccagaagtacttccctgctcaactccatgactatcatccagaatcctgtgaaggtctgtgatcaggtatttgccctgatcgaaaacctcacccaccagatccgggaacgaatgcaggaccccaggtctgtagacctgcagctctaccacagtgagacactagagctaatgctacagcgttggagcaagctggagcgtgactttcgacagaagagtgggcgctatgatatcagtaagatccctgacatctatgactgtgtcaagtatgatgtgcagcacaatgggagtctgggacttcaaggcacagcagagttgctccgtctctctaaggcactggctgatgtggtcattccccaggagtacgggatcagtcgggaggagaaactggaaattgctgtgggcttctgtcttccactgttgcggaagatactacttgacctgcagagaacccacgaggatgagtctgtcaacaagctgcatccccttgagagccatgtccactccctgctcagtgtcttccgttatggaggacttcttgatgagacccaggatgcacaatggcagcgagctttggattatcttagtgccatctcagagcttaactacatgacccagattgtcatcatgctttatgaggacaacacacaggatcccttatcagaggaacggttccatgtggagctacacttcagccccggagtgaaaggtgttgaggaagaaggcagtgccccggctggctgtggattccgtccagcctcttctgagaatgaggagatgaaaaccaaccaaggcagtatggagaacctgtgtccaggaaaggcatcagatgaaccagaccgggcattgcagacttcaccccagcctcctgagggccctggccttccgaggagatcacccctcattcgtaaccgaaaagctggttccatggaggtactttctgagacttcatcctcgaggcctggtggctaccggctcttttcatcttcacggccacccacagaaatgaagcagagtggcctaggctcacagtgcacagggctgttcagcaccacagtgctgggtggctcctccagtgccccgaatcttcaggactacgcccgcagccatggcaaaaagctaccacctgccagtctgaagcaccgagatgagctcttgtttgtcccggccgtaaaacgattttctgtgtcgtttgcaaagcatccgactaacgggtttgaagggtgttccatggtgcctaccatctaccctctggaaacactgcataatgccctttccctacgtcaagtgagtgaattcttgagtagagtctgccagcgccacactgatgcccaggcacaggcatctgcagccctctttgattccatgcacagcagccaggcctcagataacccattttctccaccacgtactcttcattcacctcccctgcaactccagcagcgctctgagaagcccccttggtacagcagtggcccttctagcactgtgtccagtgctggtccttcttcccctactacagtagatggtaactcccaatttggcttcagtgatcaaccctccctaaattcacacgtggctgaagaacatcaaggccttgggctgctccaggagacccctgggagtggagcacaagagctctccatagaaggggagcaagagctttttgaaccaaatcagtccccacaggtgccacctatggaaaccagccagccatacgaggaggtcagccagccatgtcaggaggtccctgacatcagccagccatgccaggacatttctgaggcgctcagccagccatgtcagaaggtccctgacatcagccagcaatgccaggagaaccatgacaatggtaaccacacatgccaggaggtccctcacatcagccagccatgccagaagtccagccaactgtgccagaaagtctctgaggaagtttgccagctatgtctggagaactccgaggaggtcagccagccatgccagggggtctctgtggaggttggcaagctggtccataagttccatgtaggggttggtagcttggtccaggaaacccttgtagaagttggcagcccagctgaagagatccctgaggaggtcatccagccataccaggagttctctgtggaggttggcaggctggcccaggagacttctgcgatcaatctgttatctcagggcatccctgagattgataaaccatcccaagagttccctgaggagattgatctgcaggcccaggaggtccctgaggagataaattagaagtcctgggtggtccctgaagtgattgatcagctgcctggagagggtattcctcaagcccagcatccatctggtgatccaaaccctcagagccagtctctagcccatgaccagcactcaccccttccaccagcaacatgtgattaattttctcattagtggtatcacactataccagccatttgagccagcaaccttttctgttggctaactcactggccagctctcaccagcggtgtctggggaagtagttctctttgtatgaagcatacctgtgccagagctgtggttgaggaggagccagttttaggttcgaagaagccattggctcctcacttagccattagacttgaataggatttccttggggtgggttggtctgtcattacccagccttctctgagcatcctaggaaatcacagattgttaaaggaaatgccgcttcactgctgaagacaccatctggcgacagcaaatgcaaaagaggggactctagggtcttcacttttctggggaaatgttcacgacttctcaaggtacgcttagaccatatgtgcattcaggggactcttgtctttgccagcactcctcaggtgagcccgggatggctatctgaaatgtctggaaaatagagtcccttccccaaacatctgacatggccactaaatctttagacttgccttatagatccttccatatcatccccaagtgccccttctgcctcagtcctgttcctctgggcaatagctctagggaaaagtaggtattagactgctgtgcaaaattcagagcaactacttaaaatgctctagaggattcttagccagtctgtgaaagtgggcctcctctgtggtggggctgtttggcttaggagatgctgtagtagtagagataatcaggttctattttaagcaatcagcagagatcaatattgtacagatacaagcaaaggtttaataaatatatatatatatatttatttctgtagttgtgccagggacagactggccaaagaccaaacactgcagggtccccaagaaatttgtccttatatcattgtgtctgagggccagatatgattatgaagctttttccaaagatccagggatgggaatgggagtgggtaggaggggtaatgcggtcattggagtcgggggctggaacattatgagtgctcaataaatataaactaatgagaa

SEQ ID NO: 127041 - DNA, 5596 bp, Homo sapiens
  Payload ID: 4892
  Gene Symbol: PPIP5K1
  Gene Name: diphosphoinositol pentakisphosphate kinase 1
  ENST ID: ENST00000381885
  CDS Start-End: 95-4384
tgcctttcccatttgctgcctgaagttaatgtttcttgctggccaaatcagggacatgccggcattagcgggatgagtgggtgttccggcagggatgtggtcattgacggccagtgagggcgagagtaccacggcccacttcttccttggagctggagatgaggggctgggcacccgtggaataggcatgaggccagaagagagtgacagcgagctccttgaggatgaggaggatgaagtgcctcctgaacctcagatcattgttggcatctgtgccatgaccaagaaatccaagtccaagccaatgactcaaatcctagagcgactctgcagatttgactacctgactgttgtcattctgggagaagatgtaatccttaatgaacctgtggaaaactggccatcctgccactgcctcatctctttccactccaaaggctttcctctggacaaagctgttgcttactccaagcttcgaaacccctttcttatcaatgatctggccatgcagtattacatccaagataggagggaggtgtaccggatcctgcaggaagagggtattgatctgcctcgatatgctgtgctcaaccgtgatcctgcccggcctgaggaatgcaacctgatagaaggtgaagaccaagtagaggtcaatggagctgtctttcccaagccctttgtggagaagccagtgagtgcagaagaccacaatgtttacatctactaccccagctcagctggaggaggaagccagcgtctctttcgtaagattggcagccgaagcagtgtttactctcctgagagcagcgtccgaaagacggggtcgtacatctatgaggagtttatgccaacagatggcacagatgtcaaggtgtatacagtggggccagattatgcccatgctgaagctagaaaatctccagctttggatgggaaggttgaacgagacagtgaggggaaagagattcgatatccagtcatgctgactgccatggaaaagctggtggccaggaaagtctgcgtagctttcaagcaaacagtttgtggatttgaccttcttcgtgccaatggtcattcctttgtgtgtgatgtcaatggctttagttttgtcaagaactcgatgaaatactacgatgactgtgccaagattctggggaacaccataatgcgggagcttgccccacagttccagattccatggtccatccccacggaggctgaggacattcccattgttcccaccacatctggcactatgatggaacttcgttgtgtcattgcaattattcgtcatggggatcgtactcccaagcagaagatgaagatggaagtgaaacacccaaggttttttgctctgtttgaaaaacatggtggctacaagacagggaaattaaaactcaagcgacctgagcagctccaggaggtgctggatatcacaaggctgttgttggctgaactggagaaagaaccaggtggtgagatcgaggagaagactggaaaactagagcagctgaagtctgtactggagatgtatggtcacttctcaggtataaaccggaaggtacaattgacttactaccctcatggagtaaaagcttctaatgaggggcaagatccacagagggaaactctggccccatctctgttgctggtactgaagtggggtggagaactgactcctgctggccgtgttcaggctgaggagctggggcgagcttttcgctgcatgtaccctggaggacagggtgactatgctggcttccctggttgtgggctgcttcgtctccatagcactttccgccacgatctcaagatctatgcctctgatgagggtcgtgttcagatgactgctgctgccttcgccaagggccttctggctctagaaggggagctgacacccattttggtgcaaatggtgaagagtgccaacatgaatgggctactggacagcgatggggattccttgagcagctgccagcaccgggtgaaggctcggctgcaccatattctacagcaggatgcgccctttggccctgaggactacgatcagctggctcccaccagaagtacttccctgctcaactccatgactatcatccagaatcctgtgaaggtctgtgatcaggtatttgccctgatcgaaaacctcacccaccagatccgggaacgaatgcaggaccccaggtctgtagacctgcagctctaccacagtgagacactagagctaatgctacagcgttggagcaagctggagcgtgactttcgacagaagagtgggcgctatgatatcagtaagatccctgacatctatgactgtgtcaagtatgatgtgcagcacaatgggagtctgggacttcaaggcacagcagagttgctccgtctctctaaggcactggctgatgtggtcattccccaggagtacgggatcagtcgggaggagaaactggaaattgctgtgggcttctgtcttccactgttgcggaagatactacttgacctgcagagaacccacgaggatgagtctgtcaacaagctgcatcccctgtactcccgaggcgtgctctccccaggtcgccacgttcgaacgcgtctctatttcaccagtgagagccatgtccactccctgctcagtgtcttccgttatggaggacttcttgatgagacccaggatgcacaatggcagcgagctttggattatcttagtgccatctcagagcttaactacatgacccagattgtcatcatgctttatgaggacaacacacaggatcccttatcagaggaacggttccatgtggagctacacttcagccccggagtgaaaggtgttgaggaagaaggcagtgccccggctggctgtggattccgtccagcctcttctgagaatgaggagatgaaaaccaaccaaggcagtatggagaacctgtgtccaggaaaggcatcagatgaaccagaccgggcattgcagacttcaccccagcctcctgagggccctggccttccgaggagatcacccctcattcgtaaccgaaaagctggttccatggaggtactttctgagacttcatcctcgaggcctggtggctaccggctcttttcatcttcacggccacccacagaaatgaagcagagtggcctaggctcacagtgcacagggctgttcagcaccacagtgctgggtggctcctccagtgccccgaatcttcaggactacgcccgcagccatggcaaaaagctaccacctgccagtctgaagcaccgagatgagctcttgtttgtcccggccgtaaaacgattttctgtgtcgtttgcaaagcatccgactaacgggtttgaagggtgttccatggtgcctaccatctaccctctggaaacactgcataatgccctttccctacgtcaagtgagtgaattcttgagtagagtctgccagcgccacactgatgcccaggcacaggcatctgcagccctctttgattccatgcacagcagccaggcctcagataacccattttctccaccacgtactcttcattcacctcccctgcaactccagcagcgctctgagaagcccccttggtacagcagtggcccttctagcactgtgtccagtgctggtccttcttcccctactacagtagatggtaactcccaatttggcttcagtgatcaaccctccctaaattcacacgtggctgaagaacatcaaggccttgggctgctccaggagacccctgggagtggagcacaagagctctccatagaaggggagcaagagctttttgaaccaaatcagtccccacaggtgccacctatggaaaccagccagccatacgaggaggtcagccagccatgtcaggaggtccctgacatcagccagccatgccaggacatttctgaggcgctcagccagccatgtcagaaggtccctgacatcagccagcaatgccaggagaaccatgacaatggtaaccacacatgccaggaggtccctcacatcagccagccatgccagaagtccagccaactgtgccagaaagtctctgaggaagtttgccagctatgtctggagaactccgaggaggtcagccagccatgccagggggtctctgtggaggttggcaagctggtccataagttccatgtaggggttggtagcttggtccaggaaacccttgtagaagttggcagcccagctgaagagatccctgaggaggtcatccagccataccaggagttctctgtggaggttggcaggctggcccaggagacttctgcgatcaatctgttatctcagggcatccctgagattgataaaccatcccaagagttccctgaggagattgatctgcaggcccaggaggtccctgaggagataaattagaagtcctgggtggtccctgaagtgattgatcagctgcctggagagggtattcctcaagcccagcatccatctggtgatccaaaccctcagagccagtctctagcccatgaccagcactcaccccttccaccagcaacatgtgattaattttctcattagtggtatcacactataccagccatttgagccagcaaccttttctgttggctaactcactggccagctctcaccagcggtgtctggggaagtagttctctttgtatgaagcatacctgtgccagagctgtggttgaggaggagccagttttaggttcgaagaagccattggctcctcacttagccattagacttgaataggatttccttggggtgggttggtctgtcattacccagccttctctgagcatcctaggaaatcacagattgttaaaggaaatgccgcttcactgctgaagacaccatctggcgacagcaaatgcaaaagaggggactctagggtcttcacttttctggggaaatgttcacgacttctcaaggtacgcttagaccatatgtgcattcaggggactcttgtctttgccagcactcctcaggtgagcccgggatggctatctgaaatgtctggaaaatagagtcccttccccaaacatctgacatggccactaaatctttagacttgccttatagatccttccatatcatccccaagtgccccttctgcctcagtcctgttcctctgggcaatagctctagggaaaagtaggtattagactgctgtgcaaaattcagagcaactacttaaaatgctctagaggattcttagccagtctgtgaaagtgggcctcctctgtggtggggctgtttggcttaggagatgctgtagtagtagagataatcaggttctattttaagcaatcagcagagatcaatattgtacagatacaagcaaaggtttaataaatatatatatatatatttatttctgtagttgtgccagggacagactggccaaagaccaaacactgcagggtccccaagaaatttgtccttatatcattgtgtctgagggccagatatgattatgaagctttttccaaagatccagggatgggaatgggagtgggtaggaggggtaatgcggtcattggagtcgggggctggaacattatgagtgctcaataaatataaactaatgagaatggtggtgatgga

SEQ ID NO: 127042 - DNA, 5636 bp, Homo sapiens
  Payload ID: 4892
  Gene Symbol: PPIP5K1
  Gene Name: diphosphoinositol pentakisphosphate kinase 1
  Uniprot ID: Q6PFW1
  ENST ID: ENST00000396923
  CDS Start-End: 123-4424
gactcaagagtagccttcctcgaggacctgcctttcccatttgctgcctgaagttaatgtttcttgctggccaaatcagggacatgccggcattagcgggatgagtgggtgttccggcagggatgtggtcattgacggccagtgagggcgagagtaccacggcccacttcttccttggagctggagatgaggggctgggcacccgtggaataggcatgaggccagaagagagtgacagcgagctccttgaggatgaggaggatgaagtgcctcctgaacctcagatcattgttggcatctgtgccatgaccaagaaatccaagtccaagccaatgactcaaatcctagagcgactctgcagatttgactacctgactgttgtcattctgggagaagatgtaatccttaatgaacctgtggaaaactggccatcctgccactgcctcatctctttccactccaaaggctttcctctggacaaagctgttgcttactccaagcttcgaaacccctttcttatcaatgatctggccatgcagtattacatccaagataggagggaggtgtaccggatcctgcaggaagagggtattgatctgcctcgatatgctgtgctcaaccgtgatcctgcccggcctgaggaatgcaacctgatagaaggtgaagaccaagtagaggtcaatggagctgtctttcccaagccctttgtggagaagccagtgagtgcagaagaccacaatgtttacatctactaccccagctcagctggaggaggaagccagcgtctctttcgtaagattggcagccgaagcagtgtttactctcctgagagcagcgtccgaaagacggggtcgtacatctatgaggagtttatgccaacagatggcacagatgtcaaggtgtatacagtggggccagattatgcccatgctgaagctagaaaatctccagctttggatgggaaggttgaacgagacagtgaggggaaagagattcgatatccagtcatgctgactgccatggaaaagctggtggccaggaaagtctgcgtagctttcaagcaaacagtttgtggatttgaccttcttcgtgccaatggtcattcctttgtgtgtgatgtcaatggctttagttttgtcaagaactcgatgaaatactacgatgactgtgccaagattctggggaacaccataatgcgggagcttgccccacagttccagattccatggtccatccccacggaggctgaggacattcccattgttcccaccacatctggcactatgatggaacttcgttgtgtcattgcaattattcgtcatggggatcgtactcccaagcagaagatgaagatggaagtgaaacacccaaggttttttgctctgtttgaaaaacatggtggctacaagacagggaaattaaaactcaagcgacctgagcagctccaggaggtgctggatatcacaaggctgttgttggctgaactggagaaagaaccaggtggtgagatcgaggagaagactggaaaactagagcagctgaagtctgtactggagatgtatggtcacttctcaggtataaaccggaaggtacaattgacttactaccctcatggagtaaaagcttctaatgaggggcaagatccacagagggaaactctggccccatctctgttgctggtactgaagtggggtggagaactgactcctgctggccgtgttcaggctgaggagctggggcgagcttttcgctgcatgtaccctggaggacagggtgactatgctggcttccctggttgtgggctgcttcgtctccatagcactttccgccacgatctcaagatctatgcctctgatgagggtcgtgttcagatgactgctgctgccttcgccaagggccttctggctctagaaggggagctgacacccattttggtgcaaatggtgaagagtgccaacatgaatgggctactggacagcgatggggattccttgagcagctgccagcaccgggtgaaggctcggctgcaccatattctacagcaggatgcgccctttggccctgaggactacgatcagctggctcccaccagaagtacttccctgctcaactccatgactatcatccagaatcctgtgaaggtctgtgatcaggtatttgccctgatcgaaaacctcacccaccagatccgggaacgaatgcaggaccccaggtctgtagacctgcagctctaccacagtgagacactagagctaatgctacagcgttggagcaagctggagcgtgactttcgacagaagagtgggcgctatgatatcagtaagatccctgacatctatgactgtgtcaagtatgatgtgcagcacaatgggagtctgggacttcaaggcacagcagagttgctccgtctctctaaggcactggctgatgtggtcattccccaggagtacgggatcagtcgggaggagaaactggaaattgctgtgggcttctgtcttccactgttgcggaagatactacttgacctgcagagaacccacgaggatgagtctgtcaacaagctgcatcccctctgttatctcaggtactcccgaggcgtgctctccccaggtcgccacgttcgaacgcgtctctatttcaccagtgagagccatgtccactccctgctcagtgtcttccgttatggaggacttcttgatgagacccaggatgcacaatggcagcgagctttggattatcttagtgccatctcagagcttaactacatgacccagattgtcatcatgctttatgaggacaacacacaggatcccttatcagaggaacggttccatgtggagctacacttcagccccggagtgaaaggtgttgaggaagaaggcagtgccccggctggctgtggattccgtccagcctcttctgagaatgaggagatgaaaaccaaccaaggcagtatggagaacctgtgtccaggaaaggcatcagatgaaccagaccgggcattgcagacttcaccccagcctcctgagggccctggccttccgaggagatcacccctcattcgtaaccgaaaagctggttccatggaggtactttctgagacttcatcctcgaggcctggtggctaccggctcttttcatcttcacggccacccacagaaatgaagcagagtggcctaggctcacagtgcacagggctgttcagcaccacagtgctgggtggctcctccagtgccccgaatcttcaggactacgcccgcagccatggcaaaaagctaccacctgccagtctgaagcaccgagatgagctcttgtttgtcccggccgtaaaacgattttctgtgtcgtttgcaaagcatccgactaacgggtttgaagggtgttccatggtgcctaccatctaccctctggaaacactgcataatgccctttccctacgtcaagtgagtgaattcttgagtagagtctgccagcgccacactgatgcccaggcacaggcatctgcagccctctttgattccatgcacagcagccaggcctcagataacccattttctccaccacgtactcttcattcacctcccctgcaactccagcagcgctctgagaagcccccttggtacagcagtggcccttctagcactgtgtccagtgctggtccttcttcccctactacagtagatggtaactcccaatttggcttcagtgatcaaccctccctaaattcacacgtggctgaagaacatcaaggccttgggctgctccaggagacccctgggagtggagcacaagagctctccatagaaggggagcaagagctttttgaaccaaatcagtccccacaggtgccacctatggaaaccagccagccatacgaggaggtcagccagccatgtcaggaggtccctgacatcagccagccatgccaggacatttctgaggcgctcagccagccatgtcagaaggtccctgacatcagccagcaatgccaggagaaccatgacaatggtaaccacacatgccaggaggtccctcacatcagccagccatgccagaagtccagccaactgtgccagaaagtctctgaggaagtttgccagctatgtctggagaactccgaggaggtcagccagccatgccagggggtctctgtggaggttggcaagctggtccataagttccatgtaggggttggtagcttggtccaggaaacccttgtagaagttggcagcccagctgaagagatccctgaggaggtcatccagccataccaggagttctctgtggaggttggcaggctggcccaggagacttctgcgatcaatctgttatctcagggcatccctgagattgataaaccatcccaagagttccctgaggagattgatctgcaggcccaggaggtccctgaggagataaattagaagtcctgggtggtccctgaagtgattgatcagctgcctggagagggtattcctcaagcccagcatccatctggtgatccaaaccctcagagccagtctctagcccatgaccagcactcaccccttccaccagcaacatgtgattaattttctcattagtggtatcacactataccagccatttgagccagcaaccttttctgttggctaactcactggccagctctcaccagcggtgtctggggaagtagttctctttgtatgaagcatacctgtgccagagctgtggttgaggaggagccagttttaggttcgaagaagccattggctcctcacttagccattagacttgaataggatttccttggggtgggttggtctgtcattacccagccttctctgagcatcctaggaaatcacagattgttaaaggaaatgccgcttcactgctgaagacaccatctggcgacagcaaatgcaaaagaggggactctagggtcttcacttttctggggaaatgttcacgacttctcaaggtacgcttagaccatatgtgcattcaggggactcttgtctttgccagcactcctcaggtgagcccgggatggctatctgaaatgtctggaaaatagagtcccttccccaaacatctgacatggccactaaatctttagacttgccttatagatccttccatatcatccccaagtgccccttctgcctcagtcctgttcctctgggcaatagctctagggaaaagtaggtattagactgctgtgcaaaattcagagcaactacttaaaatgctctagaggattcttagccagtctgtgaaagtgggcctcctctgtggtggggctgtttggcttaggagatgctgtagtagtagagataatcaggttctattttaagcaatcagcagagatcaatattgtacagatacaagcaaaggtttaataaatatatatatatatatttatttctgtagttgtgccagggacagactggccaaagaccaaacactgcagggtccccaagaaatttgtccttatatcattgtgtctgagggccagatatgattatgaagctttttccaaagatccagggatgggaatgggagtgggtaggaggggtaatgcggtcattggagtcgggggctggaacattatgagtgctcaataaatataaactaatgagaatggtggtgatgga

SEQ ID NO: 127043 - DNA, 589 bp, Homo sapiens
  Payload ID: 4892
  Gene Symbol: PPIP5K1
  Gene Name: diphosphoinositol pentakisphosphate kinase 1
  ENST ID: ENST00000439195
  CDS Start-End: 1-589
tgcagacttcaccccagcctcctgagggccctggccttccgaggagatcacccctcattcgtaaccgaaaagctggttccatggaggtactttctgagacttcatcctcgaggcctggtggctaccggctcttttcatcttcacggccacccacagaaatgaagcagagtggcctaggctcacagtgcacagggctgttcagcaccacagtgctgggtggctcctccagtgccccgaatcttcaggactacgcccgcagccatggcaaaaagctaccacctgccagtctgaagcaccgagatgagctgctggatgaccagcaccctgtggtccggttgctgcgcagtttttcctctgactgtacagggggccggccagtctccttggatgccacgctggcgcatcacctgcaccagtgctcctaccacctgcgcctcttccggaactggctgcgctcaggccaggatgaccccgagtgcctctacgggtttgaagggtgttccatggtgcctaccatctaccctctggaaacactgcataatgccctttccctacgtcaagtgagtgaattcttgagtagagtctgcca

SEQ ID NO: 127044 - DNA, 535 bp, Homo sapiens
  Payload ID: 4892
  Gene Symbol: PPIP5K1
  Gene Name: diphosphoinositol pentakisphosphate kinase 1
  ENST ID: ENST00000417085
  CDS Start-End: 193-535
cggagggaggcgggactcaagagtagccttcctcgaggacctgcctttcccatttgctgcctgaagttaatgtttcttgctggccaaatcagggacatgccggcattccccacccacagccagggggcttgggttctgagctgatggggtacccccctctgcagagcgggatgagtgggtgttccggcagggatgtggtcattgacggccagtgagggcgagagtaccacggcccacttcttccttggagctggagatgaggggctgggcacccgtggaataggcatgaggccagaagagagtgacagcgagctccttgaggatgaggaggatgaagtgcctcctgaacctcagatcattgttggcatctgtgccatgaccaagaaatccaagtccaagccaatgactcaaatcctagagcgactctgcagatttgactacctgactgttgtcattctgggagaagatgtaatccttaatgaacctgtggaaaactggccatcctgccactgcctcatctctttccactccaaag

SEQ ID NO: 127045 - DNA, 5718 bp, Homo sapiens
  Payload ID: 4892
  Gene Symbol: PPIP5K1
  Gene Name: diphosphoinositol pentakisphosphate kinase 1
  Uniprot ID: Q6PFW1
  ENST ID: ENST00000420765
  CDS Start-End: 205-4506
accgcaaagaagtcgcgctttgattgggccgctgtcaggtgtcgctgcctgcaggttcggctgcgcgagcggagggaggcgggactcaagagtagccttcctcgaggacctgcctttcccatttgctgcctgaagttaatgtttcttgctggccaaatcagggacatgccggcattagcgggatgagtgggtgttccggcagggatgtggtcattgacggccagtgagggcgagagtaccacggcccacttcttccttggagctggagatgaggggctgggcacccgtggaataggcatgaggccagaagagagtgacagcgagctccttgaggatgaggaggatgaagtgcctcctgaacctcagatcattgttggcatctgtgccatgaccaagaaatccaagtccaagccaatgactcaaatcctagagcgactctgcagatttgactacctgactgttgtcattctgggagaagatgtaatccttaatgaacctgtggaaaactggccatcctgccactgcctcatctctttccactccaaaggctttcctctggacaaagctgttgcttactccaagcttcgaaacccctttcttatcaatgatctggccatgcagtattacatccaagataggagggaggtgtaccggatcctgcaggaagagggtattgatctgcctcgatatgctgtgctcaaccgtgatcctgcccggcctgaggaatgcaacctgatagaaggtgaagaccaagtagaggtcaatggagctgtctttcccaagccctttgtggagaagccagtgagtgcagaagaccacaatgtttacatctactaccccagctcagctggaggaggaagccagcgtctctttcgtaagattggcagccgaagcagtgtttactctcctgagagcagcgtccgaaagacggggtcgtacatctatgaggagtttatgccaacagatggcacagatgtcaaggtgtatacagtggggccagattatgcccatgctgaagctagaaaatctccagctttggatgggaaggttgaacgagacagtgaggggaaagagattcgatatccagtcatgctgactgccatggaaaagctggtggccaggaaagtctgcgtagctttcaagcaaacagtttgtggatttgaccttcttcgtgccaatggtcattcctttgtgtgtgatgtcaatggctttagttttgtcaagaactcgatgaaatactacgatgactgtgccaagattctggggaacaccataatgcgggagcttgccccacagttccagattccatggtccatccccacggaggctgaggacattcccattgttcccaccacatctggcactatgatggaacttcgttgtgtcattgcaattattcgtcatggggatcgtactcccaagcagaagatgaagatggaagtgaaacacccaaggttttttgctctgtttgaaaaacatggtggctacaagacagggaaattaaaactcaagcgacctgagcagctccaggaggtgctggatatcacaaggctgttgttggctgaactggagaaagaaccaggtggtgagatcgaggagaagactggaaaactagagcagctgaagtctgtactggagatgtatggtcacttctcaggtataaaccggaaggtacaattgacttactaccctcatggagtaaaagcttctaatgaggggcaagatccacagagggaaactctggccccatctctgttgctggtactgaagtggggtggagaactgactcctgctggccgtgttcaggctgaggagctggggcgagcttttcgctgcatgtaccctggaggacagggtgactatgctggcttccctggttgtgggctgcttcgtctccatagcactttccgccacgatctcaagatctatgcctctgatgagggtcgtgttcagatgactgctgctgccttcgccaagggccttctggctctagaaggggagctgacacccattttggtgcaaatggtgaagagtgccaacatgaatgggctactggacagcgatggggattccttgagcagctgccagcaccgggtgaaggctcggctgcaccatattctacagcaggatgcgccctttggccctgaggactacgatcagctggctcccaccagaagtacttccctgctcaactccatgactatcatccagaatcctgtgaaggtctgtgatcaggtatttgccctgatcgaaaacctcacccaccagatccgggaacgaatgcaggaccccaggtctgtagacctgcagctctaccacagtgagacactagagctaatgctacagcgttggagcaagctggagcgtgactttcgacagaagagtgggcgctatgatatcagtaagatccctgacatctatgactgtgtcaagtatgatgtgcagcacaatgggagtctgggacttcaaggcacagcagagttgctccgtctctctaaggcactggctgatgtggtcattccccaggagtacgggatcagtcgggaggagaaactggaaattgctgtgggcttctgtcttccactgttgcggaagatactacttgacctgcagagaacccacgaggatgagtctgtcaacaagctgcatcccctctgttatctcaggtactcccgaggcgtgctctccccaggtcgccacgttcgaacgcgtctctatttcaccagtgagagccatgtccactccctgctcagtgtcttccgttatggaggacttcttgatgagacccaggatgcacaatggcagcgagctttggattatcttagtgccatctcagagcttaactacatgacccagattgtcatcatgctttatgaggacaacacacaggatcccttatcagaggaacggttccatgtggagctacacttcagccccggagtgaaaggtgttgaggaagaaggcagtgccccggctggctgtggattccgtccagcctcttctgagaatgaggagatgaaaaccaaccaaggcagtatggagaacctgtgtccaggaaaggcatcagatgaaccagaccgggcattgcagacttcaccccagcctcctgagggccctggccttccgaggagatcacccctcattcgtaaccgaaaagctggttccatggaggtactttctgagacttcatcctcgaggcctggtggctaccggctcttttcatcttcacggccacccacagaaatgaagcagagtggcctaggctcacagtgcacagggctgttcagcaccacagtgctgggtggctcctccagtgccccgaatcttcaggactacgcccgcagccatggcaaaaagctaccacctgccagtctgaagcaccgagatgagctcttgtttgtcccggccgtaaaacgattttctgtgtcgtttgcaaagcatccgactaacgggtttgaagggtgttccatggtgcctaccatctaccctctggaaacactgcataatgccctttccctacgtcaagtgagtgaattcttgagtagagtctgccagcgccacactgatgcccaggcacaggcatctgcagccctctttgattccatgcacagcagccaggcctcagataacccattttctccaccacgtactcttcattcacctcccctgcaactccagcagcgctctgagaagcccccttggtacagcagtggcccttctagcactgtgtccagtgctggtccttcttcccctactacagtagatggtaactcccaatttggcttcagtgatcaaccctccctaaattcacacgtggctgaagaacatcaaggccttgggctgctccaggagacccctgggagtggagcacaagagctctccatagaaggggagcaagagctttttgaaccaaatcagtccccacaggtgccacctatggaaaccagccagccatacgaggaggtcagccagccatgtcaggaggtccctgacatcagccagccatgccaggacatttctgaggcgctcagccagccatgtcagaaggtccctgacatcagccagcaatgccaggagaaccatgacaatggtaaccacacatgccaggaggtccctcacatcagccagccatgccagaagtccagccaactgtgccagaaagtctctgaggaagtttgccagctatgtctggagaactccgaggaggtcagccagccatgccagggggtctctgtggaggttggcaagctggtccataagttccatgtaggggttggtagcttggtccaggaaacccttgtagaagttggcagcccagctgaagagatccctgaggaggtcatccagccataccaggagttctctgtggaggttggcaggctggcccaggagacttctgcgatcaatctgttatctcagggcatccctgagattgataaaccatcccaagagttccctgaggagattgatctgcaggcccaggaggtccctgaggagataaattagaagtcctgggtggtccctgaagtgattgatcagctgcctggagagggtattcctcaagcccagcatccatctggtgatccaaaccctcagagccagtctctagcccatgaccagcactcaccccttccaccagcaacatgtgattaattttctcattagtggtatcacactataccagccatttgagccagcaaccttttctgttggctaactcactggccagctctcaccagcggtgtctggggaagtagttctctttgtatgaagcatacctgtgccagagctgtggttgaggaggagccagttttaggttcgaagaagccattggctcctcacttagccattagacttgaataggatttccttggggtgggttggtctgtcattacccagccttctctgagcatcctaggaaatcacagattgttaaaggaaatgccgcttcactgctgaagacaccatctggcgacagcaaatgcaaaagaggggactctagggtcttcacttttctggggaaatgttcacgacttctcaaggtacgcttagaccatatgtgcattcaggggactcttgtctttgccagcactcctcaggtgagcccgggatggctatctgaaatgtctggaaaatagagtcccttccccaaacatctgacatggccactaaatctttagacttgccttatagatccttccatatcatccccaagtgccccttctgcctcagtcctgttcctctgggcaatagctctagggaaaagtaggtattagactgctgtgcaaaattcagagcaactacttaaaatgctctagaggattcttagccagtctgtgaaagtgggcctcctctgtggtggggctgtttggcttaggagatgctgtagtagtagagataatcaggttctattttaagcaatcagcagagatcaatattgtacagatacaagcaaaggtttaataaatatatatatatatatttatttctgtagttgtgccagggacagactggccaaagaccaaacactgcagggtccccaagaaatttgtccttatatcattgtgtctgagggccagatatgattatgaagctttttccaaagatccagggatgggaatgggagtgggtaggaggggtaatgcggtcattggagtcgggggctggaacattatgagtgctcaataaatataaactaatgagaatggtggtgatgga

SEQ ID NO: 127046 - DNA, 506 bp, Homo sapiens
  Payload ID: 4892
  Gene Symbol: PPIP5K1
  Gene Name: diphosphoinositol pentakisphosphate kinase 1
  ENST ID: ENST00000429176
  CDS Start-End: 164-506
ttcgtgacccggagctgtgcgaggagagtaccgaggagggggactcaagagtagccttcctcgaggacctgcctttcccatttgctgcctgaagttaatgtttcttgctggccaaatcagggacatgccggcattagcgggatgagtgggtgttccggcagggatgtggtcattgacggccagtgagggcgagagtaccacggcccacttcttccttggagctggagatgaggggctgggcacccgtggaataggcatgaggccagaagagagtgacagcgagctccttgaggatgaggaggatgaagtgcctcctgaacctcagatcattgttggcatctgtgccatgaccaagaaatccaagtccaagccaatgactcaaatcctagagcgactctgcagatttgactacctgactgttgtcattctgggagaagatgtaatccttaatgaacctgtggaaaactggccatcctgccactgcctcatctctttccactccaaag

SEQ ID NO: 127047 - DNA, 268 bp, Homo sapiens
  Payload ID: 4892
  Gene Symbol: PPIP5K1
  Gene Name: diphosphoinositol pentakisphosphate kinase 1
  ENST ID: ENST00000431962
  CDS Start-End: 54-268
cggctgcgcgagcggagggaggcggagcgggatgagtgggtgttccggcagggatgtggtcattgacggccagtgagggcgagagtaccacggcccacttcttccttggagctggagatgaggggctgggcacccgtggaataggcatgaggccagaagagagtgacagcgagctccttgaggatgaggaggatgaagtgcctcctgaacctcagatcattgttggcatctgtgccatgaccaagaaatccaagtccaagccaatgac

SEQ ID NO: 127048 - DNA, 796 bp, Homo sapiens
  Payload ID: 4892
  Gene Symbol: PPIP5K1
  Gene Name: diphosphoinositol pentakisphosphate kinase 1
  ENST ID: ENST00000453080
  CDS Start-End: 397-796
ggcggtgggggagtggctggggctgggggcggtatcggaccgggtgggcgcggtagagtgggcttggtgggttcccagggctggggttcgttccgggtgggctccgctttgggaagaggcccagcggaggggccttagtgtcagcgtagggagagtgaggcggcgaaggcgggggcgggcaaaggctagtggagtcgggatgcgagggcggtattcgtgacccggagctgtgcgaggagagtaccgaggagggggtcggcgggagaggagataggactcaagagtagccttcctcgaggacctgcctttcccatttgctgcctgaagttaatgtttcttgctggccaaatcagggacatgccggcattagcgggatgagtgggtgttccggcagggatgtggtcattgacggccagtgagggcgagagtaccacggcccacttcttccttggagctggagatgaggggctgggcacccgtggaataggcatgaggccagaagagagtgacagcgagctccttgaggatgaggaggatgaagtgcctcctgaacctcagatcattgttggcatctgtgccatgaccaagaaatccaagtccaagccaatgactcaaatcctagagcgactctgcagatttgactacctgactgttgtcattctgggagaagatgtaatccttaatgaacctgtggaaaactggccatcctgccactgcctcatctctttccactccaaaggctttcctctggacaaagctgttgcttactccaagcttcgaaacccctttcttatca

SEQ ID NO: 127049 - DNA, 777 bp, Homo sapiens
  Payload ID: 4892
  Gene Symbol: PPIP5K1
  Gene Name: diphosphoinositol pentakisphosphate kinase 1
  ENST ID: ENST00000437065
  CDS Start-End: 1-777
gtcttccactgttgcggaagatactacttgacctgcagagaacccacgaggatgagtactcccgaggcgtgctctccccaggtcgccacgttcgaacgcgtctctatttcaccagtgagagccatgtccactccctgctcagtgtcttccgttatggaggacttcttgatgagacccaggatgcacaatggcagcgagctttggattatcttagtgccatctcagagcttaactacatgacccagattgtcatcatgctttatgaggacaacacacaggatcccttatcagaggaacggttccatgtggagctacacttcagccccggagtgaaaggtgttgaggaagaaggcagtgccccggctggctgtggattccgtccagcctcttctgagaatgaggagatgaaaaccaaccaaggcagtatggagaacctgtgtccaggaaaggcatcagatgaaccagaccgggcattgcagacttcaccccagcctcctgagggccctggccttccgaggagatcacccctcattcgtaaccgaaaagctggttccatggaggtactttctgagacttcatcctcgaggcctggtggctaccggctcttttcatcttcacggccacccacagaaatgaagcagagtggcctaggctcacagtgcacagggctgttcagcaccacagtgctgggtggctcctccagtgccccgaatcttcaggactacgcccgcagccatggcaaaaagctaccacctgccagtctgaagcaccgagatg

SEQ ID NO: 127050 - DNA, 572 bp, Homo sapiens
  Payload ID: 4892
  Gene Symbol: PPIP5K1
  Gene Name: diphosphoinositol pentakisphosphate kinase 1
  ENST ID: ENST00000427877
  CDS Start-End: 1-356
agccctttgtggagaagccagtgagtgcagaagaccacaatgtttacatctactaccccagctcagctggaggaggaagccagcgtctctttcgtaagattggcagccgaagcagtgtttactctcctgagagcagcgtccgaaagacggggtcgtacatctatgaggagtttatgccaacagatggcacagatgtcaagggtgagctgtgggcatactcagtgatgctatgtacctgcaggtgtatacagtggggccagattatgcccatgctgaagctagaaaatctccagctttggatgggaaggttgaacgagacagtgaggggaaagagattcgatatccagtcatgctgactgccatggaaaagctggtggccaggaaagtctgcgtagctttcaagcaaacagtttgtggatttgaccttcttcgtgccaatggtcattcctttgtgtgtgatgtcaatggctttagttttgtcaagaactcgatgaaatactacgatgactgtgccaagattctggggaacaccataatgcgggagcttgccccacagttccagattccatggt

SEQ ID NO: 127051 - DNA, 15407 bp, Homo sapiens
  Payload ID: 4893
  Gene Symbol: PPIP5K2
  Gene Name: diphosphoinositol pentakisphosphate kinase 2
  Uniprot ID: O43314
  ENST ID: ENST00000321521
  CDS Start-End: 574-4242
gactgatcatttggctcttgccggaaatcgttccgcccggtgaggtttcggcgtgagacccgaggagggcggggaagaggcgtgacggagattcctgaggtgtagtagcctgaggttcccttatgtggccctatagctgttactgaaggaagtagcctacgtccacgcctacaactgaagtctcttgacaaacacctcacccctgcctccgggatgaaagggggtaacctagacctgaatgggcttgaccatctcacaactgctcgcgtgacgaccgcattcgtggcaggtaagaagattgctgtatcaactcaagaaagcagtaacttcactgtctttgtattttgaattgcaacaacaactttgatatcaacaatgaagcaatgatatctaagaacaaaagagtatttgccaacagtcatcataatatcaagtgattgtataagcagaaacaagctgtcacagacctgtgcgtcagctaatatatggagaatgctttcttctgatactatttacttagaggcagttttaatataaatcatttcaattatatctacatcaaataaaataaaaatgagtgaagcccccagattcttcgttggaccagaagatacagaaataaatcctggaaattatcgacatttcttccaccatgcagatgaagacgatgaggaggaagatgattctccaccagaaaggcagattgtggttggaatatgttccatggcaaagaaatccaaatccaaaccaatgaaggaaattcttgaacggatctccttatttaaatatatcacagtagtagtatttgaagaggaggttattttgaatgaaccagtggaaaactggcctttatgtgattgtcttatttctttccattctaaaggatttccactggacaaagcggttgcctatgcaaaactcaggaatccatttgtaatcaatgacttgaatatgcagtatctcatacaagataggagagaagtatatagtattcttcaagctgaaggtattttacttcctcgttatgctattttgaaccgtgacccaaataatcccaaagaatgtaatctgattgaaggggaagatcatgtagaagtaaatggggaagtttttcaaaagccatttgtagaaaagccagtcagtgcagaagatcacaatgtttacatttattacccaacttctgctggtggtggaagtcaaagactctttagaaagattggcagtagaagtagtgtttattctccagaaagcaatgtacgaaaaacaggctcatatatatatgaagagtttatgcccacagatggtactgatgttaaggtttatacagtgggtccagattatgcccatgctgaagctcgaaaatctccagcacttgatggcaaggtggaacgagacagtgaaggaaaagaagtaagataccctgttattctcaatgcacgagagaaattaattgcttggaaagtctgccttgcttttaagcaaacagtttgtggctttgatttgttacgggccaatggacagtcctatgtctgtgatgtcaatggcttcagttttgtgaaaaattccatgaagtattatgatgactgtgcaaaaatacttggaaatattgtaatgcgagaacttgctccacaatttcatattccatggtcaatacccttagaagctgaagatatcccaattgtaccaactacatctggaactatgatggaacttagatgtgtcatagctgttatacgtcatggggatcgaacaccaaaacaaaaaatgaaaatggaagtgagacatcagaaattttttgatctttttgaaaagtgtgatggatataaatcagggaaattaaaactcaaaaaaccaaaacagttacaggaagtgctagatattgcacgacagcttcttatggagctagggcaaaataatgattctgaaattgaagaaaacaagccaaaacttgaacaacttaagactgtattagagatgtatggtcatttttctggaataaatcgtaaggttcagttgacctatctccctcatggttgtcctaaaacatctagtgaagaggaggacagccgaagagaagaaccatctttacttttggttctaaaatggggaggtgaattaactcctgcaggcagggtccaggctgaagaacttggaagagccttcaggtgtatgtatcctggaggtcaaggagattatgcaggatttcctggttgtggtttacttagattacatagcacctacagacatgacctcaaaatatatgcctctgatgaaggacgagtccagatgactgcagctgcttttgcaaaggggcttttagctttggaaggagagcttacacccattcttgttcaaatggtgaaaagtgcaaatatgaacggtcttttggatagtgatagtgactctctgagcagttgtcagcaacgtgtgaaggcaaggcttcatgaaatacttcagaaagacagagattttactgctgaagattatgaaaagcttactccatctggaagcatttctcttatcaaatcaatgcatttaattaaaaaccctgtgaagacctgtgataaagtttattccttaattcagagtttgacttctcaaatcagacatcgaatggaagatcctaaatcatcagatattcagctttaccatagtgaaacattggagcttatgctacgtagatggtccaagttagagaaagactttaaaacaaagaatggaagatatgatattagtaaaatccctgacatatatgactgtataaaatatgatgtccagcataatggttccttgaaattagaaaacacaatggaattatataggctttcgaaggcattagcagatattgttatccctcaggaatatggtataactaaagctgaaaaactggagattgccaaaggctactgtactcctctggttagaaaaattcgctcagaccttcagaggacacaagatgatgacactgtaaataaacttcatcctgtgtattctagaggtgttctgtctcctgaacgtcatgttcgtactagattatattttaccagtgaaagtcatgtacattctttgctgtctattcttcgctatggtgccttatgcaatgaatcaaaggatgaacagtggaaacgagctatggattatttaaacgttgtcaatgagctcaactacatgactcagattgttatcatgctttatgaggatcctaataaggatctttcctcagaagaacgctttcatgttgaattacactttagtccgggagccaaaggttgtgaagaagacaaaaatttgccatctggctatggatatagaccagcttccagagagaatgaaggcaggagaccttttaaaattgataatgatgatgaaccacatacttctaaaagagatgaagttgatcgagctgtgatattgtttaaaccaatggtatcagagccaattcatatacacaggaagtctccacttccaagatctaggaagacggctacaaatgatgaagagagccccctgagtgtgtctagcccagagggtactggtacctggctgcattataccagtggtgtgggtactgggcgtcgaagacgcagatcaggggaacaaatcacttcttcccctgtctcccccaaatcattggctttcacatccagtatttttggctcatggcaacaggttgtatctgaaaatgctaattacctgagaacaccaagaactcttgtggaacagaagcagaatcctactgtagggtctcactgtgcgggcctgtttagcacctcggtgctcgggggttcttcaagcgcacctaacctacaggattatgctcgtactcatcgtaaaaagctgacctcttctggctgcatagatggctttgaattgtattccatggtgccatctatttgtcctctagaaactcttcataatgccctatctttaaagcaagtggatgaatttcttgcttccattgcttctccatcatctgacgttccacggaagaccgctgaaatttcctctacagctttacgttccagtccaataatgagaaaaaaagtatctttaaatacgtatacacctgcaaagatcctcccaacaccaccagctaccttaaagagcactaaagcaagcagcaaaccagctacaagtggaccttctagtgcagttgttcctaatacctcatctcggaaaaagaatataactagcaaaacagaaacgcatgaacacaaaaaaaacactgggaaaaagaaatgaaatcttagcagaagctggaactttttatacttataaaaatagtatgttcttatgtttctccttatgcatttatgtgttcacttaaaaatgtttttaaatctaaggttttctttgtttatgttcaggtaaggaactgttgtcatgatctggaaatgtttaaaacaatgtttgttagcattctgtgagcagcaaaacttatagtgataaaaatcgattgttgttaatatgatgtttaccatgtgcacatagtaatgaaaaggaacataaaagcccagcaggctcgtaccaaagtcacagcagtaatgctatgtactgcagagtctgatgagctggcctttgtgcacacttttattttcatgggattgcatcttagctgttaaaacttctagattgaaatttgacagccagggttacatattggggacttttaaagtgtctttccaaagagatttcattaaccgtttagattagaatatctttcccaattgttacagtgacatatatgctgcaatatttaacaactggagtattagccacatgggttattttttcaatctgtgttttgaatttttttattgtgtgttatttaaaatattacatatgcagctgggagaactacacctttgtgcacatagatttatatattaatttgtagaaaatattttctttatatatttccttaccatacaaggtgccttgttcatcaggaaaacttttgttttgtattttgacaagaaaggcaccttcagagtttctttttaagtatagttgacaagtgtataaatgttacacttactttcagagttctttttagatctaaagaagtcagttcaaaaatggaaatcaacaatgttaggagaaatctgaattctgttaagttagtaagtattatgtatagcatctgtttttaaccatttccattcttatccctagtgtatcagttgatcacactaagaaagcttaaagattgagcatttgaaataaatgctctttataaatgattagatttttgaagggatattgaaatcattgcgctgtgatttcatctgtgatgtgaaaaatcaatttattatccttggtgctttcccccccaccaatgcacaaataattgtgaacagcttgaaatgacttaaactgtaatccaaatgggacaatctgataagaatttcatgcattggtagttaaataacttaaattgctaaagctttagcttgaaatttatgtttagaaaaactattgatttcccatggtatgaatataactattgtaattcttcaaatgagactcttctcaccttaaatagtcatatattaattaacttataggaaataagcatactatatgttagctgttttaaaaggtaccagatgtaagagtcataaatatatgcaattaaagaagttcatagatttcacatgaatgtaaatgtgttatatggagacatgtcttgtaaacagttgaatgtatgtaagttttctgtttgtgaaaatgtagttaatgtactcactgtggaggtcataaggaagctactttttttttaaagtggaacctaattaaaatatttccagaatcaaagagacttaaatggtaaatttttaaaattttcttatctcttactttttagttttcaaagtagaaaaaatcaggaatttttttattaactagtacttacatattaaataaaatttattattggctatatacatagcaatatattactttccaaactagaaagtacagtacaactaactttttccattgttatgcaagaactattactttcctgtagtcaccaaactcagtagtattgctctgtagactagacactctatttgtaaaaatcttagaatcactttccaaaacaaataaaaagtctactgtatcagagcaaaatgttatagttatcactgtttagtggcagtttgactgaagcatctgtttctcacttgattctgtcctgagaagatgtgggattttttggttttaaatactagaagatatttcttcttagagcccagtcctccatcccaaagaggtgaactagcccagcatgaagaattgtctagtcaccctgagatattaatcttcataatgtattattcagttccttcacccttaaaagccatataataggctcagacctaacttagcccttgaagtctagtgctggcagattctgctgccctggtttaaatgagttacgtagtccattctcaaatactagcaaatttggggggcgtggtacagcaattttgggtgaagaaaagtgtgctgaacaccttatgtcagtgatagacaagatatagaggctgaagggaatacagtaaagtaacaaaaacatgtggcagtgtgcttagcataaacatagagcacaaaggcaatagatggaaattatgagagaaaagttaaagttcttcaagaaatatccaattaaaactcactagccaaggaaaaagtttctgttttcacccggatttctttttgggttgactctgtctgacctaaatgtccactgttaactagtgccatgccagtttgaaccaagatttcacatttttgttttgtattcatactttggtagaaatttctcagtctttgtgtatttataagaatttgctttacacatagtgtacagtgtttattaactttacatcattttatccttgccttactatctggacagtgtagactgcctatattcttagttggggttgggatctcttctcttagagtggcccagcagttttagcccctctctaattctcttttcctgtgttgggagatatcaaaacaacagaattcttgccagtgggaacatttttcttttttagacaaggtctcattctgtcaccccagctggagtgcagtggcacagtcttaattcactacagccttgaactcctgggctcaagaaatctttctgcttcagcctcctaaatagctggtactataggtgcgtgccaccacacccagctcatgggaataatttttacactccttcagaaggagtcatttgtgattggagtccacatagaaacaggtttccctctgtacataatcgtaggtaccaaaatattactgtgtaaagtgttgtttatataggtcaatttttgtggaagatctaatttctattttcagagaacagagcacattaaaaaatctatttagtattgtgtactatataatctatgtgaattatagctccttaactaaatatattactgagttttttttttaatactgtaagttctagggtacatgtgcacaatgtgcaggtttgttacataggtatacatgtgccatgttggtttgctgcacccatgaactcatcatttacattaggtatttctcctaatgctatccctcccccagccccccacccactgacaggcccagtgtgtgatgttccccgccctgtgtccaagtactgttctcattgttcagttccctcttatgagtgagaacatgcggtgtttggttttctgtccttgtgatagtttgctgagaatgatggtttccagcttcatccatgtccttgtcatccttttttttggctgcatagtattccatggtgtatatgtgccacattttcttaatccagtctatcattgatggacatctgggttggtcccaagtctttgctattgtgaatagtgccacaataaacatacgtgtgcatgtgtctttatagtggcatgatttataatcctttgggtatatacccagtaatgggatggctgggtcaaatggtatttctagttctagatccttgaggaatcgccacactgtcttccacaatggttgaactaatttacactcccaccaagtgttcctatttctccacatcctctccagcatctgttgtttcctgacttttcaatgatcgccattctaactggcgtgagatggtatctcatttgtaagatgatatctcattgagatttttataaactgcttttcttttggttcatgtgctttgtcatggattgtgagaaaaacatcttttcgcttagggatcactgtcaatttctccttttattatcaatggtttttactttactttttatatagtatgtgggtatgttttctggtgcatataaattcatgaatgctagattttcattataggttttaccttatcattattaaaatgtcctttttgtccattggatactttttgttctataaattgtcagatattaagattatgacctatgctttattttggcttgcatttgcctgatattcatctttttactttttggtatttgtgtcactttgttttaggttatttaatatagtatatattgggttttgctttgtgattcaattttaagatcccttttacttaatagattagtgtagtctgttttatgtaatgtatctttgcttttagattgtgcttgctttttttattgctttaaaattcttttgtctttctgtaacaatactttccactgcaagtaggaaaattccaattgaaactggtttaaatcatcagaaaatgtattattacacatttctgaaggtccaaaggtggggttggcttcagccacagttgcattagccatattgtcatcaaaagcccaagtgacctcccttgtcacctctggcatagtataaactttatcccaaagttgttttctctcgtgttaacaataattgctgtcggtttcagtgaggactacatattttttttgttcatgtccaacacaataaaaattgagggaagttctgtcccaatcctggaatattaatattaagccatctacttcagtgtgattgagccaacttctttgatcatctactcacccctagataaatagaatactccaggagattcccatgaccttactgaccctagagcagatgatggagtcagtttttccgaaaagcctcagcactgttgacattttggaccataaaattctacatcataggaagctgttccatgcatagcagcatgtctagtaggatctctgtacctagctgtgaagtgttgagagtcagttaaggtaagtagctgaaatgaaaataacaatcacatctttattcacttactatgataaaattataagcaagagaccaaaaaggaaagtagggccagctccttgttgttccatttttcccctaccatggactagcactggacatgcgtcaatcagacgacatgcagtccaggcagaggaaattgtttcactgctaaggagcaatgaacaaaaggttcctgccatcttatggacctcaaggactgcggacagggagcagggaagggttagaagtagaaaacaactgagtcagagtggagatgagtgtctcagtcaaggcccaccaatagcgaggtctctgtggaggcacctgaaaagtgtctcaaccaaggccccctgataaggaagactcagcatggaggtacctggtctaggaatgcagctaggtttatagacatggccagcccagggggtcctgagcaccagatacaactccctccagagactggctgtgtttaaatctcatgtgggaagggcacctttcccctacaaagcctgtcaggcaaagcctttgtaattgcttatggtcaggcctgaaagatcacacatcagactttggcctggaacatatctcctcaccctaaatgccagcagcatcgcctccaaactgtggcagtcaaaaatgtctccagacattagtaaatgtcttttgtgagggaagaattgaccctagttaagaaccactgccctaaagcacatgattctgtggaaaagaaggatatatgaccaaaatcatcattttggatagtgagggcatggataatggatacataatcagcaatgtatgctgtatactacacttgcattatgttattcacatttgctatagttcacttgttgtgctaatggttttttccttcactatgattttgaattatatttaattttaaagtctatatatatatatatatagatcctatctgttgactccttgctgtgaacaatatccaattagtgtattttttcctctactgcacagttttggttgattattttttccttttcatttcttttctgaactttgttagcttatgttgcatttcctttggttgttttgctatggtgtttctgatcaactacatttctttatgaactctatttccttaagttctttgagttatgacagtatatttggtcacatttttcatgtgctcagctgattcattctttcctgttgagtggtttttatctgctaattgtttctgcttgttccatttctccttttcttgaagtgtttgtgcatgaacactgtgcaggtttattttcaagtattacttacctttatatgagataaatttctttctggctcatctatttgatacaatttcttttttgtttgtttttgttttgtttttgttgttttttaaaatgcaatttcatatgttaggtaggttggcttttctttttctttttctttttttttttgagatggagttttactcttgttgcctaggctggagtgcagtggcatgatctcagctcactgcaacctccaccttccagtttcaaatgattctcctccctcagcctccagagtagctgggattacaggcgcccgccaccacgcctggctaatttttgcatttttagtagagactgggtttcaccatgttggccaggctggtctcgaactcctgacctcatgatcttcctgcctcagcctcccaaaatgctggaattacaggcatgagccatcatgcccggccgtaggttggcattttaagctcacacaatcctaccaaggtgacagtgaatctccttatgacaggattgtgggtctgagagagctgttgtagccttttactctctccagtcaacaaagattggcaactacagggttaccacctttggagtctctttcctcctgtctgccacgtctacagactactgcttgtcaatgtgatatgcatgtattttcttcttcagctttgcccctcctgccactgtaccagacaatatccaggaaatcccctactactgacactcatcccatttccattgttttagagaaggaactagttgttgttgtttttttttccctgtctcagattatgtcatctattttggagtattttggtctaatgactttggctgcgatatggagctatctgacctttactgcacctggcagctctatctcctattttggggttgaggttaaagtgtcttctagttttgttgaagatagtttatgtttctcttcatatttgatgataattttttaaattaagacctaatttctccttcattttcaaactggatatcatttcttttgtggttaatattctttgacaagaaggaagaggaggaggaagaagaacaaaagaagcctgcctctctttagactgcccatctcaattatattttaaaaatgaagttaatatctgtcctgctaacagtagtgttgtcagaatcaaatgaaataatatttggtaaactataaagtgaagaccaaatttgaaggactatttgtttttgttgtaatagagttgtatatagtccagatgtcaaccaggcctcttcagcatttttatagtcaaagatgtacaagatagctcctaatgctcttttatggctgctcctgttgccagggcaacagcctgcctagtaacaatctaacagacaccccccaaaaaccaaaaaataaaggttattctagcatcttctccttttaaaaatctttaaaataagagaattcagttcttcccaaagcagtgtttaaaaaaaaaaagtatttaaataaaatcaaggataccatcccacccacctatcttacattttgtgtggtatgagtggcaccattgtgtgacccaggtaggatagtggatgtacagtttagatacccattttaaagcagttagaaagatgtaacttgacaaggaaagcagtctcttttgtcattctacatttagtgcttcaggagtacttgatatatggaaggatttttttaaaaaaaaggaaaaatgaatatgccttcagaaagttttttgctgcttttaaaagccatagatttgtcttaagttagtcaatgctgaatagaaagcttgatgataaaggtgggtgggtggatggatggatggatgaatgaaggaaaaattaggagaaaagagaaagcagaggaggggtgagacagagaacaaaagaacacaggctctactgttaacaaaaagcagcatcgctgatgtgtggggaataaattggaagtcatatcattacgacttttttttcatgccacatagatatgctgatttgtccaacaatgcctgtactcaaaagtcatgacaataaaatgagacctgggagtcccaaatgttattaactaccacaattttatataactgattcttcactggtcatccagaagcctttttgaaagtcccactgccatacctgcctcctcggtgaaatagatgtaaaagccacaaagagagaatcaatgagccacactcatattggaagcgaatggagttgacttcaccagtgggaaaagcaattacttttcaaagtgaaaactgatcaattcacaactcaaggaaagcatggagtaatttcagaactccagtaagaagtgataaatgtctagtttggaatcatgtggctgaaaatcttaccatatgctttccacaggctgagcaagaggatagatcattgaatagatgctttaattccatttttgacaatgaaccttgtgcttctgaaaatatttatatttaaccatgaggttatgatgattttttctctacactttttgagaagcctcttcagaaaagagcaaagttgtctgctctaatggatagaataaggagctgggagaaaggagacctgggtattaatctcagctctaccactacatggtagagctatgtagtggtagactatctgggagactctagaatctttaccattccctctactattcctagctcccttttctttcatagtcaacaagtgctttttgaacaattattgaggtaaataacataccctaaaagttagtactgattcccattatcatgctctgttgttccctggatgctcttttgaggaatttacttggttaatacagttaatagtataatacttataataacaattttgagaattatcagcatgagacaatttatttgcataatagctttttgttattatccagaatacatttagttctggattttgtttgatattgtgaatgcaaactatttttttgtgttagcctaaataaaatgaaatacagttatggaaatatttctgctgcaagaaaagaattacatacaactagtatacatatttagaggtgctgtagtcttctagactgtaaaggcagatggccgtgagtggaaatctgagtgtataggatgtgtttcgtgttcccactgcatatgcattattacccttgtctgagtggttgtttaaactgacatctgtaaaactaatctgtaaagtgagatctgggttctgacctatctcttacagtccataatgttgtgattctaagaatatttcattccttactgctttctgccctccattctgaccaatgctgcaaccacaaataaaaacattacttaccctatgagaaagactagaccttatactcattttatcttaacagtttattataactcattttgaccactcctccctcaaaaaaaattgtccctagaaaactagagtgatcatagggatcagatgacatgttactgggtgaagccaggaagctaccatatacatagaaaagttagttgccaaatatggtgtgggaatttgggaggaatttatctgctcaaaaactctcacctacttactagatatagtgtttgtaatgttagccttggagattctaccttaaaaatatcattgagaaagctcagagaactcccaggtaaacacacaggtagccccttctaaaatgcaaatgccctttgaaggccagctttattaatcttgccattaaccccatagttaatcatatgcatttctcacagtgacctgaaaacaggcattccttctctaaatgtgtgctgaatgctggttataaaccagttactacactaagccctgatgatacaaatatgaaaagtcctgtttccagggaatttactttctaatgaggaaccaagtgctcaaaagcagtcataaagttcatggcaaaataacccacataattaactgctttgttacaaaaacttggaaatatagataaaatatttattttggaaatatatgttacaggtgaaaagcaagaattaaaactagttatctgaatgtaaaaggaatcaacggctaaatcaagcttaaagtcttcctgtccaagggatatgaaaggtacctcaacctttggttttggttttggttttggttttgtttttttggtcaacatgaattatagctaggggaagagataaacagggggttaggttgtagattatatgcatgacagattgctggaattgggctccattcacaaaggagggagcaggaaagggtttctcttgactggaccacaaatataaaatctcatgccctctcattatcttgataagccctataggtccataaaagaaataaaatgccaaaacataccatgaggacactttcacaatccagggcacacacatgactcccgcaataggaaaccacactgaagacattctcacaatttaaaacaagttgtaaactacaggaaacagttggcatcccaggagagttgttgcctgaggaactagatggtggtatgttattctggcatatagggaacagaataagacatgagggtaggaagaggtttttaaaagcaaagttaggcattcaatgatgacttcataaatgtgcctgggctggcctttaatggaaggctttaatttagggaacttaaagaatttcataatattggagtataaactgctggaaataaggatgctatttaatagactctcttagatttttcataaaatgctaatagaatcccaaaggaagtgtgtattctaaaatgttattgtgtatgttataaaagctttgtaaaataaagtgatgttaagctactattgtaaagttaaaaattttttcagtcatctgtaatctcattacccaagtaaaactgttttcatttttccatta

SEQ ID NO: 127052 - DNA, 5813 bp, Homo sapiens
  Payload ID: 4893
  Gene Symbol: PPIP5K2
  Gene Name: diphosphoinositol pentakisphosphate kinase 2
  Uniprot ID: O43314
  ENST ID: ENST00000358359
  CDS Start-End: 510-4241
gagggcggggaagaggcgtgacggagattcctgaggtgtagtagcctgaggttcccttatgtggccctatagctgttactgaaggaagtagcctacgtccacgcctacaactgaagtctcttgacaaacacctcacccctgcctccgggatgaaagggggtaacctagacctgaatgggcttgaccatctcacaactgctcgcgtgacgaccgcattcgtggcaggtaagaagattgctgtatcaactcaagaaagcagtaacttcactgtctttgtattttgaattgcaacaacaactttgatatcaacaatgaagcaatgatatctaagaacaaaagagtatttgccaacagtcatcataatatcaagtgattgtataagcagaaacaagctgtcacagacctgtgcgtcagctaatatatggagaatgctttcttctgatactatttacttagaggcagttttaatataaatcatttcaattatatctacatcaaataaaataaaaatgagtgaagcccccagattcttcgttggaccagaagatacagaaataaatcctggaaattatcgacatttcttccaccatgcagatgaagacgatgaggaggaagatgattctccaccagaaaggcagattgtggttggaatatgttccatggcaaagaaatccaaatccaaaccaatgaaggaaattcttgaacggatctccttatttaaatatatcacagtagtagtatttgaagaggaggttattttgaatgaaccagtggaaaactggcctttatgtgattgtcttatttctttccattctaaaggatttccactggacaaagcggttgcctatgcaaaactcaggaatccatttgtaatcaatgacttgaatatgcagtatctcatacaagataggagagaagtatatagtattcttcaagctgaaggtattttacttcctcgttatgctattttgaaccgtgacccaaataatcccaaagaatgtaatctgattgaaggggaagatcatgtagaagtaaatggggaagtttttcaaaagccatttgtagaaaagccagtcagtgcagaagatcacaatgtttacatttattacccaacttctgctggtggtggaagtcaaagactctttagaaagattggcagtagaagtagtgtttattctccagaaagcaatgtacgaaaaacaggctcatatatatatgaagagtttatgcccacagatggtactgatgttaaggtttatacagtgggtccagattatgcccatgctgaagctcgaaaatctccagcacttgatggcaaggtggaacgagacagtgaaggaaaagaagtaagataccctgttattctcaatgcacgagagaaattaattgcttggaaagtctgccttgcttttaagcaaacagtttgtggctttgatttgttacgggccaatggacagtcctatgtctgtgatgtcaatggcttcagttttgtgaaaaattccatgaagtattatgatgactgtgcaaaaatacttggaaatattgtaatgcgagaacttgctccacaatttcatattccatggtcaatacccttagaagctgaagatatcccaattgtaccaactacatctggaactatgatggaacttagatgtgtcatagctgttatacgtcatggggatcgaacaccaaaacaaaaaatgaaaatggaagtgagacatcagaaattttttgatctttttgaaaagtgtgatggatataaatcagggaaattaaaactcaaaaaaccaaaacagttacaggaagtgctagatattgcacgacagcttcttatggagctagggcaaaataatgattctgaaattgaagaaaacaagccaaaacttgaacaacttaagactgtattagagatgtatggtcatttttctggaataaatcgtaaggttcagttgacctatctccctcatggttgtcctaaaacatctagtgaagaggaggacagccgaagagaagaaccatctttacttttggttctaaaatggggaggtgaattaactcctgcaggcagggtccaggctgaagaacttggaagagccttcaggtgtatgtatcctggaggtcaaggagattatgcaggatttcctggttgtggtttacttagattacatagcacctacagacatgacctcaaaatatatgcctctgatgaaggacgagtccagatgactgcagctgcttttgcaaaggggcttttagctttggaaggagagcttacacccattcttgttcaaatggtgaaaagtgcaaatatgaacggtcttttggatagtgatagtgactctctgagcagttgtcagcaacgtgtgaaggcaaggcttcatgaaatacttcagaaagacagagattttactgctgaagattatgaaaagcttactccatctggaagcatttctcttatcaaatcaatgcatttaattaaaaaccctgtgaagacctgtgataaagtttattccttaattcagagtttgacttctcaaatcagacatcgaatggaagatcctaaatcatcagatattcagctttaccatagtgaaacattggagcttatgctacgtagatggtccaagttagagaaagactttaaaacaaagaatggaagatatgatattagtaaaatccctgacatatatgactgtataaaatatgatgtccagcataatggttccttgaaattagaaaacacaatggaattatataggctttcgaaggcattagcagatattgttatccctcaggaatatggtataactaaagctgaaaaactggagattgccaaaggctactgtactcctctggttagaaaaattcgctcagaccttcagaggacacaagatgatgacactgtaaataaacttcatcctgtgtattctagaggtgttctgtctcctgaacgtcatgttcgtactagattatattttaccagtgaaagtcatgtacattctttgctgtctattcttcgctatggtgccttatgcaatgaatcaaaggatgaacagtggaaacgagctatggattatttaaacgttgtcaatgagctcaactacatgactcagattgttatcatgctttatgaggatcctaataaggatctttcctcagaagaacgctttcatgttgaattacactttagtccgggagccaaaggttgtgaagaagacaaaaatttgccatctggctatggatatagaccagcttccagagagaatgaaggcaggagaccttttaaaattgataatgatgatgaaccacatacttctaaaagagatgaagttgatcgagctgtgatattgtttaaaccaatggtatcagagccaattcatatacacaggaagtctccacttccaagatctaggaagacggctacaaatgatgaagagagccccctgagtgtgtctagcccagagggtactggtacctggctgcattataccagtggtgtgggtactgggcgtcgaagacgcagatcaggggaacaaatcacttcttcccctgtctcccccaaatcattggctttcacatccagtatttttggctcatggcaacaggttgtatctgaaaatgctaattacctgagaacaccaagaactcttgtggaacagaagcagaatcctactgtagggtctcactgtgcgggcctgtttagcacctcggtgctcgggggttcttcaagcgcacctaacctacaggattatgctcgtactcatcgtaaaaagctgacctcttctggctgcatagatgacgccacacgcggttctgctgttaaaaggttttctatctcatttgctcgacacccaaccaatggctttgaattgtattccatggtgccatctatttgtcctctagaaactcttcataatgccctatctttaaagcaagtggatgaatttcttgcttccattgcttctccatcatctgacgttccacggaagaccgctgaaatttcctctacagctttacgttccagtccaataatgagaaaaaaagtatctttaaatacgtatacacctgcaaagatcctcccaacaccaccagctaccttaaagagcactaaagcaagcagcaaaccagctacaagtggaccttctagtgcagttgttcctaatacctcatctcggaaaaagaatataactagcaaaacagaaacgcatgaacacaaaaaaaacactgggaaaaagaaatgaaatcttagcagaagctggaactttttatacttataaaaatagtatgttcttatgtttctccttatgcatttatgtgttcacttaaaaatgtttttaaatctaaggttttctttgtttatgttcaggtaaggaactgttgtcatgatctggaaatgtttaaaacaatgtttgttagcattctgtgagcagcaaaacttatagtgataaaaatcgattgttgttaatatgatgtttaccatgtgcacatagtaatgaaaaggaacataaaagcccagcaggctcgtaccaaagtcacagcagtaatgctatgtactgcagagtctgatgagctggcctttgtgcacacttttattttcatgggattgcatcttagctgttaaaacttctagattgaaatttgacagccagggttacatattggggacttttaaagtgtctttccaaagagatttcattaaccgtttagattagaatatctttcccaattgttacagtgacatatatgctgcaatatttaacaactggagtattagccacatgggttattttttcaatctgtgttttgaatttttttattgtgtgttatttaaaatattacatatgcagctgggagaactacacctttgtgcacatagatttatatattaatttgtagaaaatattttctttatatatttccttaccatacaaggtgccttgttcatcaggaaaacttttgttttgtattttgacaagaaaggcaccttcagagtttctttttaagtatagttgacaagtgtataaatgttacacttactttcagagttctttttagatctaaagaagtcagttcaaaaatggaaatcaacaatgttaggagaaatctgaattctgttaagttagtaagtattatgtatagcatctgtttttaaccatttccattcttatccctagtgtatcagttgatcacactaagaaagcttaaagattgagcatttgaaataaatgctctttataaatgattagatttttgaagggatattgaaatcattgcgctgtgatttcatctgtgatgtgaaaaatcaatttattatccttggtgctttcccccccaccaatgcacaaataattgtgaacagcttgaaatgacttaaactgtaatccaaatgggacaatctgataagaatttcatgcattggtagttaaataacttaaattgctaaagctttagcttgaaatttatgtttagaaaaactattgatttcccatggtatgaatataactattgtaattcttcaaatgagactcttctcaccttaaatagtcatatattaattaacttataggaaataagcatactatatgttagctgttttaaaaggtaccagatgtaagagtcataaatatatgcaattaaagaagttcatagatttcacatgaatgtaaatgtgttatatggagacatgtcttgtaaacagttgaatgtatgtaagttttctgtttgtgaaaatgtagttaatgtactcactgtggaggtcataaggaagctactttttttttaaagtggaacctaattaaaatatttccagaatc

SEQ ID NO: 127053 - DNA, 5842 bp, Homo sapiens
  Payload ID: 4893
  Gene Symbol: PPIP5K2
  Gene Name: diphosphoinositol pentakisphosphate kinase 2
  Uniprot ID: O43314
  ENST ID: ENST00000414217
  CDS Start-End: 285-3953
gtaagaagattgctgtatcaactcaagaaagcagtaacttcactgtctttgtattttgaattgcaacaacaactttgatatcaacaatgaagcaatgatatctaagaacaaaagagtatttgccaacagtcatcataatatcaagtgattgtataagcagaaacaagctgtcacagacctgtgcgtcagctaatatatggagaatgctttcttctgatactatttacttagaggcagttttaatataaatcatttcaattatatctacatcaaataaaataaaaatgagtgaagcccccagattcttcgttggaccagaagatacagaaataaatcctggaaattatcgacatttcttccaccatgcagatgaagacgatgaggaggaagatgattctccaccagaaaggcagattgtggttggaatatgttccatggcaaagaaatccaaatccaaaccaatgaaggaaattcttgaacggatctccttatttaaatatatcacagtagtagtatttgaagaggaggttattttgaatgaaccagtggaaaactggcctttatgtgattgtcttatttctttccattctaaaggatttccactggacaaagcggttgcctatgcaaaactcaggaatccatttgtaatcaatgacttgaatatgcagtatctcatacaagataggagagaagtatatagtattcttcaagctgaaggtattttacttcctcgttatgctattttgaaccgtgacccaaataatcccaaagaatgtaatctgattgaaggggaagatcatgtagaagtaaatggggaagtttttcaaaagccatttgtagaaaagccagtcagtgcagaagatcacaatgtttacatttattacccaacttctgctggtggtggaagtcaaagactctttagaaagattggcagtagaagtagtgtttattctccagaaagcaatgtacgaaaaacaggctcatatatatatgaagagtttatgcccacagatggtactgatgttaaggtttatacagtgggtccagattatgcccatgctgaagctcgaaaatctccagcacttgatggcaaggtggaacgagacagtgaaggaaaagaagtaagataccctgttattctcaatgcacgagagaaattaattgcttggaaagtctgccttgcttttaagcaaacagtttgtggctttgatttgttacgggccaatggacagtcctatgtctgtgatgtcaatggcttcagttttgtgaaaaattccatgaagtattatgatgactgtgcaaaaatacttggaaatattgtaatgcgagaacttgctccacaatttcatattccatggtcaatacccttagaagctgaagatatcccaattgtaccaactacatctggaactatgatggaacttagatgtgtcatagctgttatacgtcatggggatcgaacaccaaaacaaaaaatgaaaatggaagtgagacatcagaaattttttgatctttttgaaaagtgtgatggatataaatcagggaaattaaaactcaaaaaaccaaaacagttacaggaagtgctagatattgcacgacagcttcttatggagctagggcaaaataatgattctgaaattgaagaaaacaagccaaaacttgaacaacttaagactgtattagagatgtatggtcatttttctggaataaatcgtaaggttcagttgacctatctccctcatggttgtcctaaaacatctagtgaagaggaggacagccgaagagaagaaccatctttacttttggttctaaaatggggaggtgaattaactcctgcaggcagggtccaggctgaagaacttggaagagccttcaggtgtatgtatcctggaggtcaaggagattatgcaggatttcctggttgtggtttacttagattacatagcacctacagacatgacctcaaaatatatgcctctgatgaaggacgagtccagatgactgcagctgcttttgcaaaggggcttttagctttggaaggagagcttacacccattcttgttcaaatggtgaaaagtgcaaatatgaacggtcttttggatagtgatagtgactctctgagcagttgtcagcaacgtgtgaaggcaaggcttcatgaaatacttcagaaagacagagattttactgctgaagattatgaaaagcttactccatctggaagcatttctcttatcaaatcaatgcatttaattaaaaaccctgtgaagacctgtgataaagtttattccttaattcagagtttgacttctcaaatcagacatcgaatggaagatcctaaatcatcagatattcagctttaccatagtgaaacattggagcttatgctacgtagatggtccaagttagagaaagactttaaaacaaagaatggaagatatgatattagtaaaatccctgacatatatgactgtataaaatatgatgtccagcataatggttccttgaaattagaaaacacaatggaattatataggctttcgaaggcattagcagatattgttatccctcaggaatatggtataactaaagctgaaaaactggagattgccaaaggctactgtactcctctggttagaaaaattcgctcagaccttcagaggacacaagatgatgacactgtaaataaacttcatcctgtgtattctagaggtgttctgtctcctgaacgtcatgttcgtactagattatattttaccagtgaaagtcatgtacattctttgctgtctattcttcgctatggtgccttatgcaatgaatcaaaggatgaacagtggaaacgagctatggattatttaaacgttgtcaatgagctcaactacatgactcagattgttatcatgctttatgaggatcctaataaggatctttcctcagaagaacgctttcatgttgaattacactttagtccgggagccaaaggttgtgaagaagacaaaaatttgccatctggctatggatatagaccagcttccagagagaatgaaggcaggagaccttttaaaattgataatgatgatgaaccacatacttctaaaagagatgaagttgatcgagctgtgatattgtttaaaccaatggtatcagagccaattcatatacacaggaagtctccacttccaagatctaggaagacggctacaaatgatgaagagagccccctgagtgtgtctagcccagagggtactggtacctggctgcattataccagtggtgtgggtactgggcgtcgaagacgcagatcaggggaacaaatcacttcttcccctgtctcccccaaatcattggctttcacatccagtatttttggctcatggcaacaggttgtatctgaaaatgctaattacctgagaacaccaagaactcttgtggaacagaagcagaatcctactgtagggtctcactgtgcgggcctgtttagcacctcggtgctcgggggttcttcaagcgcacctaacctacaggattatgctcgtactcatcgtaaaaagctgacctcttctggctgcatagatggctttgaattgtattccatggtgccatctatttgtcctctagaaactcttcataatgccctatctttaaagcaagtggatgaatttcttgcttccattgcttctccatcatctgacgttccacggaagaccgctgaaatttcctctacagctttacgttccagtccaataatgagaaaaaaagtatctttaaatacgtatacacctgcaaagatcctcccaacaccaccagctaccttaaagagcactaaagcaagcagcaaaccagctacaagtggaccttctagtgcagttgttcctaatacctcatctcggaaaaagaatataactagcaaaacagaaacgcatgaacacaaaaaaaacactgggaaaaagaaatgaaatcttagcagaagctggaactttttatacttataaaaatagtatgttcttatgtttctccttatgcatttatgtgttcacttaaaaatgtttttaaatctaaggttttctttgtttatgttcaggtaaggaactgttgtcatgatctggaaatgtttaaaacaatgtttgttagcattctgtgagcagcaaaacttatagtgataaaaatcgattgttgttaatatgatgtttaccatgtgcacatagtaatgaaaaggaacataaaagcccagcaggctcgtaccaaagtcacagcagtaatgctatgtactgcagagtctgatgagctggcctttgtgcacacttttattttcatgggattgcatcttagctgttaaaacttctagattgaaatttgacagccagggttacatattggggacttttaaagtgtctttccaaagagatttcattaaccgtttagattagaatatctttcccaattgttacagtgacatatatgctgcaatatttaacaactggagtattagccacatgggttattttttcaatctgtgttttgaatttttttattgtgtgttatttaaaatattacatatgcagctgggagaactacacctttgtgcacatagatttatatattaatttgtagaaaatattttctttatatatttccttaccatacaaggtgccttgttcatcaggaaaacttttgttttgtattttgacaagaaaggcaccttcagagtttctttttaagtatagttgacaagtgtataaatgttacacttactttcagagttctttttagatctaaagaagtcagttcaaaaatggaaatcaacaatgttaggagaaatctgaattctgttaagttagtaagtattatgtatagcatctgtttttaaccatttccattcttatccctagtgtatcagttgatcacactaagaaagcttaaagattgagcatttgaaataaatgctctttataaatgattagatttttgaagggatattgaaatcattgcgctgtgatttcatctgtgatgtgaaaaatcaatttattatccttggtgctttcccccccaccaatgcacaaataattgtgaacagcttgaaatgacttaaactgtaatccaaatgggacaatctgataagaatttcatgcattggtagttaaataacttaaattgctaaagctttagcttgaaatttatgtttagaaaaactattgatttcccatggtatgaatataactattgtaattcttcaaatgagactcttctcaccttaaatagtcatatattaattaacttataggaaataagcatactatatgttagctgttttaaaaggtaccagatgtaagagtcataaatatatgcaattaaagaagttcatagatttcacatgaatgtaaatgtgttatatggagacatgtcttgtaaacagttgaatgtatgtaagttttctgtttgtgaaaatgtagttaatgtactcactgtggaggtcataaggaagctactttttttttaaagtggaacctaattaaaatatttccagaatcaaagagacttaaatggtaaatttttaaaattttcttatctcttactttttagttttcaaagtagaaaaaatcaggaatttttttattaactagtacttacatattaaataaaatttattattggctatatacatagcaatatattactttccaaactagaaagtacagtacaactaactttttccattgttatgcaagaactattactttcctgtagtcaccaaactcagtagtattgctctgtagactagacactctatttgtaaaaatcttagaatcactttccaaaacaaataaaaagtctactgtatcagagc

SEQ ID NO: 127054 - DNA, 505 bp, Homo sapiens
  Payload ID: 4893
  Gene Symbol: PPIP5K2
  Gene Name: diphosphoinositol pentakisphosphate kinase 2
  ENST ID: ENST00000515845
  CDS Start-End: 331-505
tttagagggcagtcctttggggaaccttggaaccacggtcagaaaggtaagaagattgctgtatcaactcaagaaagcagtaacttcactgtctttgtattttgaattgcaacaacaactttgatatcaacaatgaagcaatgatatctaagaacaaaagagtatttgccaacagtcatcataatatcaagtgattgtataagcagaaacaagctgtcacagacctgtgcgtcagctaatatatggagaatgctttcttctgatactatttacttagaggcagttttaatataaatcatttcaattatatctacatcaaataaaataaaaatgagtgaagcccccagattcttcgttggaccagaagatacagaaataaatcctggaaattatcgacatttcttccaccatgcagatgaagacgatgaggaggaagatgattctccaccagaaaggcagattgtggttggaatatgttccatggcaaagaaatccaaatccaaac

SEQ ID NO: 127055 - DNA, 1516 bp, Homo sapiens
  Payload ID: 4893
  Gene Symbol: PPIP5K2
  Gene Name: diphosphoinositol pentakisphosphate kinase 2
  ENST ID: ENST00000507921
  CDS Start-End: 160-1516
gagacccgaggagggcggggaagaggcgtgacggagattcctgaggtgtagtagcctgaggttcccttatgtggccctatagctgttactgaaggaagtagcctacgtccacgcctacaactgaagtctcttgacaaacacctcacccctgcctccgggatgaaagggggtaacctagacctgaatgggcttgaccatctcacaactgctcgcgtgacgaccgcattcgtggcaggatttccactggacaaagcggttgcctatgcaaaactcaggaatccatttgtaatcaatgacttgaatatgcagtatctcatacaagataggagagaagtatatagtattcttcaagctgaaggtattttacttcctcgttatgctattttgaaccgtgacccaaataatcccaaagaatgtaatctgattgaaggggaagatcatgtagaagtaaatggggaagtttttcaaaagccatttgtagaaaagccagtcagtgcagaagatcacaatgtttacatttattacccaacttctgctggtggtggaagtcaaagactctttagaaagattggcagtagaagtagtgtttattctccagaaagcaatgtacgaaaaacaggctcatatatatatgaagagtttatgcccacagatggtactgatgttaaggtttatacagtgggtccagattatgcccatgctgaagctcgaaaatctccagcacttgatggcaaggtggaacgagacagtgaaggaaaagaagtaagataccctgttattctcaatgcacgagagaaattaattgcttggaaagtctgccttgcttttaagcaaacagtttgtggctttgatttgttacgggccaatggacagtcctatgtctgtgatgtcaatggcttcagttttgtgaaaaattccatgaagtattatgatgactgtgcaaaaatacttggaaatattgtaatgcgagaacttgctccacaatttcatattccatggtcaatacccttagaagctgaagatatcccaattgtaccaactacatctggaactatgatggaacttagatgtgtcatagctgttatacgtcatggggatcgaacaccaaaacaaaaaatgaaaatggaagtgagacatcagaaattttttgatctttttgaaaagtgtgatggatataaatcagggaaattaaaactcaaaaaaccaaaacagttacaggaagtgctagatattgcacgacagcttcttatggagctagggcaaaataatgattctgaaattgaagaaaacaagccaaaacttgaacaacttaagactgtattagagatgtatggtcatttttctggaataaatcgtaaggttcagttgacctatctccctcatggttgtcctaaaacatctagtgaagaggaggacagccgaagagaagaaccatctttacttttggttctaaaatggggaggtgaattaactcctgcaggcagggtccaggctgaagaacttggaagagccttca

SEQ ID NO: 127056 - DNA, 683 bp, Homo sapiens
  Payload ID: 4893
  Gene Symbol: PPIP5K2
  Gene Name: diphosphoinositol pentakisphosphate kinase 2
  ENST ID: ENST00000507310
  CDS Start-End: 1-630
aaatatatcacagtagtagtatttgaagaggaggttattttgaatgaaccagtggaaaactggcctttatgtgattgtcttatttctttccattctaaaggatttccactggacaaagcggttgcctatgcaaaactcaggaatccatttgtaatcaatgacttgaatatgcagtatctcatacaagataggagagaagtatatagtattcttcaagctgaaggtattttacttcctcgttatgctattttgaaccgtgacccaaataatcccaaagaatgtaatctgattgaaggggaagatcatgtagaagtaaatggggaagtttttcaaaagccatttgtagaaaagccagtcagtgcagaagatcacaatgtttacatttattacccaacttctgctggtggtggaagtcaaagactctttagaaagattggcagtagaagtagtgtttattctccagaaagcaatgtacgaaaaacaggctcatatatatatgaagagtttatgcccacagatggtactgatgttaagggattcctcatgttttgtaacaacaacatctttagcagtctgaagcctatggactcttttttaagagtagtgtttttaaatgctttaaacatgtaagattatgatggagacaaattttattcaaatataataaaatatttaaaaaccaa

SEQ ID NO: 127057 - DNA, 2799 bp, Homo sapiens
  Payload ID: 4893
  Gene Symbol: PPIP5K2
  Gene Name: diphosphoinositol pentakisphosphate kinase 2
  ENST ID: ENST00000509597
  CDS Start-End: 1-1197
tatgactgtataaaatatgatgtccagcataatggttccttgaaattagaaaacacaatggaattatataggctttcgaaggcattagcagatattgttatccctcaggaatatggtataactaaagctgaaaaactggagattgccaaaggctactgtactcctctggttagaaaaattcgctcagaccttcagaggacacaagatgatgacactgtaaataaacttcatcctgtgtattctagaggtgttctgtctcctgaacgtcatgttcgtactagattatattttaccagtgaaagtcatgtacattctttgctgtctattcttcgctatggtgccttatgcaatgaatcaaaggatgaacagtggaaacgagctatggattatttaaacgttgtcaatgagctcaactacatgactcagattgttatcatgctttatgaggatcctaataaggatctttcctcagaagaacgctttcatgttgaattacactttagtccgggagccaaaggttgtgaagaagacaaaaatttgccatctggctatggatatagaccagcttccagagagaatgaaggcaggagaccttttaaaattgataatgatgatgaaccacatacttctaaaagagatgaagttgatcgagctgtgatattgtttaaaccaatggtatcagagccaattcatatacacaggaagtctccacttccaagatctaggaagacggctacaaatgatgttgtatctgaaaatgctaattacctgagaacaccaagaactcttgtggaacagaagcagaatcctactgtaggctttgaattgtattccatggtgccatctatttgtcctctagaaactcttcataatgccctatctttaaagcaagtggatgaatttcttgcttccattgcttctccatcatctgacgttccacggaagaccgctgaaatttcctctacagctttacgttccagtccaataatgagaaaaaaagtatctttaaatacgtatacacctgcaaagatcctcccaacaccaccagctaccttaaagagcactaaagcaagcagcaaaccagctacaagtggaccttctagtgcagttgttcctaatacctcatctcggaaaaagaatataactagcaaaacagaaacgcatgaacacaaaaaaaacactgggaaaaagaaatgaaatcttagcagaagctggaactttttatacttataaaaatagtatgttcttatgtttctccttatgcatttatgtgttcacttaaaaatgtttttaaatctaaggttttctttgtttatgttcaggtaaggaactgttgtcatgatctggaaatgtttaaaacaatgtttgttagcattctgtgagcagcaaaacttatagtgataaaaatcgattgttgttaatatgatgtttaccatgtgcacatagtaatgaaaaggaacataaaagcccagcaggctcgtaccaaagtcacagcagtaatgctatgtactgcagagtctgatgagctggcctttgtgcacacttttattttcatgggattgcatcttagctgttaaaacttctagattgaaatttgacagccagggttacatattggggacttttaaagtgtctttccaaagagatttcattaaccgtttagattagaatatctttcccaattgttacagtgacatatatgctgcaatatttaacaactggagtattagccacatgggttattttttcaatctgtgttttgaatttttttattgtgtgttatttaaaatattacatatgcagctgggagaactacacctttgtgcacatagatttatatattaatttgtagaaaatattttctttatatatttccttaccatacaaggtgccttgttcatcaggaaaacttttgttttgtattttgacaagaaaggcaccttcagagtttctttttaagtatagttgacaagtgtataaatgttacacttactttcagagttctttttagatctaaagaagtcagttcaaaaatggaaatcaacaatgttaggagaaatctgaattctgttaagttagtaagtattatgtatagcatctgtttttaaccatttccattcttatccctagtgtatcagttgatcacactaagaaagcttaaagattgagcatttgaaataaatgctctttataaatgattagatttttgaagggatattgaaatcattgcgctgtgatttcatctgtgatgtgaaaaatcaatttattatccttggtgctttcccccccaccaatgcacaaataattgtgaacagcttgaaatgacttaaactgtaatccaaatgggacaatctgataagaatttcatgcattggtagttaaataacttaaattgctaaagctttagcttgaaatttatgtttagaaaaactattgatttcccatggtatgaatataactattgtaattcttcaaatgagactcttctcaccttaaatagtcatatattaattaacttataggaaataagcatactatatgttagctgttttaaaaggtaccagatgtaagagtcataaatatatgcaattaaagaagttcatagatttcacatgaatgtaaatgtgttatatggagacatgtcttgtaaacagttgaatgtatgtaagttttctgtttgtgaaaatgtagttaatgtactcactgtggaggtcataaggaagctactttttttttaaagtggaacctaattaaaatatttccagaatcaaagagacttaaatggtaaatttttaaaat

SEQ ID NO: 127058 - DNA, 479 bp, Homo sapiens
  Payload ID: 4893
  Gene Symbol: PPIP5K2
  Gene Name: diphosphoinositol pentakisphosphate kinase 2
  ENST ID: ENST00000504275
  CDS Start-End: 152-307
aggagggcggggaagaggcgtgacggagattcctgaggtgtagtagcctgaggttcccttatgtggccctatagctgttactgaaggaagtagcctacgtccacgcctacaactgaagtctcttgacaaacacctcacccctgcctccgggatgaaagggggtaacctagacctgaatgggcttgaccatctcacaactgctcgcgtgacgaccgcattcgtggcagatggagtcttgctctgttgcccaggctggagtacaatggcacgatctccactcaccgcaacctccacctcctggatttgagtgattctcctgcttcagcctcctaagtatctgggattacaggatttccactggacaaagcggttgcctatgcaaaactcaggaatccatttgtaatcaatgacttgaatatgcagtatctcatacaagataggagagaagtatatagtattcttcaagctgaaggtatttt

SEQ ID NO: 127059 - DNA, 765 bp, Homo sapiens
  Payload ID: 4893
  Gene Symbol: PPIP5K2
  Gene Name: diphosphoinositol pentakisphosphate kinase 2
  ENST ID: ENST00000511022
  CDS Start-End: 1-765
aaggttgtgaagaagacaaaaatttgccatctggctatggatatagaccagcttccagagagaatgaaggcaggagaccttttaaaattgataatgatgatgaaccacatacttctaaaagagatgaagttgatcgagctgtgatattgtttaaaccaatggtatcagagccaattcatatacacaggaagtctccacttccaagatctaggaagacggctacaaatgatgttgtatctgaaaatgctaattacctgagaacaccaagaactcttgtggaacagaagcagaatcctactgtagggtctcactgtgcgggcctgtttagcacctcggtgctcgggggttcttcaagcgcacctaacctacaggattatgctcgtactcatcgtaaaaagctgacctcttctggctgcatagatgacgccacacgcggttctgctgttaaaaggttttctatctcatttgctcgacacccaaccaatggctttgaattgtattccatggtgccatctatttgtcctctagaaactcttcataatgccctatctttaaagcaagtggatgaatttcttgcttccattgcttctccatcatctgacgttccacggaagaccgctgaaatttcctctacagctttacgttccagtccaataatgagaaaaaaagtatctttaaatacgtatacacctgcaaagatcctcccaacaccaccagctaccttaaagagcactaaagcaagcagcaaaccagctacaagtggac

SEQ ID NO: 127060 - DNA, 473 bp, Homo sapiens
  Payload ID: 4893
  Gene Symbol: PPIP5K2
  Gene Name: diphosphoinositol pentakisphosphate kinase 2
  ENST ID: ENST00000502481
  CDS Start-End: 300-473
ccgaggggcttgtgctggagagaatgacagcctgggcgtggagtgacagtacagctttgagggtcctttcgcgccttgatttctcctcctgctcccccatggcttccctttttcatttcttgggttcgagacgccagaaattgaagatcagctaaaagggaaccgctgagcttctaccccacgctgtgcctggctccactgaagtgattagcctcgagttatgggactgctgatttccactggacaaagcggttgcctatgcaaaactcaggaatccatttgtaatcaatgacttgaatatgcagtatctcatacaagataggagagaagtatatagtattcttcaagctgaaggtattttacttcctcgttatgctattttgaaccgtgacccaaataatcccaaagaatgtaatctgattgaaggggaagatcatgtagaagtaaatggggaagtttttcaaaagccattt

SEQ ID NO: 127061 - DNA, 1070 bp, Homo sapiens
  Payload ID: 4893
  Gene Symbol: PPIP5K2
  Gene Name: diphosphoinositol pentakisphosphate kinase 2
  ENST ID: ENST00000613907
  CDS Start-End: 1-1070
ttcttcgctatggtgccttatgcaataccaatgattctcagaatgaagatggaggaatggtgaaggagatggaatcaaaggatgaacagtggaaacgagctatggattatttaaacgttgtcaatgagctcaactacatgactcagattgttatcatgctttatgaggatcctaataaggatctttcctcagaagaacgctttcatgttgaattacactttagtccgggagccaaaggttgtgaagaagacaaaaatttgccatctggctatggatatagaccagcttccagagagaatgaaggcaggagaccttttaaaattgataatgatgatgaaccacatacttctaaaagagatgaagttgatcgagctgtgatattgtttaaaccaatggtatcagagccaattcatatacacaggaagtctccacttccaagatctaggaagacggctacaaatgatgaagagagccccctgagtgtgtctagcccagagggtactggtacctggctgcattataccagtggtgtgggtactgggcgtcgaagacgcagatcaggggaacaaatcacttcttcccctgtctcccccaaatcattggctttcacatccagtatttttggctcatggcaacaggttgtatctgaaaatgctaattacctgagaacaccaagaactcttgtggaacagaagcagaatcctactgtaggctttgaattgtattccatggtgccatctatttgtcctctagaaactcttcataatgccctatctttaaagcaagtggatgaatttcttgcttccattgcttctccatcatctgacgttccacggaagaccgctgaaatttcctctacagctttacgttccagtccaataatgagaaaaaaagtatctttaaatacgtatacacctgcaaagatcctcccaacaccaccagctaccttaaagagcactaaagcaagcagcaaaccagctacaagtggaccttctagtgcagttgttcctaatacctcatctcggaaaaagaatataactagcaaaacagaaacgcatgaacacaaaaaa

SEQ ID NO: 127062 - DNA, 4933 bp, Homo sapiens
  Payload ID: 4893
  Gene Symbol: PPIP5K2
  Gene Name: diphosphoinositol pentakisphosphate kinase 2
  ENST ID: ENST00000613674
  CDS Start-End: 384-4220
aacacctcacccctgcctccgggatgaaagggggtaacctagacctgaatgggcttgaccatctcacaactgctcgcgtgacgaccgcattcgtggcaggtaagaagattgctgtatcaactcaagaaagcagtaacttcactgtctttgtattttgaattgcaacaacaactttgatatcaacaatgaagcaatgatatctaagaacaaaagagtatttgccaacagtcatcataatatcaagtgattgtataagcagaaacaagctgtcacagacctgtgcgtcagctaatatatggagaatgctttcttctgatactatttacttagaggcagttttaatataaatcatttcaattatatctacatcaaataaaataaaaatgagtgaagcccccagattcttcgttggaccagaagatacagaaataaatcctggaaattatcgacatttcttccaccatgcagatgaagacgatgaggaggaagatgattctccaccagaaaggcagattgtggttggaatatgttccatggcaaagaaatccaaatccaaaccaatgaaggaaattcttgaacggatctccttatttaaatatatcacagtagtagtatttgaagaggaggttattttgaatgaaccagtggaaaactggcctttatgtgattgtcttatttctttccattctaaaggatttccactggacaaagcggttgcctatgcaaaactcaggaatccatttgtaatcaatgacttgaatatgcagtatctcatacaagataggagagaagtatatagtattcttcaagctgaaggtattttacttcctcgttatgctattttgaaccgtgacccaaataatcccaaagaatgtaatctgattgaaggggaagatcatgtagaagtaaatggggaagtttttcaaaagccatttgtagaaaagccagtcagtgcagaagatcacaatgtttacatttattacccaacttctgctggtggtggaagtcaaagactctttagaaagattggcagtagaagtagtgtttattctccagaaagcaatgtacgaaaaacaggctcatatatatatgaagagtttatgcccacagatggtactgatgttaaggtttatacagtgggtccagattatgcccatgctgaagctcgaaaatctccagcacttgatggcaaggtggaacgagacagtgaaggaaaagaagtaagataccctgttattctcaatgcacgagagaaattaattgcttggaaagtctgccttgcttttaagcaaacagtttgtggctttgatttgttacgggccaatggacagtcctatgtctgtgatgtcaatggcttcagttttgtgaaaaattccatgaagtattatgatgactgtgcaaaaatacttggaaatattgtaatgcgagaacttgctccacaatttcatattccatggtcaatacccttagaagctgaagatatcccaattgtaccaactacatctggaactatgatggaacttagatgtgtcatagctgttatacgtcatggggatcgaacaccaaaacaaaaaatgaaaatggaagtgagacatcagaaattttttgatctttttgaaaagtgtgatggatataaatcagggaaattaaaactcaaaaaaccaaaacagttacaggaagtgctagatattgcacgacagcttcttatggagctagggcaaaataatgattctgaaattgaagaaaacaagccaaaacttgaacaacttaagactgtattagagatgtatggtcatttttctggaataaatcgtaaggttcagttgacctatctccctcatggttgtcctaaaacatctagtgaagaggaggacagccgaagagaagaaccatctttacttttggttctaaaatggggaggtgaattaactcctgcaggcagggtccaggctgaagaacttggaagagccttcaggtgtatgtatcctggaggtcaaggagattatgcaggatttcctggttgtggtttacttagattacatagcacctacagacatgacctcaaaatatatgcctctgatgaaggacgagtccagatgactgcagctgcttttgcaaaggggcttttagctttggaaggagagcttacacccattcttgttcaaatggtgaaaagtgcaaatatgaacggtcttttggatagtgatagtgactctctgagcagttgtcagcaacgtgtgaaggcaaggcttcatgaaatacttcagaaagacagagattttactgctgaagattatgaaaagcttactccatctggaagcatttctcttatcaaatcaatgcatttaattaaaaaccctgtgaagacctgtgataaagtttattccttaattcagagtttgacttctcaaatcagacatcgaatggaagatcctaaatcatcagatattcagctttaccatagtgaaacattggagcttatgctacgtagatggtccaagttagagaaagactttaaaacaaagaatggaagatatgatattagtaaaatccctgacatatatgactgtataaaatatgatgtccagcataatggttccttgaaattagaaaacacaatggaattatataggctttcgaaggcattagcagatattgttatccctcaggaatatggtataactaaagctgaaaaactggagattgccaaaggctactgtactcctctggttagaaaaattcgctcagaccttcagaggacacaagatgatgacactgtaaataaacttcatcctgtgtattctagaggtgttctgtctcctgaacgtcatgttcgtactagattatattttaccagtgaaagtcatgtacattctttgctgtctattcttcgctatggtgccttatgcaataccaatgattctcagaatgaagatggaggaatggtgaaggagatggaatcaaaggatgaacagtggaaacgagctatggattatttaaacgttgtcaatgagctcaactacatgactcagattgttatcatgctttatgaggatcctaataaggatctttcctcagaagaacgctttcatgttgaattacactttagtccgggagccaaaggttgtgaagaagacaaaaatttgccatctggctatggatatagaccagcttccagagagaatgaaggcaggagaccttttaaaattgataatgatgatgaaccacatacttctaaaagagatgaagttgatcgagctgtgatattgtttaaaccaatggtatcagagccaattcatatacacaggaagtctccacttccaagatctaggaagacggctacaaatgatgaagagagccccctgagtgtgtctagcccagagggtactggtacctggctgcattataccagtggtgtgggtactgggcgtcgaagacgcagatcaggggaacaaatcacttcttcccctgtctcccccaaatcattggctttcacatccagtatttttggctcatggcaacaggttgtatctgaaaatgctaattacctgagaacaccaagaactcttgtggaacagaagcagaatcctactgtagggtctcactgtgcgggcctgtttagcacctcggtgctcgggggttcttcaagcgcacctaacctacaggattatgctcgtactcatcgtaaaaagctgacctcttctggctgcatagatgacgccacacgcggttctgctgttaaaaggttttctatctcatttgctcgacacccaaccaatgaacacctacacctctataggtgctggtccgtttcctctgtggaatttctaggctccagtggctttgaattgtattccatggtgccatctatttgtcctctagaaactcttcataatgccctatctttaaagcaagtggatgaatttcttgcttccattgcttctccatcatctgacgttccacggaagaccgctgaaatttcctctacagctttacgttccagtccaataatgagaaaaaaagtatctttaaatacgtatacacctgcaaagatcctcccaacaccaccagctaccttaaagagcactaaagcaagcagcaaaccagctacaagtggaccttctagtgcagttgttcctaatacctcatctcggaaaaagaatataactagcaaaacagaaacgcatgaacacaaaaaaaacactgggaaaaagaaatgaaatcttagcagaagctggaactttttatacttataaaaatagtatgttcttatgtttctccttatgcatttatgtgttcacttaaaaatgtttttaaatctaaggttttctttgtttatgttcaggtaaggaactgttgtcatgatctggaaatgtttaaaacaatgtttgttagcattctgtgagcagcaaaacttatagtgataaaaatcgattgttgttaatatgatgtttaccatgtgcacatagtaatgaaaaggaacataaaagcccagcaggctcgtaccaaagtcacagcagtaatgctatgtactgcagagtctgatgagctggcctttgtgcacacttttattttcatgggattgcatcttagctgttaaaacttctagattgaaatttgacagccagggttacatattggggacttttaaagtgtctttccaaagagatttcattaaccgtttagattagaatatctttcccaattgttacagtgacatatatgctgcaatatttaacaactggagtattagccacatgggttattttttcaatctgtgttttgaatttttttattgtgtgttatttaaaatattacatatgcagctgggagaactacacctttgtgcacatagatttatatattaatttgtagaaaatattttctttatatatttccttaccatacaaggtgccttgttcatcaggaaaac

SEQ ID NO: 127063 - DNA, 6010 bp, Homo sapiens
  Payload ID: 4893
  Gene Symbol: PPIP5K2
  Gene Name: diphosphoinositol pentakisphosphate kinase 2
  ENST ID: ENST00000627916
  CDS Start-End: 285-4121
gtaagaagattgctgtatcaactcaagaaagcagtaacttcactgtctttgtattttgaattgcaacaacaactttgatatcaacaatgaagcaatgatatctaagaacaaaagagtatttgccaacagtcatcataatatcaagtgattgtataagcagaaacaagctgtcacagacctgtgcgtcagctaatatatggagaatgctttcttctgatactatttacttagaggcagttttaatataaatcatttcaattatatctacatcaaataaaataaaaatgagtgaagcccccagattcttcgttggaccagaagatacagaaataaatcctggaaattatcgacatttcttccaccatgcagatgaagacgatgaggaggaagatgattctccaccagaaaggcagattgtggttggaatatgttccatggcaaagaaatccaaatccaaaccaatgaaggaaattcttgaacggatctccttatttaaatatatcacagtagtagtatttgaagaggaggttattttgaatgaaccagtggaaaactggcctttatgtgattgtcttatttctttccattctaaaggatttccactggacaaagcggttgcctatgcaaaactcaggaatccatttgtaatcaatgacttgaatatgcagtatctcatacaagataggagagaagtatatagtattcttcaagctgaaggtattttacttcctcgttatgctattttgaaccgtgacccaaataatcccaaagaatgtaatctgattgaaggggaagatcatgtagaagtaaatggggaagtttttcaaaagccatttgtagaaaagccagtcagtgcagaagatcacaatgtttacatttattacccaacttctgctggtggtggaagtcaaagactctttagaaagattggcagtagaagtagtgtttattctccagaaagcaatgtacgaaaaacaggctcatatatatatgaagagtttatgcccacagatggtactgatgttaaggtttatacagtgggtccagattatgcccatgctgaagctcgaaaatctccagcacttgatggcaaggtggaacgagacagtgaaggaaaagaagtaagataccctgttattctcaatgcacgagagaaattaattgcttggaaagtctgccttgcttttaagcaaacagtttgtggctttgatttgttacgggccaatggacagtcctatgtctgtgatgtcaatggcttcagttttgtgaaaaattccatgaagtattatgatgactgtgcaaaaatacttggaaatattgtaatgcgagaacttgctccacaatttcatattccatggtcaatacccttagaagctgaagatatcccaattgtaccaactacatctggaactatgatggaacttagatgtgtcatagctgttatacgtcatggggatcgaacaccaaaacaaaaaatgaaaatggaagtgagacatcagaaattttttgatctttttgaaaagtgtgatggatataaatcagggaaattaaaactcaaaaaaccaaaacagttacaggaagtgctagatattgcacgacagcttcttatggagctagggcaaaataatgattctgaaattgaagaaaacaagccaaaacttgaacaacttaagactgtattagagatgtatggtcatttttctggaataaatcgtaaggttcagttgacctatctccctcatggttgtcctaaaacatctagtgaagaggaggacagccgaagagaagaaccatctttacttttggttctaaaatggggaggtgaattaactcctgcaggcagggtccaggctgaagaacttggaagagccttcaggtgtatgtatcctggaggtcaaggagattatgcaggatttcctggttgtggtttacttagattacatagcacctacagacatgacctcaaaatatatgcctctgatgaaggacgagtccagatgactgcagctgcttttgcaaaggggcttttagctttggaaggagagcttacacccattcttgttcaaatggtgaaaagtgcaaatatgaacggtcttttggatagtgatagtgactctctgagcagttgtcagcaacgtgtgaaggcaaggcttcatgaaatacttcagaaagacagagattttactgctgaagattatgaaaagcttactccatctggaagcatttctcttatcaaatcaatgcatttaattaaaaaccctgtgaagacctgtgataaagtttattccttaattcagagtttgacttctcaaatcagacatcgaatggaagatcctaaatcatcagatattcagctttaccatagtgaaacattggagcttatgctacgtagatggtccaagttagagaaagactttaaaacaaagaatggaagatatgatattagtaaaatccctgacatatatgactgtataaaatatgatgtccagcataatggttccttgaaattagaaaacacaatggaattatataggctttcgaaggcattagcagatattgttatccctcaggaatatggtataactaaagctgaaaaactggagattgccaaaggctactgtactcctctggttagaaaaattcgctcagaccttcagaggacacaagatgatgacactgtaaataaacttcatcctgtgtattctagaggtgttctgtctcctgaacgtcatgttcgtactagattatattttaccagtgaaagtcatgtacattctttgctgtctattcttcgctatggtgccttatgcaataccaatgattctcagaatgaagatggaggaatggtgaaggagatggaatcaaaggatgaacagtggaaacgagctatggattatttaaacgttgtcaatgagctcaactacatgactcagattgttatcatgctttatgaggatcctaataaggatctttcctcagaagaacgctttcatgttgaattacactttagtccgggagccaaaggttgtgaagaagacaaaaatttgccatctggctatggatatagaccagcttccagagagaatgaaggcaggagaccttttaaaattgataatgatgatgaaccacatacttctaaaagagatgaagttgatcgagctgtgatattgtttaaaccaatggtatcagagccaattcatatacacaggaagtctccacttccaagatctaggaagacggctacaaatgatgaagagagccccctgagtgtgtctagcccagagggtactggtacctggctgcattataccagtggtgtgggtactgggcgtcgaagacgcagatcaggggaacaaatcacttcttcccctgtctcccccaaatcattggctttcacatccagtatttttggctcatggcaacaggttgtatctgaaaatgctaattacctgagaacaccaagaactcttgtggaacagaagcagaatcctactgtagggtctcactgtgcgggcctgtttagcacctcggtgctcgggggttcttcaagcgcacctaacctacaggattatgctcgtactcatcgtaaaaagctgacctcttctggctgcatagatgacgccacacgcggttctgctgttaaaaggttttctatctcatttgctcgacacccaaccaatgaacacctacacctctataggtgctggtccgtttcctctgtggaatttctaggctccagtggctttgaattgtattccatggtgccatctatttgtcctctagaaactcttcataatgccctatctttaaagcaagtggatgaatttcttgcttccattgcttctccatcatctgacgttccacggaagaccgctgaaatttcctctacagctttacgttccagtccaataatgagaaaaaaagtatctttaaatacgtatacacctgcaaagatcctcccaacaccaccagctaccttaaagagcactaaagcaagcagcaaaccagctacaagtggaccttctagtgcagttgttcctaatacctcatctcggaaaaagaatataactagcaaaacagaaacgcatgaacacaaaaaaaacactgggaaaaagaaatgaaatcttagcagaagctggaactttttatacttataaaaatagtatgttcttatgtttctccttatgcatttatgtgttcacttaaaaatgtttttaaatctaaggttttctttgtttatgttcaggtaaggaactgttgtcatgatctggaaatgtttaaaacaatgtttgttagcattctgtgagcagcaaaacttatagtgataaaaatcgattgttgttaatatgatgtttaccatgtgcacatagtaatgaaaaggaacataaaagcccagcaggctcgtaccaaagtcacagcagtaatgctatgtactgcagagtctgatgagctggcctttgtgcacacttttattttcatgggattgcatcttagctgttaaaacttctagattgaaatttgacagccagggttacatattggggacttttaaagtgtctttccaaagagatttcattaaccgtttagattagaatatctttcccaattgttacagtgacatatatgctgcaatatttaacaactggagtattagccacatgggttattttttcaatctgtgttttgaatttttttattgtgtgttatttaaaatattacatatgcagctgggagaactacacctttgtgcacatagatttatatattaatttgtagaaaatattttctttatatatttccttaccatacaaggtgccttgttcatcaggaaaacttttgttttgtattttgacaagaaaggcaccttcagagtttctttttaagtatagttgacaagtgtataaatgttacacttactttcagagttctttttagatctaaagaagtcagttcaaaaatggaaatcaacaatgttaggagaaatctgaattctgttaagttagtaagtattatgtatagcatctgtttttaaccatttccattcttatccctagtgtatcagttgatcacactaagaaagcttaaagattgagcatttgaaataaatgctctttataaatgattagatttttgaagggatattgaaatcattgcgctgtgatttcatctgtgatgtgaaaaatcaatttattatccttggtgctttcccccccaccaatgcacaaataattgtgaacagcttgaaatgacttaaactgtaatccaaatgggacaatctgataagaatttcatgcattggtagttaaataacttaaattgctaaagctttagcttgaaatttatgtttagaaaaactattgatttcccatggtatgaatataactattgtaattcttcaaatgagactcttctcaccttaaatagtcatatattaattaacttataggaaataagcatactatatgttagctgttttaaaaggtaccagatgtaagagtcataaatatatgcaattaaagaagttcatagatttcacatgaatgtaaatgtgttatatggagacatgtcttgtaaacagttgaatgtatgtaagttttctgtttgtgaaaatgtagttaatgtactcactgtggaggtcataaggaagctactttttttttaaagtggaacctaattaaaatatttccagaatcaaagagacttaaatggtaaatttttaaaattttcttatctcttactttttagttttcaaagtagaaaaaatcaggaatttttttattaactagtacttacatattaaataaaatttattattggctatatacatagcaatatattactttccaaactagaaagtacagtacaactaactttttccattgttatgcaagaactattactttcctgtagtcaccaaactcagtagtattgctctgtagactagacactctatttgtaaaaatcttagaatcactttccaaaacaaataaaaagtctactgtatcagagc

SEQ ID NO: 127064 - DNA, 2221 bp, Homo sapiens
  Payload ID: 4894
  Gene Symbol: DPH1
  Gene Name: diphthamide biosynthesis 1
  Uniprot ID: Q9BZG8
  ENST ID: ENST00000263083
  CDS Start-End: 46-1377
gtctgcgctctccgcgttcttccagcgctgtctttttagtaccacatgcgcaggcaggtgatggcggcgctggtcgtatccggggcagcggagcagggcggccgagacggccctggcagaggtcgggcccctcggggccgcgtggccaatcagatcccccctgagatcctgaagaaccctcagctgcaggcagcaatccgggtcctgccttccaactacaactttgagatccccaagaccatctggaggatccaacaagcccaggccaagaaggtggccttgcaaatgccggaaggcctcctcctctttgcctgtaccattgtggatatcttggaaaggttcacggaggccgaagtgatggtgatgggtgacgtgacctacggggcttgctgtgtggatgacttcacagcgagggccctgggagctgacttcttggtgcactacggccacagttgcctgattcccatggacacctcggcccaagacttccgggtgctgtacgtctttgtggacatccggatagacactacacacctcctggactctctccgcctcacctttcccccagccactgcccttgccctggtcagcaccattcagtttgtgtcgaccttgcaggcagccgcccaggagctgaaagccgagtatcgtgtgagtgtcccacagtgcaagcccctgtcccctggagagatcctgggctgcacatccccccgactgtccaaagaggtggaggccgttgtgtatcttggagatggccgcttccatctggagtctgtcatgattgccaaccccaatgtccccgcttaccggtatgacccatatagcaaagtcctatccagagaacactatgaccaccagcgcatgcaggctgctcgccaagaagccatagccactgcccgctcagctaagtcctggggccttattctgggcactttgggccgccagggcagtcctaagatcctggagcacctggaatctcgactccgagccttgggcctttcctttgtgaggctgctgctctctgagatcttccccagcaagcttagcctacttcctgaggtggatgtgtgggtgcaggtggcatgtccacgtctctccattgactggggcacagccttccccaagccgctgctgacaccctatgaggcggccgtggctctgagggacatttcctggcagcagccctacccgatggacttctacgctggcagctccttggggccctggacggtgaaccacggccaggaccgccgtccccacgccccgggccggcccgcgcgggggaaggtgcaggaggggtccgcgcgtcccccttcggccgtggcttgcgaggactgcagctgcagggacgagaaggtggcgccgctggctccttgacgcgctcccgggcctcagggtcctgccctccggaggagcagcctcgaggctggtggttttcagagcaggaggccgacgttttctccgcattggaagagcccgccgtctgcaggggcctggaggaatcactggggatggtggcacaggcactgaacaggctggggccttttgacggccttcttggtttcagccaaggggctgcgctagcagcccttgtgtgtgccctgggccaggcaggcgatccccgcttccccttgccacggtttatcctcttggtgtctggtttctgtccccggggcattgggttcaaggaatccatcctgcaaaggcccttgtcattgccttcgctccatgtttttggggacactgacaaagtcatcccctctcaggagagtgtgcaactggccagccaatttcccggagccatcaccctcacccactctggtggccacttcattccagcagctgcaccccagcgtcaggcctacctcaagttcttggaccagtttgcagagtgaaagatcaagaaatgtctctgctcctacatccagctcctctaggggcagcctccgtcatccatgccctcccaggaccctccactcactgctgtgagtgcgcctcaccagaaccagttaagagacaactatcaattcttgagacccaaattataagggccctgccctgtactgaagaaaaggggagcacaaggccttaatggacattgacttgtgaaaacgcaaacatgaatatggttggagagccctggattaggagggtgacatggggaaggcagaggctggcaccatggtgactgccacataataaagtggtgatttggattttg

SEQ ID NO: 127065 - DNA, 1747 bp, Homo sapiens
  Payload ID: 4894
  Gene Symbol: DPH1
  Gene Name: diphthamide biosynthesis 1
  Uniprot ID: Q9BZG8
  ENST ID: ENST00000570477
  CDS Start-End: 277-1368
atttctatgcttgagcgggggcaccggcaggccctgaaaagggatccctattccatctcaatctggcttcagccaaagacagacaccaactcaggccttatatccattctaggtcgggcccctcggggccgcgtggccaatcagatcccccctgagatcctgaagaaccctcagctgcaggcagcaatccgggtcctgccttccaactacaactttgagatccccaagaccatctggaggatccaacaagcccaggccaagaaggtggccttgcaaatgccggaaggcctcctcctctttgcctgtaccattgtggatatcttggaaaggttcacggaggccgaagtgatggtgatgggtgacgtgacctacggggcttgctgtgtggatgacttcacagcgagggccctgggagctgacttcttggtgcactacggccacagttgcctgattcccatggacacctcggcccaagacttccgggtgctgtacgtctttgtggacatccggatagacactacacacctcctggactctctccgcctcacctttcccccagccactgcccttgccctggtcagcaccattcagtttgtgtcgaccttgcaggcagccgcccaggagctgaaagccgagtatcgtgtgagtgtcccacagtgcaagcccctgtcccctggagagatcctgggctgcacatccccccgactgtccaaagaggtggaggccgttgtgtatcttggagatggccgcttccatctggagtctgtcatgattgccaaccccaatgtccccgcttaccggtatgacccatatagcaaagtcctatccagagaacactatgaccaccagcgcatgcaggctgctcgccaagaagccatagccactgcccgctcagctaagtcctggggccttattctgggcactttgggccgccagggcagtcctaagatcctggagcacctggaatctcgactccgagccttgggcctttcctttgtgaggctgctgctctctgagatcttccccagcaagcttagcctacttcctgaggtggatgtgtgggtgcaggtggcatgtccacgtctctccattgactggggcacagccttccccaagccgctgctgacaccctatgaggcggccgtggctctgagggacatttcctggcagcagccctacccgatggacttctacgctggcagctccttggggccctggacggtgaaccacggccaggaccgccgtccccacgccccgggccggcccgcgcgggggaaggtgcaggaggggtccgcgcgtcccccttcggccgtggcttgcgaggactgcagctgcagggacgagaaggtggcgccgctggctccttgacgcgctcccgggcctcagggtcctgccctccggaggagcagcctcgaggctggtggttttcagagcaggaggccgacgttttctccgcattggaagagcccgccgtctgcaggggcctggaggaatcactggggatggtggcacaggcactgaacaggctggggccttttgacggccttcttggtttcagccaaggggctgcgctagcagcccttgtgtgtgccctgggccaggcaggcgatccccgcttccccttgccacggtttatcctcttggtgtctggtttctgtccccggggcattgggttcaaggaatccatcctgcaaaggcccttgtcattgccttcgctccatgtttttggggacactgacaaagtcat

SEQ ID NO: 127066 - DNA, 1733 bp, Homo sapiens
  Payload ID: 4894
  Gene Symbol: DPH1
  Gene Name: diphthamide biosynthesis 1
  ENST ID: ENST00000571418
  CDS Start-End: 1-1295
gcaggcaggtgatggcggcgctggtcgtatccggggcagcggagcagggcggccgagacggccctggcagaggtcgggcccctcggggccgcgtggccaatcagatcccccctgagatcctgaagaaccctcagctgcaggcagcaatccgggtcctgccttccaactacaactttgagatccccaagaccatctggaggatccaacaagcccaggccaagaaggtggccttgcaaatgccggaaggcctcctcctctttgcctgtaccattgtggatatcttggaaaggttcacggaggccgaagtgatggtgatgggtgacgtgacctacggggcttgctgtgtggatgacttcacagcgagggccctgggagctgacttcttggtgcactacggccacagttgcctgattcccatggacacctcggcccaagacttccgggtgctgtacgtctttgtggacatccggatagacactacacacctcctggactctctccgcctcacctttcccccagccactgcccttgccctggcagccgcccaggagctgaaagccgagtatcgtgtgagtgtcccacagtgcaagcccctgtcccctggagagatcctgggctgcacatccccccgactgtccaaagaggtggaggccgttgtgtatcttggagatggccgcttccatctggagtctgtcatgattgccaaccccaatgtccccgcttaccggtatgacccatatagcaaagtcctatccagagaacactatgaccaccagcgcatgcaggctgctcgccaagaagccatagccactgcccgctcagctaagtcctggggccttattctgggcactttgggccgccagggcagtcctaagatcctggagcacctggaatctcgactccgagccttgggcctttcctttgtgaggctgctgctctctgagatcttccccagcaagcttagcctacttcctgaggtggatgtgtgggtgcaggtggcatgtccacgtctctccattgactggggcacagccttccccaagccgctgctgacaccctatgaggcggccgtggctctgagggacatttcctggcagcagccctacccgatggacttctacgctggcagctccttggggccctggacggtgaaccacggccaggaccgccgtccccacgccccgggccggcccgcgcgggggaaggtgcaggaggggtccgcgcgtcccccttcggccgtggcttgcgaggactgcagctgcagggacgagaaggtggcgccgctggctccttgacgcgctcccgggcctcagggtcctgccctccggaggagcagcctcgaggctggtggttttcagagcaggaggccgacgttttctccgcattggaagagcccgccgtctgcaggggcctggaggaatcactggggatggtggcacaggcactgaacaggctggggccttttgacggccttcttggtttcagccaaggggctgcgctagcagcccttgtgtgtgccctgggccaggcaggcgatccccgcttccccttgccacggtttatcctcttggtgtctggtttctgtccccggggcattgggttcaaggaatccatcctgcaaaggcccttgtcattgccttcgctccatgtttttggggacactgacaaagtcatcccctctcaggagagtgtgcaactggccagccaatttcccggagccatcaccctcaccc

SEQ ID NO: 127067 - DNA, 1644 bp, Homo sapiens
  Payload ID: 4894
  Gene Symbol: DPH1
  Gene Name: diphthamide biosynthesis 1
  ENST ID: ENST00000575667
  CDS Start-End: 1-644
gcaggcaggtgatggcggcgctggtcgtatccggggcagcggagcagggcggccgagacggccctggcagaggtcgggcccctcggggccgcgtggccaatcagatcccccctgagatcctgaagaaccctcagctgcaggcagcaatccgggtcctgccttccaactacaactttgagatccccaagaccatctggaggatccaacaagcccaggccaagaaggtggccttgcaaatgccggaaggcctcctcctctttgcctgtaccattgtggatatcttggaaagttcccatggacacctcggcccaagacttccgggtgctgtacgtctttgtggacatccggatagacactacacacctcctggactctctccgcctcacctttcccccagccactgcccttgccctggtcagcaccattcagtttgtgtcgaccttgcaggcagccgcccaggagctgaaagccgagtatcgtgtgagtgtcccacagtgcaagcccctgtcccctggagagatcctgggctgcacatccccccgactgtccaaagaggtggaggccgttgtgtatcttggagatggccgcttccatctggagtctgtcatgattgccaaccccaatgtccccgcttaccggtatgacccatatagcaaagtcctatccagagaacactatgaccaccagcgcatgcaggctgctcgccaagaagccatagccactgcccgctcagctaagtcctggggccttattctgggcactttgggccgccagggcagtcctaagatcctggagcacctggaatctcgactccgagccttgggcctttcctttgtgaggctgctgctctctgagatcttccccagcaagcttagcctacttcctgaggtggatgtgtgggtgcaggtggcatgtccacgtctctccattgactggggcacagccttccccaagccgctgctgacaccctatgaggcggccgtggctctgagggacatttcctggcagcagccctacccgatggacttctacgctggcagctccttggggccctggacggtgaaccacggccaggaccgccgtccccacgccccgggccggcccgcgcgggggaaggtgcaggaggggtccgcgcgtcccccttcggccgtggcttgcgaggactgcagctgcagggacgagaaggtggcgccgctggctccttgacgcgctcccgggcctcagggtcctgccctccggaggagcagcctcgaggctggtggttttcagagcaggaggccgacgttttctccgcattggaagagcccgccgtctgcaggggcctggaggaatcactggggatggtggcacaggcactgaacaggctggggccttttgacggccttcttggtttcagccaaggggctgcgctagcagcccttgtgtgtgccctgggccaggcaggcgatccccgcttccccttgccacggtttatcctcttggtgtctggtttctgtccccggggcattgggttcaaggaatccatcctgcaaaggcccttgtcattgccttcgctccatgtttttggggacactgacaaagtcatcccctctcaggagagtgtgcaactggccagccaatttcccggagccatcaccctcaccc

SEQ ID NO: 127068 - DNA, 2013 bp, Homo sapiens
  Payload ID: 4894
  Gene Symbol: DPH1
  Gene Name: diphthamide biosynthesis 1
  ENST ID: ENST00000571710
  CDS Start-End: 1-446
ctttgggccgccagggcagtcctaagatcctggagcacctggaatctcgactccgagccttgggcctttcctttgtgaggctgctgctctctgagatcttccccagcaagcttagcctacttcctgaggtggatgtgtgggtgcaggtggcatgtccacgtctctccattgactggggcacagccttccccaagccgctgctgacaccctatgaggcggccgtggctctgagggacatttcctggcagcagccctacccgatggacttctacgctggcagctccttggggccctggacggtgaaccacggccaggaccgccgtccccacgccccgggccggcccgcgcgggggaaggtgcaggaggggtccgcgcgtcccccttcggccgtggcttgcgaggactgcagctgcagggacgagaaggtggcgccgctggctccttgacgcgctcccgggcctcaggtatcagcccccgctctgggtgcgccccgccttttgccgttgtcatgggaacgccttggcgctccgaggcccgccctcggggcggtgctgacgttcggttccgccccgtgcattgtgcttccgctcggggaaagaccgcttccggtgcttccgtcgctccttgccgggcataatggccgcgcagcgacccctgcgggtcctgtgcctggcgggcttccggcagagcgagcggggcttccgtgagaagaccggggcgctgaggaaggcgctgcggggtcgcgccgagctcgtgtgcctcagcggcccgcacccggtccccgaccccccgggccccgagggcgccagatcagacttcggtgagacaagccccgctccggaaacgcactcagtttcctccatcttgtttcgtccccctcgacacccttcagcatcccccaccctgcgtccacccgcattcctcccacccagtccacacccttcatttctcgcgacccataccctctttgctcaaactgcagcctgtcctcccaggcttccgccttcaccgtcttcctccgctgtctcctgttcaggccaatccactcatttcccccctctcatttcccccagacttttgcctcgattccctttttctctctgtcatctcgaaccctcctgccctttctcatttctttccttcctggagcctcccatgccctaatcccatcctttttcctcatatcgctgtagggtcctgccctccggaggagcagcctcgaggctggtggttttcagagcaggaggccgacgttttctccgcattggaagagcccgccgtctgcaggggcctggaggaatcactggggatggtggcacaggcactgaacaggctggggccttttgacggccttcttggtttcagccaaggggctgcgctagcagcccttgtgtgtgccctgggccaggcaggcgatccccgcttccccttgccacggtttatcctcttggtgtctggtttctgtccccggggcattgggttcaaggaatccatcctgcaaaggcccttgtcattgccttcgctccatgtttttggggacactgacaaagtcatcccctctcaggagagtgtgcaactggccagccaatttcccggagccatcaccctcacccactctggtggccacttcattccagcagctgcaccccagcgtcaggcctacctcaagttcttggaccagtttgcagagtgaaagatcaagaaatgtctctgctcctacatccagctcctctaggggcagcctccgtcatccatgccctcccaggaccctccactcactgctgtgagtgcgcctcaccagaaccagttaagagacaactatcaattcttgagacccaaattataagggccctgccctgtactgaagaaaaggggagcacaaggccttaatggacattgacttgtgaaaacgcaaacatgaatatggttggagagccctggattaggagggtgacatggggaaggcagaggctggcaccatggtgactgccacataataaagtggtgatttgg

SEQ ID NO: 127069 - DNA, 558 bp, Homo sapiens
  Payload ID: 4894
  Gene Symbol: DPH1
  Gene Name: diphthamide biosynthesis 1
  ENST ID: ENST00000570833
  CDS Start-End: 1-150
accattgtggatatcttggaaaggttcacggaggccgaagtgatggtgatgggtgacgtgacctacggggcttgctgtgtggatgacttcacagcgagggccctgggagctgacttcttggtgcactacggccacagttgcctgagctgaagccactgcgcctggctgctcagagacctgagcctggccgggccctctgctgctcctgccttcccaaacagcccctgaactcctccctcccacagttcccatggacacctcggcccaagacttccgggtgctgtacgtctttgtggacatccggatagacactacacacctcctggactctctccgcctcacctttcccccagccactgcccttgccctggtcagcaccattcagtttgtgtcgaccttgcaggcagccgcccaggagctgaaagccgagtatcgtgtgagtgtcccacagtgcaagcccctgtcccctggagagatcctgggctgcacatccccccgactgtccaaagaggtggaggccgttgtgtatcttggagatggccgcttccatctggagtc

SEQ ID NO: 127070 - DNA, 775 bp, Homo sapiens
  Payload ID: 4894
  Gene Symbol: DPH1
  Gene Name: diphthamide biosynthesis 1
  ENST ID: ENST00000607788
  CDS Start-End: 1-311
ggtgggtgcaggtggcatgtccacgtctctccattgactggggcacagccttccccaagccgctgctgacaccctatgaggcggccgtggctctgagggacatttcctggcagcagccctacccgatggacttctacgctggcagctccttggggccctggacggtgaaccacggccaggaccgccgtccccacgccccgggccggcccgcgcgggggaaggtgcaggaggggtccgcgcgtcccccttcggccgtggcttgcgaggactgcagctgcagggacgagaaggtggcgccgctggctccttgacgcgctcccgggcctcaggagagtgtgcaactggccagccaatttcccggagccatcaccctcacccactctggtggccacttcattccagcagctgcaccccagcgtcaggcctacctcaagttcttggaccagtttgcagagtgaaagatcaagaaatgtctctgctcctacatccagctcctctaggggcagcctccgtcatccatgccctcccaggaccctccactcactgctgtgagtgcgcctcaccagaaccagttaagagacaactatcaattcttgagacccaaattataagggccctgccctgtactgaagaaaaggggagcacaaggccttaatggacattgacttgtgaaaacgcaaacatgaatatggttggagagccctggattaggagggtgacatggggaaggcagaggctggcaccatggtgactgccacataataaagtggtgatt

SEQ ID NO: 127071 - DNA, 657 bp, Homo sapiens
  Payload ID: 4894
  Gene Symbol: DPH1
  Gene Name: diphthamide biosynthesis 1
  ENST ID: ENST00000575162
  CDS Start-End: 1-324
ctacgctggcagctccttggggccctggacggtgaaccacggccaggaccgccgtccccacgccccgggccggcccgcgcgggggaaggtaggcgggggcttccaggagggaggagagaccgcgcctgggcactggccgccgccctgcgaccgcgacgggaaacgcacaggagcggagcggagggaaacgcagggtcgcaggagcgagaccctaaccaaagtctgcgacctcaggtgcaggaggggtccgcgcgtcccccttcggccgtggcttgcgaggactgcagctgcagggacgagaaggtggcgccgctggctccttgacgcgctcccgggcctcagggtcctgccctccggaggagcagcctcgaggctggtggttttcagagcaggaggccgacgttttctccgcattggaagagcccgccgtctgcaggggcctggaggaatcactggggatggtggcacaggcactgaacaggctggggccttttgacggccttcttggtttcagccaaggggctgcgctagcagcccttgtgtgtgccctgggccaggcaggcgatccccgcttccccttgccacggtttatcctcttggtgtctggtttctgtccccggggcattgggttcaaggaatccatcctgcaaaggccct

SEQ ID NO: 127072 - DNA, 557 bp, Homo sapiens
  Payload ID: 4894
  Gene Symbol: DPH1
  Gene Name: diphthamide biosynthesis 1
  ENST ID: ENST00000263084
  CDS Start-End: 1-159
gggccctggacggtgaaccacggccaggaccgccgtccccacgccccgggccggcccgcgcgggggaaggtgcaggaggggtccgcgcgtcccccttcggccgtggcttgcgaggactgcagctgcagggacgagaaggtggcgccgctggctccttgacgcgctcccgggcctcaggtatcagcccccgctctgggtgcgccccgccttttgccgttgtcatgggaacgccttggcgctccgaggcccgccctcggggcggtgctgacgttcggttccgccccgtgcattgtgcttccgctcggggaaagaccgcttccggtgcttccgtcgctccttgccgggcataatggccgcgcagcgacccctgcgggtcctgtgcctggcgggcttccggcagagcgagcggggcttccgtgagaagaccggggcgctgaggaaggcgctgcggggtcgcgccgagctcgtgtgcctcagcggcccgcacccggtccccgaccccccgggccccgagggcgccagatcagacttcgggtcctgccctccggaggagcagc

SEQ ID NO: 127073 - DNA, 3052 bp, Homo sapiens
  Payload ID: 4895
  Gene Symbol: DPH3
  Gene Name: diphthamide biosynthesis 3
  Uniprot ID: Q96FX2
  ENST ID: ENST00000383775
  CDS Start-End: 94-267
gatgccgagcccaggccggttccggcgaagttaaaccctcggagctggcctcggactgctggggcgttaccccttcggccacccccgctgaccatggcagtgtttcatgacgaggtggaaatcgaggacttccaatatgacgaggactcggagacgtatttctatccctgcccatgtggagataacttctccatcaccaaggatcagtttgtgtgtggagaaacagtcccagccccttcagccaacaaagaattagttaaatgctgaagaagccttcaggaatccaaatcctgaacatttggaatgagcccagatagaaatatcgaatgcaaagctactggcttcacagagacaaccatttatgatttgctgttctgtaagagtgtggattctttctatcaactgctgatatcatcttcaggaagcaagtccataacatgacatatctggattttgtgcttagaaccttaaattggaagcattcttaattatgcatctaaatttaaaagaagataatttcaaaacagtgctttctttcccttggtttcatcattttcatatcttaaaccaaattacttcggtatctgacaacagcatcatctacctcagtcattaggatttcttaataaaaaagagattgtatttttgacttggttattaagattattaaaattagcccttcctttgaaatatgacatcagctttgctgttctaaatttaaaattagttgcttcatcagtaccacacttccagtttctataccaagccagtctcctcagttttcccattagaatggacatgttctgttcagcgtgtcatttctgtaatgcttcatgcagagagtttggtcatagtattaaagagaaaatacagtgaggtcacaatgtctccagagctaaaagttagtgaacaagaaagaaagtccaaaatgaagtgatgaaagaatgaggacttttcttatattctgcatattccttggaagtcaggacaagatgaaaagaaaaacatccaaaagaagtgaaattggtgacagaatgagaggagcaaagcataccagtgtagtaagtggaatgtttgaatgactttgccaggtcagagcaagtaatatttctgtatctgagtttttgtttgtgttttgataaggctaatgaaattgcattccaggtaggggttaacgtcaaatttccatggctggtagctgtgcttttggcatatcacagtgttgtgtcactactacaaggtaaagcatctacagcggagaatgagcttgaaaatgagagacctattgtgaataaatatgcccatgagagcatatttaataagcctctataacatgcagccaaaccagacattcactcctgcagagaaatgttgccctggagaaaaagaaatatataaagataggctatcacccttcttttgctgcagtactaagcatagcaagaaattagaatcatttacattggaaatttgaaaattccctttatatacacaactttactgtgtataaataaaaaatatttattaatgcagtgatgtccgtcaggttgttttaggaatggcttctgcaattagaaaaatagcttgctagaatgtaaatgttctgttactggtaaatgtactgcacacattcattggacgttaaaacaagtgagtagccttttttacctgccagcagcatggctgtgtgcagccactaggctgagacaataaattaccaaaaattataatgtaccgagctgaaaatgctcagtacattatgtggcatattctggatgtgatgagaaatctcattgccatttgggacactgacatcccagaagtaatccacaactgctttgcaaaagcaaagtgactgctcagatgaacagagcagagtactcactcactatggtggcatcagctgcaaagcaaaatgaactgtcccatgatcatgttgatggttttctagatactgccaacatgttagctctttctgatgctgatgagtttcaaacacgaacagacacccttgatgtgggtttgctaagaacatagaagaacaggaagaaaagttgccaggttcacacatcccaggaaaaaagaagcataaaaagcattagcagtcagtgactgatgataatgctgcaataatgggaatggttttgtttctaaaccaaattatttctaaatcaaatcatttattgctttgtttctaaagcaattgagtcactaagtttgtgaactgtaggagaacacatcaagattgaatcctgtgttaagcagaaggtaaaaccagagccaggcgcagtggctcgtgcctgtaatcccagctactcaggaagctaaggcaggaggatcatgtgaggccaggagttcaagactagcctgggcaacatagaaagaccctgtctctaaaaaatcttcttttaattagcaaggtgtggggccttgagcaaattgcttgggcccaggagtttgaggctgtggtgagctgtgatcacaccactgcgttccagcctgtgtgacagggcaagacctcatgcctaaaaaataaagagaaagcagagtaaaactggactctgagatacgactaaagttctgtgtgatacgtgtgccttatttagctcaagacattcctggagcacctataaaaactgacttgtaatccaggctatgtctctttttagcttcgtaatctttggcaaggccattggattcttcagctgtacaattaggagactcgatcaggtgattgcctttctcagctgtcagttctctaatttcaggcttggtagcttgtaggaactgaaattgcaattaaaacctttataaactcaaactaaatcatgaattacagaaaaagtccattcttccaaaacttgatgttaccacacttacaagtttaaaatatgaagtcgactgtttaaaggattctgcatatattctagtgtgcacattcagaaacatttttcttggaaaaagtacccaacattttttataactgcacatattaatttattgccagaataaattgcattgcatgctaaataaagtcagataattcaaatcc

SEQ ID NO: 127074 - DNA, 3131 bp, Homo sapiens
  Payload ID: 4895
  Gene Symbol: DPH3
  Gene Name: diphthamide biosynthesis 3
  Uniprot ID: Q96FX2
  ENST ID: ENST00000488423
  CDS Start-End: 97-345
gatgatgccgagcccaggccggttccggcgaagttaaaccctcggagctggcctcggactgctggggcgttaccccttcggccacccccgctgaccatggcagtgtttcatgacgaggtggaaatcgaggacttccaatatgacgaggactcggagacgtatttctatccctgcccatgtggagataacttctccatcaccaaggaagatttggagaatggggaagacgtggcaacgtgtcctagctgctctctcattataaaagtgatttatgacaaagatcagtttgtgtgtggagaaacagtcccagccccttcagccaacaaagaattagttaaatgctgaagaagccttcaggaatccaaatcctgaacatttggaatgagcccagatagaaatatcgaatgcaaagctactggcttcacagagacaaccatttatgatttgctgttctgtaagagtgtggattctttctatcaactgctgatatcatcttcaggaagcaagtccataacatgacatatctggattttgtgcttagaaccttaaattggaagcattcttaattatgcatctaaatttaaaagaagataatttcaaaacagtgctttctttcccttggtttcatcattttcatatcttaaaccaaattacttcggtatctgacaacagcatcatctacctcagtcattaggatttcttaataaaaaagagattgtatttttgacttggttattaagattattaaaattagcccttcctttgaaatatgacatcagctttgctgttctaaatttaaaattagttgcttcatcagtaccacacttccagtttctataccaagccagtctcctcagttttcccattagaatggacatgttctgttcagcgtgtcatttctgtaatgcttcatgcagagagtttggtcatagtattaaagagaaaatacagtgaggtcacaatgtctccagagctaaaagttagtgaacaagaaagaaagtccaaaatgaagtgatgaaagaatgaggacttttcttatattctgcatattccttggaagtcaggacaagatgaaaagaaaaacatccaaaagaagtgaaattggtgacagaatgagaggagcaaagcataccagtgtagtaagtggaatgtttgaatgactttgccaggtcagagcaagtaatatttctgtatctgagtttttgtttgtgttttgataaggctaatgaaattgcattccaggtaggggttaacgtcaaatttccatggctggtagctgtgcttttggcatatcacagtgttgtgtcactactacaaggtaaagcatctacagcggagaatgagcttgaaaatgagagacctattgtgaataaatatgcccatgagagcatatttaataagcctctataacatgcagccaaaccagacattcactcctgcagagaaatgttgccctggagaaaaagaaatatataaagataggctatcacccttcttttgctgcagtactaagcatagcaagaaattagaatcatttacattggaaatttgaaaattccctttatatacacaactttactgtgtataaataaaaaatatttattaatgcagtgatgtccgtcaggttgttttaggaatggcttctgcaattagaaaaatagcttgctagaatgtaaatgttctgttactggtaaatgtactgcacacattcattggacgttaaaacaagtgagtagccttttttacctgccagcagcatggctgtgtgcagccactaggctgagacaataaattaccaaaaattataatgtaccgagctgaaaatgctcagtacattatgtggcatattctggatgtgatgagaaatctcattgccatttgggacactgacatcccagaagtaatccacaactgctttgcaaaagcaaagtgactgctcagatgaacagagcagagtactcactcactatggtggcatcagctgcaaagcaaaatgaactgtcccatgatcatgttgatggttttctagatactgccaacatgttagctctttctgatgctgatgagtttcaaacacgaacagacacccttgatgtgggtttgctaagaacatagaagaacaggaagaaaagttgccaggttcacacatcccaggaaaaaagaagcataaaaagcattagcagtcagtgactgatgataatgctgcaataatgggaatggttttgtttctaaaccaaattatttctaaatcaaatcatttattgctttgtttctaaagcaattgagtcactaagtttgtgaactgtaggagaacacatcaagattgaatcctgtgttaagcagaaggtaaaaccagagccaggcgcagtggctcgtgcctgtaatcccagctactcaggaagctaaggcaggaggatcatgtgaggccaggagttcaagactagcctgggcaacatagaaagaccctgtctctaaaaaatcttcttttaattagcaaggtgtggggccttgagcaaattgcttgggcccaggagtttgaggctgtggtgagctgtgatcacaccactgcgttccagcctgtgtgacagggcaagacctcatgcctaaaaaataaagagaaagcagagtaaaactggactctgagatacgactaaagttctgtgtgatacgtgtgccttatttagctcaagacattcctggagcacctataaaaactgacttgtaatccaggctatgtctctttttagcttcgtaatctttggcaaggccattggattcttcagctgtacaattaggagactcgatcaggtgattgcctttctcagctgtcagttctctaatttcaggcttggtagcttgtaggaactgaaattgcaattaaaacctttataaactcaaactaaatcatgaattacagaaaaagtccattcttccaaaacttgatgttaccacacttacaagtttaaaatatgaagtcgactgtttaaaggattctgcatatattctagtgtgcacattcagaaacatttttcttggaaaaagtacccaacattttttataactgcacatattaatttattgccagaataaattgcattgcatgctaaataaagtcagataattcaaatcca

SEQ ID NO: 127075 - DNA, 1143 bp, Homo sapiens
  Payload ID: 4896
  Gene Symbol: DPH5
  Gene Name: diphthamide biosynthesis 5
  Uniprot ID: Q9H2P9
  ENST ID: ENST00000342173
  CDS Start-End: 105-959
cgcttttgcagttgcttctgcggaaaggtggtagttaagaatttgtaaaggccagagaactacctacgattctctcagcggtctctcttctcctcaagtttgaaatgctttatctcatcgggttgggcctgggagatgccaaggacatcacagtcaagggcctggaagttgttagacgctgcagtcgagtgtatctggaagcctacacctcagtcctaactgtagggaaggaagccttggaagagttttatggaagaaaattggttgttgctgatagagaagaagtggaacaagaagcagataatattttaaaggatgctgatatcagtgatgttgcattccttgtggttggtgatccatttggggccacaacacacagtgatcttgttctaagagcaacaaagctgggaattccttatagagttattcacaatgcctccataatgaatgctgtaggctgctgtggtttacagttatataagtttggagagacagtttctattgttttttggacagacacttggagaccagaaagcttctttgacaaagtgaagaagaacagacaaaatggcatgcacacattatgtttactagacatcaaagtaaaggagcagtctttggaaaatctaatcaagggaaggaagatctatgaacctccacggtatatgagtgtaaaccaagcagcccagcagcttctggagattgttcaaaatcaaagaatacgaggagaagaaccagttaccgaggagacactttgtgttggcttagccagggttggagccgacgaccagaaaattgcagcaggcactttaaggcaaatgtgcactgtggacttgggagaaccattgcattccttgatcatcacaggaggcagcatacatccaatggagatggagatgctaagtctgttttccataccagaaaatagctcagaatctcaaagcatcaatggactttgaacatagatatttaccattgtctgatgtaaatttcagccatatatggattgatatggtttggatgtatccccacccaagtctcatcttgaattttaatcctcataattcccaggtgttgtggtaggtaattgaatcatgggggcagtttccctcatgctattctcatgatagtgagctttcatga

SEQ ID NO: 127076 - DNA, 1316 bp, Homo sapiens
  Payload ID: 4896
  Gene Symbol: DPH5
  Gene Name: diphthamide biosynthesis 5
  Uniprot ID: Q9H2P9
  ENST ID: ENST00000370109
  CDS Start-End: 114-971
cggagccggcgcttttgcagttgcttctgcggaaaggtggtagttaagaatttgtaaaggccagagaactacctacgattctctcagcggtctctcttctcctcaagtttgaaatgctttatctcatcgggttgggcctgggagatgccaaggacatcacagtcaagggcctggaagttgttagacgctgcagtcgagtgtatctggaagcctacacctcagtcctaactgtagggaaggaagccttggaagagttttatggaagaaaattggttgttgctgatagagaagaagtggaacaagaagcagataatattttaaaggatgctgatatcagtgatgttgcattccttgtggttggtgatccatttggggccacaacacacagtgatcttgttctaagagcaacaaagctgggaattccttatagagttattcacaatgcctccataatgaatgctgtaggctgctgtggtttacagttatataagtttggagagacagtttctattgttttttggacagacacttggagaccagaaagcttctttgacaaagtgaagaagaacagacaaaatggcatgcacacattatgtttactagacatcaaagtaaaggagcagtctttggaaaatctaatcaagggaaggaagatctatgaacctccacggtatatgagtgtaaaccaagcagcccagcagcttctggagattgttcaaaatcaaagaatacgaggagaagaaccagcagttaccgaggagacactttgtgttggcttagccagggttggagccgacgaccagaaaattgcagcaggcactttaaggcaaatgtgcactgtggacttgggagaaccattgcattccttgatcatcacaggaggcagcatacatccaatggagatggagatgctaagtctgttttccataccagaaaatagctcagaatctcaaagcatcaatggactttgaacatagatatttaccattgtctgatgtaaatttcagccatatatggattgatatggtttggatgtatccccacccaagtctcatcttgaattttaatcctcataattcccaggtgttgtggtaggtaattgaatcatgggggcagtttccctcatgctattctcatgatagtgagctttcatgagatctgatggttttataagtgcctggcatttcccctactggctctcattctcactcttgccgccctgtgaagaggtgccttccaccgtgattgttaagtttcctgaggccttcccagccatgtggaactgtgagtcgaaaattaaacctcttttataatta

SEQ ID NO: 127077 - DNA, 609 bp, Homo sapiens
  Payload ID: 4896
  Gene Symbol: DPH5
  Gene Name: diphthamide biosynthesis 5
  ENST ID: ENST00000427040
  CDS Start-End: 125-265
gacatcaaagtaaaggagcagtctttggaaaatctaatcaacagttaccgaggagacactttgtgttggcttagccagggttggagccgacgaccagaaaattgcagcaggcactttaaggcaaatgtgcactgtggacttgggagaaccattgcattccttgatcatcacaggaggcagcatacatccaatggagatggagatgctaagtctgttttccataccagaaaatagctcagaatctcaaagcatcaatggactttgaacatagatatttaccattgtctgatgtaaatttcagccatatatggattgatatggtttggatgtatccccacccaagtctcatcttgaattttaatcctcataattcccaggtgttgtggtaggtaattgaatcatgggggcagtttccctcatgctattctcatgatagtgagctttcatgagatctgatggttttataagtgcctggcatttcccctactggctctcattctcactcttgccgccctgtgaagaggtgccttccaccgtgattgttaagtttcctgaggccttcccagccatgtggaactgtgagtcgaaaattaaacctcttttataatt

SEQ ID NO: 127078 - DNA, 1034 bp, Homo sapiens
  Payload ID: 4896
  Gene Symbol: DPH5
  Gene Name: diphthamide biosynthesis 5
  Uniprot ID: Q9H2P9
  ENST ID: ENST00000488176
  CDS Start-End: 127-984
ccggcgcttttgcagttgcttctgcggaaaggtggtagttaagaatttgtaaaggccagagaactacctacgattctctcagcgggtaattggctgctcctagtctctcttctcctcaagtttgaaatgctttatctcatcgggttgggcctgggagatgccaaggacatcacagtcaagggcctggaagttgttagacgctgcagtcgagtgtatctggaagcctacacctcagtcctaactgtagggaaggaagccttggaagagttttatggaagaaaattggttgttgctgatagagaagaagtggaacaagaagcagataatattttaaaggatgctgatatcagtgatgttgcattccttgtggttggtgatccatttggggccacaacacacagtgatcttgttctaagagcaacaaagctgggaattccttatagagttattcacaatgcctccataatgaatgctgtaggctgctgtggtttacagttatataagtttggagagacagtttctattgttttttggacagacacttggagaccagaaagcttctttgacaaagtgaagaagaacagacaaaatggcatgcacacattatgtttactagacatcaaagtaaaggagcagtctttggaaaatctaatcaagggaaggaagatctatgaacctccacggtatatgagtgtaaaccaagcagcccagcagcttctggagattgttcaaaatcaaagaatacgaggagaagaaccagcagttaccgaggagacactttgtgttggcttagccagggttggagccgacgaccagaaaattgcagcaggcactttaaggcaaatgtgcactgtggacttgggagaaccattgcattccttgatcatcacaggaggcagcatacatccaatggagatggagatgctaagtctgttttccataccagaaaatagctcagaatctcaaagcatcaatggactttgaacatagatatttaccattgtctgatgtaaatttcagccatatatggattg

SEQ ID NO: 127079 - DNA, 1018 bp, Homo sapiens
  Payload ID: 4896
  Gene Symbol: DPH5
  Gene Name: diphthamide biosynthesis 5
  ENST ID: ENST00000617698
  CDS Start-End: 117-848
gcacggagccggcgcttttgcagttgcttctgcggaaaggtggtagttaagaatttgtaaaggccagagaactacctacgattctctcagcggtctctcttctcctcaagtttgaaatgctttatctcatcgggttgggcctgggagatgccaaggacatcacagtcaagggcctggaagttgttagacgctgcagtcgagtgtatctggaagcctacacctcagtcctaactgtagggaaggaagccttggaagagttttatggaagaaaattggttgttgctgatagagaagaagtggaacaagaagcagataatattttaaaggatgctgatatcagtgatgttgcattccttgtggttggtgatcatttggacacttggagaccagaaagcttctttgacaaagtgaagaagaacagacaaaatggcatgcacacattatgtttactagacatcaaagtaaaggagcagtctttggaaaatctaatcaagggaaggaagatctatgaacctccacggtatatgagtgtaaaccaagcagcccagcagcttctggagattgttcaaaatcaaagaatacgaggagaagaaccagcagttaccgaggagacactttgtgttggcttagccagggttggagccgacgaccagaaaattgcagcaggcactttaaggcaaatgtgcactgtggacttgggagaaccattgcattccttgatcatcacaggaggcagcatacatccaatggagatggagatgctaagtctgttttccataccagaaaatagctcagaatctcaaagcatcaatggatttgaacatagatattaccattgtctgatgtaaatttcagccatatatggattgatatggtttggatgtatccccacccaagtctcatcttgaattttaatcctcataattcccaggtgttgtggtaggtaattgaatcatgggggcagtttccctcatgctattctcatgatagtgagctttcatgagatctgatggtttta

SEQ ID NO: 127080 - DNA, 1847 bp, Homo sapiens
  Payload ID: 4897
  Gene Symbol: DPH7
  Gene Name: diphthamide biosynthesis 7
  Uniprot ID: Q9BTV6
  ENST ID: ENST00000277540
  CDS Start-End: 159-1517
ccccggaaggagtcgcgagagaggcggcccgcgctgacggtgtccctggggctctgcgctcgtccggccggccccggcctcgccgccccgcgcagtacccagcccggccccgccgacccgcctctactgccggctccgcgcccttccccgagggctggatgatgggctgtttcgccctgcaaacggtggacaccgagctgaccgcggactcggtggagtggtgcccgctgcaaggctgcaggcacctgctggcgtgcgggacctaccagctgcggcggccggaggaccggcctgccggcccccagaacaagggtggaatggaagttaaggagcctcaggtccgtttaggccgtctcttcctgtacagtttcaatgacaacaactctattcaccctctggtcgaggtccaaagaaaagatacttctgcaatcctggacatgaaatggtgtcacatcccggtggctggacatgccctcttgggcttggcagatgccagtggatccatacaactgctccgcctggtggaatctgagaagagccacgtgctggagccattgtccagccttgccctggaggagcagtgtctggctttgtccctagattggtccactgggaaaactggaagggccggggaccagcccttgaagatcatcagcagtgactccacagggcagctccacctcctgatggtgaatgagacgaggcccaggctgcagaaagtggcctcatggcaggcacatcaattcgaggcctggattgctgctttcaattactggcatccagaaattgtgtattcagggggcgacgatggccttctgaggggctgggacaccagggtacccggcaaatttctcttcaccagcaaaagacacaccatgggtgtgtgcagcatccagagcagccctcatcgggagcacatcctggccacgggaagctatgatgaacacatcctactgtgggacacacgaaacatgaagcagccgttggcagatacgcctgtgcagggtggggtatggagaatcaagtggcaccctttccaccaccacctgctcctggccgcctgcatgcacagtggctttaagatcctcaactgccaaaaggcaatggaggagaggcaggaggcgacggtcctgacatctcacacattgcccgactcgctggtgtatggagccgactggtcctggctgctcttccgttctctgcagcgggccccctcgtggtcctttcctagcaacctaggaaccaagacggcagacctgaagggtgcaagcgagttgccaacaccctgtcatgaatgcagagaggataacgatggggagggccatgccagaccccagagtggaatgaagccactcacagagggcatgaggaagaatggcacctggctgcaggctacagcagccaccacacgtgactgtggcgtgaacccagaagaagcagactcagccttcagcctcctggccacctgctccttctatgaccatgcgctccacctctgggagtgggaggggaactgagcttgaaatcatgaagccccttcccacaaggaaaccaggagggagactgcgagtgagtgcccgggaccacctcatcagagatgcttactgcagccctgcaggtgcctgtgcactgatggaatccacagtgtagtcagaaaagctgttgacttctcttaaatcagcttccctgctgggcccctgaaagtggactgggtgattctgtctggcagagagtggggaaaagacgcggtttccagcttgcagatttgttaagtttctcaggcagattttgactttcagcctttcatacttgtttaagcaactatttgtattaaatgaagttttttg

SEQ ID NO: 127081 - DNA, 1014 bp, Homo sapiens
  Payload ID: 4897
  Gene Symbol: DPH7
  Gene Name: diphthamide biosynthesis 7
  ENST ID: ENST00000615714
  CDS Start-End: 1-684
atgggacaggtctctgggagacgttctgtgccccccaggggccttgtggaacaggtgagcctggctttccttatatgcctcctgtggttggtcggtttcagctatgatgaacacatcctactgtgggacacacgaaacatgaagcagccgttggcagatacgcctgtgcagggtggggtatggagaatcaagtggcaccctttccaccaccacctgctcctggccgcctgcatgcacagtggctttaagatcctcaactgccaaaaggcaatggaggagaggcaggaggcgacggtcctgacatctcacacattgcccgactcgctggtgtatggagccgactggtcctggctgctcttccgttctctgcagcgggccccctcgtggtcctttcctagcaacctaggaaccaagacggcagacctgaagggtgcaagcgagttgccaacaccctgtcatgaatgcagagaggataacgatggggagggccatgccagaccccagagtggaatgaagccactcacagagggcatgaggaagaatggcacctggctgcaggctacagcagccaccacacgtgactgtggcgtgaacccagaagaagcagactcagccttcagcctcctggccacctgctccttctatgaccatgcgctccacctctgggagtgggaggggaactgagcttgaaatcatgaagccccttcccacaaggaaaccaggagggagactgcgagtgagtgcccgggaccacctcatcagagatgcttactgcagccctgcaggtgcctgtgcactgatggaatccacagtgtagtcagaaaagctgttgacttctcttaaatcagcttccctgctgggcccctgaaagtggactgggtgattctgtctggcagagagtggggaaaagacgcggtttccagcttgcagatttgttaagtttctcaggcagattttgactttcagcctttcatacttgtttaagcaactatttgtattaaatgaagttttttg

SEQ ID NO: 127082 - DNA, 2099 bp, Homo sapiens
  Payload ID: 4898
  Gene Symbol: DPH6
  Gene Name: diphthamine biosynthesis 6
  Uniprot ID: Q7L8W6
  ENST ID: ENST00000256538
  CDS Start-End: 28-831
gccgcacgcacgcgcactgcgcccagcatgagggtcgcggctctgatcagtggtgggaaggacagctgctataatatgatgcagtgcattgctgctgggcatcagatcgttgctttagcaaatctaagaccagctgaaaaccaagtggggtctgatgaactggatagctacatgtatcagacagtggggcaccatgccattgacttgtatgcagaagcaatggctcttcccctctatcgccgaaccataagaggaaggagcttggatacaagacaagtgtacaccaaatgtgaaggtgatgaggttgaagatctctatgagcttttgaaacttgttaaggaaaaagaagaagtagaggggatatcagtaggtgctatactttctgactatcagcgtattcgagtggaaaatgtgtgtaaaaggcttaatctccagcctttagcttatctttggcagagaaaccaggaagatttgctcagagagatgatatcatctaacattcaagcaatgatcatcaaagtagcagctttgggtttagatcctgataagcatcttgggaaaaccctggatcaaatggagccttatctcatagagctttctaagaagtatggagtacatgtttgtggagaaggtggagagtatgaaactttcactttggattgccctctatttaagaagaaaataattgtggattcatcagaagtagtcatacattcagctgatgcatttgcacctgtggcttatctacgctttttagaattgcacttggaggacaaggtgtcctcagtgcctgacaactacagaacatctaattatatatataatttttgaaaagtgttttggaacattgttcattaaaccaccatttctatacaaaaaaattgcatagtattttctcagttactatgactagtttatttttttctcatgactcttatttttttagagaaacatactttcactagaagaggttagtggaaccatttattaattgggaaaatgtcgacggcatgttcattaatagtgccaactttcttggaattcactctttctctttcgttaacacatcttccctatgaccttttttttcttttatttcatctataaaccccatttctgtagcatttctttttttatcacactagtttcttttcctccttctctctttcttgctccaatccctaccaataatgtcatgatgcagaggcatttgaaaatgaagatgaaaagatggtcactttatttagccagtcaagcttattctactgggtgtcgccaaagcgatttatcatttttattttaaatatattcatggttgaagtgtttcaacgttattggacaattaggaagaatgtccttaactcttacaagttattttataactgatttttaaaatgctgtttttcagtattaactatgttgaccttagaaaacttttacaaaaaatagactttatgttttagaacagttttaggttcacagcaaaaatggagcagaaaatgcagagatttcccatataccctctacctccacacattcacagcctcccctaccgtcaatgtcttataatagagtggtacatttgttacaactgatgaacctacattgacacattattatcacccaaagtccatagtttacgtgagggttcactcttggtgttgtacataatatgggttttgacaaatgtgtaatgacatttgtcaaccgttatagtattatacagaataatttcactgccttaaaaaatcctctgtgttttacttattcatccctccctctcctttaacccttagcaactgatcttttcactgtgtacatagttttgcttttaccagaatgtaatgtagttgaaatcatacagtatatagcttttcatgcagtatatagcttttcagattggcttctttcatgtattaatatgcatttaggtttctctgtatcttgtcatgtatatgtagctcattttttttttagtgtagaataaaattttattgtctggttctaccacatttcatttgtccatgcacctattgaagaacatctcagttgcttccatgttttggcgattatgaataaagcgactataaacatccatg

SEQ ID NO: 127083 - DNA, 3648 bp, Homo sapiens
  Payload ID: 4898
  Gene Symbol: DPH6
  Gene Name: diphthamine biosynthesis 6
  Uniprot ID: Q7L8W6
  ENST ID: ENST00000440392
  CDS Start-End: 52-549
acctcctggctcccgcccgcgctcgccgcacgcacgcgcactgcgcccagcatgagggtcgcggctctgatcagtggtgggaaggacagctgctataatatgatgcagtgcattgctgctgggcatcagatcgttgctttagcaaatctaagaccagctgaaaaccaagtggggtctgatgaactggatagctacatgtatcagacagtggggcaccatgccattgacttgtatgcagaagcaatggctcttcccctctatcgccgaaccataagaggaaggagcttggatacaagacaagtgtacaccaaatgtgaaggtgatgaggttgaagatctctatgagcttttgaaacttgttaagggcatcactagaatgaccttgcttgctgaatatgatgctctgaatctccaagattttcacatgcatttgaaagtgggcagccaggcgattgtttacaggactccaaatgaactgtgcactcacagcaagtttgataaacacacatttcctccttttatcagtgagattgcaaaatgtgaagtatgagtttccagttttactgattcccctcaacccttttcctgtttaaaaacttagacatactaattggatgctgatctgtccctgtttttcattctgcttgctggtagttgacggcttagtttagtacttacctaggcaagatttggcaaaccttcaaaaatgaactttccatgtattcaacttaaaggagattcatcccaaggaatgtaatgtgaacactaattaacattaatgactgctaatcactttgctttttatactcctttaggagcactgctattatccaatgtagttaagtaaaatgcttgtatatgaatcaacaatgttgcatccttttagcagctattgctcacaatcaagctttgcataaattaaagttgactaaaattgattttaatatgctgctcttcttcaatagtaaactaaaatatctagttaaatatcctgcatattaaaaatacattgcctgattttttttgtagtcatcctgtggtagatgaaaagcaatattgcaaatacattttctcacagttcatgacactttctcttagatttcttcaaaattgaacacaactcttcatagtcctatcagcactttgattctgttgtaagcattaattttgttagatcaatgaaaagcaatcagcctatgtttaatttttctgaatttgttcatttacttcctagaggatcttacagattctttagatgatatagtctatttatataaagttggttcataggattgtacattcaacattcattaaaaaaggttgtttattatgtttagtgaattacaggaccattataaaagctttctgtttatttacatgcattcaatgtacctgtgactagaactgccttgccttaggaggaaactaagcaaaacccataaattaataatttaagggagcaatactcaagtagcatttcagttaaaaagtaaagcctcagagtcagtactagccactttagcattgctttactttttgacttttattggctgaaaataacttgttaaactggagcttttgtaataaaatgaaatctacataccatctaaagccccttcccctccttttgatttatgagtaggttgacatattactggagaatttgtaacactttcacagttctgcactttgatttcagagaaggtgctaatctctctggaattttgagagtgacaaaatgagttgtatactgtttttccagggaatttgggttcctttattagaggccttagttttattatggtacctgtattaatgtggatttatccaatatgtgatatggtggtatgattagatatacattaatggaggatttttttttcattgtacatattctacttggtttgatcatattataattctcacagctaatgtccatgtttctacagaggttcagcaattcaggatattattttcaaattaccaaaatgagataatttaactcccttttacttttgcattatttttagtggaaaaaaattaaatggtagtattataagaagctttatgctgtgtatgctagtcttattgtatatatgtactgaaagtacctttgacactgtacttaattggatttaatttcaaagaattgtaacaggaattatgtgagagaatagaaaatatatggaacttaattaagtgctgtccatatgtaaaggtaagattcatgactattgtttgatgtaacttatttattttacatcctgatactgttgtataatagcacaaaatgcatgtctatgaggaaaaacttgctttttctattttactttgagtttttatgtgtaataaaattatgcttaaaataggcgaggatttcagttttgattcttcttcttttgttttttttttgtttttttttgtagcatgtttactttcacgtgagagtgattgatctgtagctgtcattttatccaagaagggacaaatggaattggtcttttagacaaaagtatgcaaacagactgcattctttctgttgatagaattatggaagaattgcatgaggtgccacattcagttgcctattgattgtaaagaggattctgcagtggggtgctgtttccaatggataaggaggtgctatgattacttacctttctcatgaaagcactacaaagggaaatgcaaaatgtgtgcagtgcagtcttctctatttgacagttgtttttgttaagttttttcccccattgaagtccagcctgttttagaaaaacatacattttagttctttcccctttatatcaggcttagtagatttccatgcatttgaccctttagagaaattacatgttatagacagttttctttttctcagcctctattgtaaagcttcaaagctgatgcaacagtgccctctatagtcttttagtgaacattagacagatgtagatgatttcaaatgttcaggtaagaaacaggacatttaaatttaatttttgttcaaacaagagacccctttttcctaagtagacattcttgtttttcactagtggctttactttaaacaaagagaacaaaagaccattctgagttttcatttagaattattggctgcttcttctttttatcccttggtaaatctcaagttttatcagacgttcatcagagtaatttgagaaagatggaatcttacaggctgtactgtctgttcatgaaatatctttttgaagttgaactctgataggagtattttttaaaaataatttagttcctttgtacttgttttttctatttaattagaatctgagtgggctgcctaaaatttgacttctatttattcctgaattgtgaaacccagtcgttatacatgacattatttaaattcaaaccaagggagttacacaatgactaaagtgtttgtcattcattagcattgatttaaattttagatttcctttttctctttttggttacctttttgattgtatatattgatagctaagtttttcattgtaaaatgcaactagatgtgaagttatggataataaaagcaggaatcatatttagatatgattagaagagaaaaatgttatggattaagtttattttgcttctgaaagtgttttaataaaaagatcacgggccc

SEQ ID NO: 127084 - DNA, 581 bp, Homo sapiens
  Payload ID: 4898
  Gene Symbol: DPH6
  Gene Name: diphthamine biosynthesis 6
  ENST ID: ENST00000561411
  CDS Start-End: 74-581
gcacgcacgcgcactgcgcccagcatgagggtcgcggctctgatcagtggggtctgatgaactggatagctacatgtatcagacagtggggcaccatgccattgacttgtatgcagaagcaatggctcttcccctctatcgccgaaccataagaggaaggagcttggatacaagacaagtgtacaccaaatgtgaaggtgatgaggttgaagatctctatgagcttttgaaacttgttaaggaaaaagaagaagtagaggggatatcagtaggtgctatactttctgactatcagcgtattcgagtggaaaatgtgtgtaaaaggcttaatctccagcctttagcttatctttggcagagaaaccaggaagatttgctcagagagatgatatcatctaacattcaagcaatgatcatcaaagtagcagctttgggtttagatcctgataagcatcttgggaaaaccctggatcaaatggagccttatctcatagagctttctaagaagtatggagtacatgtttgtggagaaggtggagagtatgaaactttcactttggattgccctctatttaagaaga

SEQ ID NO: 127085 - DNA, 465 bp, Homo sapiens
  Payload ID: 4898
  Gene Symbol: DPH6
  Gene Name: diphthamine biosynthesis 6
  ENST ID: ENST00000558266
  CDS Start-End: 1-465
cgagtggaaaatgtgtgtaaaaggcttaatctccagcctttagcttatctttggcagagaaaccaggaagatttgctcagagagatgatatcatctaacattcaagcaatgatcatcaaagtagcagctttgggtttagatcctgataagcatcttgggaaaaccctggatcaaatggagccttatctcatagagctttctaagaagtatggagtacatgtttgtggagaaggtggagagtatgaaactttcactttggattgccctctatttaagaagaaaataattgtggattcatcagaagtagtcatacattcagctgatgcatttgcacctgtggcttatctacgctttttagaattgcacttggaggacaagtgcctgacaactacagaacatctaattatatatataatttttgaaaagtgttttggaacattgttcattaaaccaccatttctatac

SEQ ID NO: 127086 - DNA, 3424 bp, Homo sapiens
  Payload ID: 4899
  Gene Symbol: DIRAS1
  Gene Name: DIRAS family, GTP-binding RAS-like 1
  Uniprot ID: O95057
  ENST ID: ENST00000323469
  CDS Start-End: 185-781
ggggacggcgcgggcgcgactgcggcggctcgggcgggcggggggcggcggcgccagcggacaccggagcgggcaggagcagcggccgcggcgccgcagggaccagcgggcccaggctcggtctggggttcttgcagctggcaccagccctcccggccccggccgcccacccgccgcggggaagatgccggaacagagtaacgattaccgcgtggtggtgttcggggcgggcggcgtgggcaagagctcgctggtgctgcgcttcgtgaagggcacgttccgcgacacctacatccccaccatcgaggacacctaccggcaggtgatcagctgcgacaagagcgtgtgcacgctgcagatcacagacaccaccggcagccaccagttcccggccatgcagcgcctgtccatctccaagggccacgccttcatcctggtgttctccgtcaccagcaagcagtcgctggaggagctggggcccatctacaagctcatcgtgcagatcaagggcagcgtggaggacatccccgtgatgctcgtgggcaacaagtgcgatgagacgcagcgggaggtggacacgcgcgaggcgcaggcggtggcccaggagtggaagtgcgctttcatggagacctcggccaagatgaactacaacgtcaaggagctcttccaggagctgctgacgctggagacgcgccggaacatgagcctcaacatcgacggcaagcgctccgggaagcagaagaggacagaccgcgtcaagggcaaatgcaccctcatgtgagcccggaacgcccgcctgcccgccgcccacccccactgacccccgctgcctcccccaacaccgacaccctcctcggcctcctcctcttctctcatccttcctccgacacctcggctggggaaaccgaggccaccgcccccccctccgctgcccctgcccaccccgaggcagggctggggcttttcttcctcccctgctctctctccaccctcctgttctgtctgtaccctccaaaaccaagagccggaggtggcccccttgtcctgcagatgggaaaacaggatggggagctggcaagaggagctgcttgttcccaccaggaccagaggaggctgcgtttccccgtttccatctctttccctggggtgtccccagccagacctgcgcgtcctgtccctcacatttgatcactgtgaccttctgggggaggggggagttgaaaatgcacatcggcctcagatatttttttcttttttctcctatttggtgttaacatacacccaagcccacccggcccgtcgtgacctctgatctgtgcccactcctccggttccagacgcacctctctcctctgtcttcacagtggggtgtggggcccgtgggatgggcctcaggccaccaggcaataaccacagggcctgcagcagtgcccctgccagccccgaatcccacccccgggaccagccacatccacagcacaactgccccgctggagaggcaccatgggcgtggaggggcttcccggacaccgcccacccgggacccgcctcttccaccaagacagagacgttagcaacgcatggcgggtggggacctggggtgctcaggagggggtacccggggccccggccagagatacatcaattacacccccgtggggggacagccgatgggagccagcaccagcaggatccgagggcgccccggacagaggtctgccccacccacttcctccccaccacctgtgccccagagagcagggcctgcccgggaaggtggcgtcctggagtcgagtgtacctgcagccatgaggttctgggtgttttttgagagagtctgagtgacaccacactcgtgtgaccccacagggttgtgtccaacatacacggaagtggctatggaatggtgtatttgtgcaacctggggtgcgcggatgggtgacttgtatctaagtgcatctgcgtgtatacctgtgtgtgtctgtctgggatgatatgtttttgtggcagtctgtgtgtgtaatagtggtgtagggtatacagagaggtgggtagttgtagatacctgtgtgtggttgtcagcaagactggatatgtgtgaggtgtctgtgtgaatctttgtgcctgtatgagcatgactatattttggggagtgggtgatatggtttatctgagagcatttatctgtaaatatgtttgtcctgattgagggacacgatctgtgttccactctatagcaacatgactctagcaatgtgactttcggttccaaatctgtatcagtcagctactgctgtgtaacaaatgaccacaaatgtagcaaccagaaacaacacatgcttattatctcatagattctgtgggtcaagagcctgggtgcaggttggctgggtcctctacttgggatctcaggaggctgcaatcaaagcattcgccaggcagaggtctcatctgaaggcctgatcggggaaggatttgcttcttagaagctcatgtggttgttgcagcattcagttccttgctgttgcaagactgaaggcctcagttcctcgctggctgttggctggaagctgccctttgttctgtaccatgtgggtctctccacagcggggctcggagcatggcagctaagttagtgagggaaggtgagatggaggttttggtcttattgggtgtgaggaagcaacgtgtgtgtgtgcgcacgcccttttgtgcagtgagagagagagagagattgcacacatgtgtctctgtagtcatgtggccaggtgggactatgtaggtaacagattgctcgtgtctgatttggtacaagcatgtttgttttcctctgtgttcgtgtgagtgtttactcaacaaatgtttattggacacactcagagagagggagtgtgcacacgtgcgtgtgtgttgctatccagcacgtggaccgggctcccagaagagctggcattgtgtctgagcagagctgggtccccccaaaacttgggctggcccagggcccaccagcagctgatgttgcctcctctcctgtcctggcagtagcttctgggttctgaaggtgccggagagagtgaggctgggcaggggtctgcggccctttctcagggacacaccctgatagcacaatctccttggggccctgcccacctccaggcctctcccacctcaggccctgcccgaccctggggagagagggcatctgcaataggaggggacccgagcctgtcctggctgctggcccatcctgcctgggcatccctggtgctggggactgtgccaggccatgcttgctgtgactccgcccctgccccctctccccccgcatgtgggtgcccccactcccccatcgtggggtctgtgtagccttcgctctagacatagtcttcctgcaataaaaaagtggatcctgcattccccacca

SEQ ID NO: 127087 - DNA, 546 bp, Homo sapiens
  Payload ID: 4899
  Gene Symbol: DIRAS1
  Gene Name: DIRAS family, GTP-binding RAS-like 1
  ENST ID: ENST00000588128
  CDS Start-End: 139-546
agcagcggccgcggcgccgcagggaccagcgggcccagattcccagcctcaggatcccatttatggcaggctcggtctggggttcttgcagctggcaccagccctcccggccccggccgcccacccgccgcggggaagatgccggaacagagtaacgattaccgcgtggtggtgttcggggcgggcggcgtgggcaagagctcgctggtgctgcgcttcgtgaagggcacgttccgcgacacctacatccccaccatcgaggacacctaccggcaggtgatcagctgcgacaagagcgtgtgcacgctgcagatcacagacaccaccggcagccaccagttcccggccatgcagcgcctgtccatctccaagggccacgccttcatcctggtgttctccgtcaccagcaagcagtcgctggaggagctggggcccatctacaagctcatcgtgcagatcaagggcagcgtggaggacatccccgtgatgctcgtgggcaacaagtgcgatgagacgcagcgggaggtggacacgcgcgaggcgcag

SEQ ID NO: 127088 - DNA, 774 bp, Homo sapiens
  Payload ID: 4899
  Gene Symbol: DIRAS1
  Gene Name: DIRAS family, GTP-binding RAS-like 1
  Uniprot ID: O95057
  ENST ID: ENST00000585334
  CDS Start-End: 100-696
ctttgacgtgtgaccctcctctctgcacaggctcggtctggggttcttgcagctggcaccagccctcccggccccggccgcccacccgccgcggggaagatgccggaacagagtaacgattaccgcgtggtggtgttcggggcgggcggcgtgggcaagagctcgctggtgctgcgcttcgtgaagggcacgttccgcgacacctacatccccaccatcgaggacacctaccggcaggtgatcagctgcgacaagagcgtgtgcacgctgcagatcacagacaccaccggcagccaccagttcccggccatgcagcgcctgtccatctccaagggccacgccttcatcctggtgttctccgtcaccagcaagcagtcgctggaggagctggggcccatctacaagctcatcgtgcagatcaagggcagcgtggaggacatccccgtgatgctcgtgggcaacaagtgcgatgagacgcagcgggaggtggacacgcgcgaggcgcaggcggtggcccaggagtggaagtgcgctttcatggagacctcggccaagatgaactacaacgtcaaggagctcttccaggagctgctgacgctggagacgcgccggaacatgagcctcaacatcgacggcaagcgctccgggaagcagaagaggacagaccgcgtcaagggcaaatgcaccctcatgtgagcccggaacgcccgcctgcccgccgcccacccccactgacccccgctgcctcccccaacaccgacaccctcctcggcc

SEQ ID NO: 127089 - DNA, 4385 bp, Homo sapiens
  Payload ID: 4900
  Gene Symbol: DIRAS2
  Gene Name: DIRAS family, GTP-binding RAS-like 2
  Uniprot ID: Q96HU8
  ENST ID: ENST00000375765
  CDS Start-End: 390-989
tttaagcaggagcagcagcctctgcagcagttggcacatctgagaaggcagagattgaagagagtaggaggagcgtgcagcggcggtgacagtgccaggccggagcggctcaggccagcgcaggtgcaggggctgcgagcgggtggagcgcgagggcgctgggcgcagggagcacggccggtgggcggtgcagggcgcacggcgggcgagcagctgacagcatcgtcacggcggcgggagggagtgcgctgcgcctgcctccgggaggagccgcatccacacaccctgcgctgccctgtcctgcgcgagtggagctctgaagaagctctgagcggagttgtgttcttccccaggtgcgtcctggctgagagttggagctctccagcaacatgcctgagcagagtaacgattaccgggtggccgtgtttggggctggcggtgttggcaagagctccctggtgttgaggtttgtgaaaggcacattccgggagagctacatcccgacggtggaagacacctaccggcaagtgatcagctgtgacaagagcatatgcacattgcagatcaccgacacgacggggagccaccagttcccggccatgcagcggctgtccatctccaaagggcacgccttcatcctggtgtactccattaccagccgacagtccttggaggagctcaagcccatctacgaacaaatctgcgagatcaaaggggacgtggagagcatccccatcatgctggtggggaacaagtgtgatgagagccccagccgcgaggtgcagagcagcgaggcggaggccttggcccgcacatggaagtgtgccttcatggagacctcagccaagctcaaccataacgtgaaggagcttttccaggagctgctcaacctggagaagcgcaggaccgtgagtctccagatcgacgggaaaaagagcaagcagcagaaaaggaaagagaagctcaaaggcaagtgcgtgatcatgtgaaggcccttcctgcgggaggagcagctgtgtgtccccggcacctcactcccccaaaatgacacccaccgtcgtcagggtagcatgtataatgcccacgtgttaaacattgcatttaatcgagatgcgtcctattgtccttaagagggcgtttcacaccaccaacagtaagccacccactctggagtcacagaatctgccaggcggttcaagtgaaaaccaacacactcagcatccctgggaactgagaggtgccagcaattgctgaaggtggcgatgaacacccgaaggtgggagggaggactggtacccacaaagcaacatgtaccgagaggactaaatgtcatctacgtgcatgtgagagcgtgttaacctagagttacctgcaccaaccccagacagaagccaatcacatctttgggggaggggaggggcaggaagaggtgagaagatcagatggtccaaagtggaccacacttggtccattttacacttttttaaaggggattaaaaaacacagcctctcccccaaagggtgtccgttcttaattcccacctggcctgttaggagccttgctaccctgaggggatgtgttcaccttacctagacctagttaggaagtatcattttaagctattagagtatttatcttcatgtgcagggataagtgcactaacagtgtgctgctctgtcggaagttcttcagtttttaagtgaggatatcgtgacagtattaaaacatcgcaataatgttcctgtgtgttatacatcgagggttttagaaatgtgattttcttcttttgacctgtgaggagtataacttctttcagccctcagattttaaatacaagcaaataaactcactatttttagacgtttttttcctccaaggtggttttcttctcttaaataactcgatctgtacccagctgggtagcagccagcaaaggccatcagacaaccagaagcacatccatttttgtagtgtcacaaacatgtatatgccacactttgcaccttaatgaaatactttgaaacagaagttattcactgtgtttttgatgatctatctgtattggaaatatgttcctggaaaatgcatttaaataatagtaaattctcttgcatgttccattatacgtgtcttctaagagctgttcaatacagtattcactctagaaacaattatctttttctcttaatgattttgtgtgcatctttaatctttcaagccaaattacagctatttcaggtttcctgtgttagcttggggataggatggtggctggagacaggcaggcttctctgccctgggaagagcccactcagcttaattgctctgccatcgtagagcctggttggacttggcttcctgaaaactcccactgatagtgcctgttagatctcctgtttgtttcagttggcagaacatttactggccccaactgtggcatcatcctctcagcagtcttcctgtcacccgcctggcaggcagaaggagctgcagtcccacgtgggcctgcctgggggggtgggggctgcatggctgttgggtggcagtgtcagcacagggagggcttaagttggggatgtttgaccaggccacctcctgcaactgctgtttctcctgtccctcctatgcagggcttgcagcagcagcagtgtggccatctccatcccccaaagcacacttgctctctcaatatgtcctagttttcttcagccttttctggttcagttcccttgtcctgatctcatcctctctggtctcccaataactcacccttgggatgtgtttagagcgtgggaggtgcctttgagaactgcttgactccatgatctcctagaacaaaaccgccctgactttacagggggaacactcatgctgagctgagaaagcagagaagtggcgtgggagccagctgggggtgaagagcatttgggccagtcccgtggcccccttcagattcctcaagcaggattgttctgttctaaaaagctgttgcacagcattcgcaatgagatctttagttggcggattttctggaacatttgtttttcaacttgtcccgacattttttttctgtttctattctgagagagagatgatcaagttttaatttgggtataggttaaatggaagaagaaacagaacttcatggccaaagtagacctatagattttgattgggttctttgttaacagtagaatgcgatctttgccactgactgtagtattaataaggttttaatgtgagatattcctgcaaaccatcccatttctactgattgtaagtcagaatttcttttatccctttcaaatcagtttctacatgtttaagtgttcagggcttcatcagcatgagaagtttgtaattactgaaagtctgatttcattcaggacacattttttccttcatattttttctgtgaatttataggctaggaaggctattgaagcctcaattatgggtcttcattttgagatcgttttctatgagctgaactgaggatatcaatggttatctcaaaatcgtcttttaggagatccccaattgactcagagtttgaggagttagtatcacagaattagatttttttaaagcatttgtacgtttccattcccaaatatgtagctgtggttcttgaaaacacatcctacattgcatatgggcatagcagtttttgacccaggcagaataagttaatatttaattaaatattgctttgaagatggcgctctgggcatgagcatggggctccatgacttcccttctatccccatgagcccctcctccatccagcgacaagccatgggcatgcatacaatgcagcaagaccaacacaagagcaatattgaattgttcattctatctaaaattacatgtatataaaatatataatttatcttcctgcatttttgaagtataaagtcataaattgtacatatctgtaagctagtatatttgtttcactgtttgtaatatttaagaaatgctcattctttgtagaacaaaaatgtattaaatattttaaaaattgctctgtgatacttaatttttttccccaaaatttgtaatgtgttgcttctacataagttctctggaaatatctacaactaataggacacatgtaaatccttgaagacacatcctggaattcataccccacaaggacagtgtgtatacaaagtatttgcagagcatgacttttatatgtgtgggatatcaatgtgtatatttatatttaaagtgtatttattgttacaagtctattctctattatattttatttactctgcggttataaaaatcacccttgcatacaagtttctagttgccagtgatgttctggaaataatgggagatattacaataaagctacagttatgacaccctg

SEQ ID NO: 127090 - DNA, 1973 bp, Homo sapiens
  Payload ID: 4901
  Gene Symbol: DIRAS3
  Gene Name: DIRAS family, GTP-binding RAS-like 3
  Uniprot ID: O95661
  ENST ID: ENST00000370981
  CDS Start-End: 638-1327
acacaatcgggcttcctagccgctggcggacccgatggggcgtcctgcgagggttcggcgagggttctgccaggatagtagcattgcgcccaaggagtgagaggcacccggggctactggagccagaccctcaacccgccctagtgggaggcgaagaacaacgaaagcctcgtattcccatttctctaatggctaatgacattaaagtatcatttgtggaaaagattatctgtcctgcattaaactgcttttggactttcgtctaaaatcagttggaccggtttttgttggcaaagttttgcctgaagcttattccaacagatgccaagcggacctcgcgccgctctgcgttgggccagcccctcacagctggtttcttaccacgtattgcgcaagcggaatctatgcctgttacccacactccctgcgcccccgcaccccgctcctgtgcgcaagtcggaatataaaaccgcggaggagtgagctcttggggtgtccagttggttgccgcggcagtctctccgagcagcgcatttgtcttctaggctgcttggttcgtgcctccgagaaaggggtctcctgctgccagctaagtgtgggagaacttgtgcacgtatctcccctccgaatcccaacgatgggtaacgccagctttggctccaaggaacagaagctgctgaagcggttgcggcttctgcccgccctgcttatcctccgcgccttcaagccccacaggaagatcagagattaccgcgtcgtggtagtcggcaccgctggtgtggggaaaagtacgctgctgcacaagtgggcgagcggcaacttccgtcatgagtacctgccgaccattgaaaatacctactgccagttgctgggctgcagccacggtgtgctttccctgcacatcaccgacagcaagagtggcgacggcaaccgcgctctgcagcgccacgttatagcccggggccacgccttcgtcctggtctactcagtcaccaagaaggaaaccctggaagagctgaaggccttctatgagctgatctgcaagatcaaaggtaacaacctgcataagttccccatcgtgctggtgggcaataaaagtgatgacacccaccgggaggtggccctgaatgatggtgccacctgtgcgatggagtggaattgcgccttcatggagatttcagccaagaccgatgtgaatgtgcaggagctgttccacatgctgctgaattacaagaaaaagcccaccaccggcctccaggagcccgagaagaaatcccagatgcccaacaccactgagaagctgcttgacaagtgcataatcatgtgagccctgggccttaagagccagctcttcctatcctgtagcgtgtagaaaacgtggactcatttcactatgttacatgtacatggttgattttgtgctgttgtttggactgtaacatccatgttgtcaatacgtataccttgtaagtggataacttttctttttcccaggccagagaattcaaattgttaaaacattggcatttgaagaggagaacaaaatgtagcatgatgtatttaaagtaaggcctttagtaatgaatgtaatgagagaaaatgttttgaaaagaacaaaacatcaaaatgaatagaaagaaaaattggaaggcgtccttttggtaacccgattattgtgtattacctttaaatatttcacatcctgtaagtgcttaatcatatcttttaattgtgtatttaagaaaagtgttttcacaacaaaagcttttgataaattgctgcgtgacatatactaaataaaaaaatgaatatgttgatcattaggggtgtgggagcagagaaaattgtgaaagtgactctcactaaagatgttagtagtttctcatgtcatttaaaaatgtttgagtattctgcatagcagtttgtaaaagtgtaacagcttattgacttaataaagcttttcctgcatgcaa

SEQ ID NO: 127091 - DNA, 1629 bp, Homo sapiens
  Payload ID: 4901
  Gene Symbol: DIRAS3
  Gene Name: DIRAS family, GTP-binding RAS-like 3
  Uniprot ID: O95661
  ENST ID: ENST00000395201
  CDS Start-End: 296-985
gctctgcgttgggccagcccctcacagctggtttcttaccacgtattgcgcaagcggaatctatgcctgttacccacactccctgcgcccccgcaccccgctcctgtgcgcaagtcggaatataaaaccgcggaggagtgagctcttggggtgtccagttggttgccgcggcagtctctccgagcagcgcatttgtcttctaggctgcttggttcgtgcctccgagaaaggggtctcctgctgccagctaagtgtgggagaacttgtgcacgtatctcccctccgaatcccaacgatgggtaacgccagctttggctccaaggaacagaagctgctgaagcggttgcggcttctgcccgccctgcttatcctccgcgccttcaagccccacaggaagatcagagattaccgcgtcgtggtagtcggcaccgctggtgtggggaaaagtacgctgctgcacaagtgggcgagcggcaacttccgtcatgagtacctgccgaccattgaaaatacctactgccagttgctgggctgcagccacggtgtgctttccctgcacatcaccgacagcaagagtggcgacggcaaccgcgctctgcagcgccacgttatagcccggggccacgccttcgtcctggtctactcagtcaccaagaaggaaaccctggaagagctgaaggccttctatgagctgatctgcaagatcaaaggtaacaacctgcataagttccccatcgtgctggtgggcaataaaagtgatgacacccaccgggaggtggccctgaatgatggtgccacctgtgcgatggagtggaattgcgccttcatggagatttcagccaagaccgatgtgaatgtgcaggagctgttccacatgctgctgaattacaagaaaaagcccaccaccggcctccaggagcccgagaagaaatcccagatgcccaacaccactgagaagctgcttgacaagtgcataatcatgtgagccctgggccttaagagccagctcttcctatcctgtagcgtgtagaaaacgtggactcatttcactatgttacatgtacatggttgattttgtgctgttgtttggactgtaacatccatgttgtcaatacgtataccttgtaagtggataacttttctttttcccaggccagagaattcaaattgttaaaacattggcatttgaagaggagaacaaaatgtagcatgatgtatttaaagtaaggcctttagtaatgaatgtaatgagagaaaatgttttgaaaagaacaaaacatcaaaatgaatagaaagaaaaattggaaggcgtccttttggtaacccgattattgtgtattacctttaaatatttcacatcctgtaagtgcttaatcatatcttttaattgtgtatttaagaaaagtgttttcacaacaaaagcttttgataaattgctgcgtgacatatactaaataaaaaaatgaatatgttgatcattaggggtgtgggagcagagaaaattgtgaaagtgactctcactaaagatgttagtagtttctcatgtcatttaaaaatgtttgagtattctgcatagcagtttgtaaaagtgtaacagcttattgacttaataaagcttttcctgcatgc

SEQ ID NO: 127092 - DNA, 10604 bp, Homo sapiens
  Payload ID: 4902
  Gene Symbol: DIS3
  Gene Name: DIS3 homolog, exosome endoribonuclease and 3'-5' exoribonuclease
  Uniprot ID: Q9Y2L1
  ENST ID: ENST00000377767
  CDS Start-End: 102-2978
ggaatggaaagggaagaacctccggggttaggcgtattctagattgacgccttttgctggaagagcgctgctggggttaggattctgcgcggcgaggcaagatgctcaagtccaagacgttcttaaaaaagacccgggcgggcggcgtgatgaagatcgtgcgcgagcactacctgcgagacgacatcggctgcggtgcgcccgggtgcgcagcgtgtggaggggcgcacgaggggccggccctggagccgcagccccaggacccggcgagcagcgtctgcccgcaaccgcactacttgctgcccgacactaatgtgttactgcaccagattgatgttcttgaggaccctgccatcaggaatgtaattgtgctacaaacagttcttcaagaagtgagaaatcgcagtgcccccgtatataaacgcatccgagatgtgactaataaccaagagaagcatttctatactttcactaatgagcaccatagagaaacctatgtagaacaagaacagggagaaaatgctaatgacaggaatgatagagcgattcgagtagcagcaaaatggtacaatgaacatttgaaaaaaatgtcagcagacaaccagctgcaagttatcttcataacaaatgacaggagaaacaaagagaaagccatagaagaaggaataccagctttcacttgtgaagaatatgtaaagagcctaactgctaaccccgaactcatagatcgtcttgcttgtttgtctgaagaagggaatgaaatagaaagtggaaaaataatattttcagagcatcttcccttaagtaagctacagcaaggcataaaatctggtacataccttcaaggaacatttagagctagcagggaaaattacttggaagctacagtatggattcatggcgacaatgaagaaaataaagagataatcttacagggacttaaacatttaaacagagctgttcacgaagatattgtggctgtggagcttctccccaagagtcagtgggtagcaccatcttctgtggttttacatgatgaaggtcaaaatgaagaagatgtggagaaagaagaagagacagaacgaatgcttaagactgctgtaagcgagaaaatgttgaagcctacaggtagagttgtaggaataataaaaaggaattggagaccatattgtggcatgctttccaagtctgacattaaggagtcaagaagacatctctttacacctgctgataagagaatccctcgaattcgcatagaaaccagacaggcttccacattagaaggacggagaattattgttgctattgatggttggcccagaaattccagatatccaaatggacactttgtgagaaatttaggtgatgttggagagaaagagactgaaacagaagttttgttacttgaacacgatgttccccatcagcctttttcacaggctgttcttagttttctgccaaagatgccctggagcattactgaaaaggacatgaaaaaccgagaagacctgaggcatctgtgtatttgtagtgtagacccaccaggatgtactgatatagacgatgctctacattgtcgagaactcgaaaatggaaatttggaggttggtgttcatattgctgatgtgagccattttattaggccaggaaatgccttggatcaagaatcagccagaagaggaacaactgtgtatctttgtgaaaagaggattgacatggttccagagttgcttagctctaacttgtgttccttaaaatgtgacgtggacaggctggcattttcatgtatttgggaaatgaatcacaatgctgaaatcttaaaaacgaagtttaccaaaagtgttattaattcaaaggcatctctgacgtatgctgaagctcagttgagaattgattcagcaaacatgaatgatgatattaccactagtctccgtggactgaataaactagccaaaattctgaagaaaagaaggattgaaaaaggggctttgactctatcctctcctgaagttcgattccacatggacagtgaaactcacgatcctatagatctgcagaccaaggaacttagggaaacaaattccatggttgaagaatttatgttacttgccaatatttctgttgcaaaaaaaattcatgaggaattttctgaacatgctctgcttcgaaaacatcctgctccacctccatcaaattatgaaattcttgttaaggcagccaggtcaaggaatttggaaattaagactgatacagccaagtctttggctgagtctttggatcaggccgaatctcctacttttccatatctaaacactctgttgagaatattagccactcgctgtatgatgcaagctgtgtacttctgttctggaatggataatgattttcatcactatggcttagcgtctccaatatacacacattttacttcacccattagaagatacgcagatgtcattgttcatcggcttttggctgtggctattggggctgactgtacttatccagagttgacagacaaacacaagcttgcagatatatgtaaaaatctaaatttccggcacaaaatggctcaatatgcccaacgtgcatcagtggcttttcatacccagttattcttcaaaagcaaaggaatagtaagtgaagaagcctatattttatttgtaagaaagaatgccattgtggtattaattccaaagtatggtttagaagggacagtcttttttgaagaaaaggacaaaccaaacccacagcttatttatgatgatgagataccctcacttaaaatagaagatacagtgttccatgtatttgataaagttaaagtgaaaatcatgttagactcatctaatcttcaacatcagaagatccgaatgtccctggtagaaccacagataccaggaataagcattcctactgatacttcaaacatggaccttaatggaccaaagaaaaagaagatgaagcttggaaaatagctatattcaacaaaaatcttcaaagactggtttcttttttaaaagaaaaaacttgaaagaacacttctaagcctaagtgtgtgatacagtttgttacttttaagtacattttaataatttcagacatctgcatttttattgaacagttgactgtatctgacccatcatactactatacttctgggttgaacagaattatttatgcagaataattcaattgaatatccatcacttaaatacagtgacaggacagcaacttcagggatctgtaaagatcatttaaatggagtgctcatctcattgaggagcagattaattttgcgtaagtactttgattatttaatatttgtaagaaaaaactttcattttcctacagaggaaaatagaacaattttagaagcaaggaacaatctcttttctaagtcttggaagctgtcagtgttgaggatgtaatctcctttgccatctttaattcacctaacttacactaggtgttctcttactgtctttaaaagcttcctgtattttattagtggtccttgaaaaactgtgaatgtttgggaattggtagaaaggcaaaaagtaggatattttgacctgactggaaagatggttgtgtttttattgccaggtaataagtgtgatcattgttgaacttcagctccagtgtctctccagaataagacattggcattcaaatgtctatatcttgttacttacaaaataaaaaacagattaattagtggcttttaaattgtagttatatcagtgtatatacacgaggggaactgtataaagacatactaaagggaacagattaaaataagtattattaataaaatttggtgtgccagactgactacttcccttgctaatcacagagattagtaatgattaaattaatatcttcaggaatattttgggatagggttgccttaaaacattttacttggcttattcaatttctaaagcacttacgttgtgccaggttccactcaagtaaattatctctgccttcaaggagcttgcagtatagtgagaaaagcctgccaagtaaatcagcaggtatactaaataggtagtcatttaggcactcaataaatgttgactaatttttccagtttcctattactgaggaaaacctccatacactgaggcagaaacttgtgtcagttggaggaaaatagacttgagtagtctttggtccaggtaaaatgggtcagtgacactgaaacagtagagtaggagtcaaaaaaccttttctgtgaagtgctagaacattttagactttgttggctatggtctgtattgcaactatagtacacaactctgccgttgatagtgtgtaaggagccatatacaatatgtaaacaaatcaacatgactgtgtttcaacaaggcctgatttgttaagtttcatatatagtcatatgtcacttaatgacagggatatgttctgagacatgtcacttggcaatttcatcattgtgtgaaaatcatgatgtagttacacaaacctagatggtataccctatggtatcctatatgggatagcctattgctcctaacctacaaacctgtatggcatattactgtactgattactgtaggcggttgtaacacagtgctaagtatttgtgtatctaaacatatctaaacatagaaaaggtacagtaaaaatatatatatagatatatataagatataaaatggtacacctatttaggacatttaccatgaacaagttggcaggactggaagctggctctgggtgagtcagtaagtggttagtgaatgtgaaggccatgatattactgtgcactactgtagacttttataaacactatatacttaggctacataaagtaatttcactatgatgttaccatggctgtgtccccaggcaataggaatttttcagctccattgtaatcttacgggatcatcatcgtatatttggccattgttgaccaaaagttatgcagcacatcattataattttgatgtgtcacaaaacattactcatttgatttcccccacccccgccaaccatttaaaaaagtttgccggctaggtgcggtggctcatgcctgtaatcctagcattttgggaggacgaggcgggtggatcactcgatgtcaggagtttgagaccagcctggccaacatggtaaaacgccgtctctactaaaaatacaaaaacttagctgggtgtaacggcggatgcctgtaatcccagctacttgggaggctgaggcaggagaatcgcttgaacctgggaggcggaagttgcagtgagccgagattgcaccactgcagttcagcctggatgatgagagtgagactccatcgcaaaaaaaaaaaaaaaaaaagaaaagaaaattagccaggtgtggtggcaagtgcctttaatcccacctcaggaggctgaggcaggagaatcgcttgaacctgggaggcagaggttgcagtgagccaagatcgcgccactgcactccagcctgggtgacagaacaagactgtctcaaaaaaaaaaaaagagaagaaaaactgcctacaggccatagttaacctgcaatagagaagaaagggaagtagggcagtgcatgactggccttaggttttttctttccaagtttattttcttgtgcttcagctactagaaaggtttaattcagggataagtcccaattgagtagttcaagatgatcagagactttgctattttcccctaagttctattccataatctaaaatgttctgtttctagtgccagttcttatgctaagcaggttacgtggaatatatcacttaactcaaaaagccctgttaagccaggactgttatctccatttaacagatgagaaaatggaggtttatggtctgttctcacactgctacgaagaaataccccaaactgggtaattattataaaggaaagaggtttaatggactcagttccgcattgctggtgaggcctcaggacacttacacaatcatggcagaaaaaggagaagcaggcacctttttcacagggcggcaggatgaaaatgactgccagcagtggaaatgccagacgcttataaaaccttcagatctcatgagaccggctcactatcacaggaacagcatggaggaaaccgcccccatgatccagttacctccacctggtcccacccttgacacgtggggattgctacaattcaaggttagatttgggtgaggacacagagccataccatatcagcccagatcaagtagtgacagagtagggatttgaatacaggttatagtcactattgtgttatttcttgacttttgtactattaaaaaactgtagccagtgaggcttctacccttagtacccagaactccttttaggtatagcaattgtttttaggtaaatttatattgagtttaacacctgtgtgattaaagacaactttccaatgtagtatctgtagccatgtcccctaatggctattagtgttcatggttagtgtgttgaagatgagccaggtacataacgcggcacattttctgcaggtcagcagtaaggtttcaaggtacagttatggaggaaagaagaaaatgacacattgataacacaggtctttattcccttttgaatgagacagtttttaaaagttgatttataaatacaaaaatacattctccaaagatagtatttccaaactgttatatacccatctactcccaacatggatataagttttttaaaaaaatagttgtatataacatacatatctgccccagtgttacttcacaggcctatgccctacgggaactccactctcccagccccactttttctcttggttctcccacattcttattctcccacatccctacccacgtttgagctggaaaggatgtccctaccctaggcatgaggtatattttattctgggcaccacacatttgccccatagataacaatacacgtgatgatgtcactagtactacctttctagtatttacatacttaaaagtagtaactagaacagttatcactggaactaagaattttccccacagaggtgaacagaccaagaactaaaatttcaggaaacctgtttaatttcttttgtatctttgaaaagttagttttatatctaagatttcttcacataggttataattcatctgtatgttcaagcttttatgtaaaaatatatagtgccttcagttttaacatagtttcacatgttctcagaactgctaaattcagtgctaccagtaaggcttaataagtagttcattgaccctgtaagataggagcactcagctctgtcacaatttgttgttaaacacatcactcaatgtaagtataaaaatatttattgataaaaaataaacttataattcagcaacttgaagttccaggagcatttctgttgttcctatgtcagtaagcccttgatttttcacattaaggagggaaagctaagcatgttacttgaagtaattttttcccagtcaccatcatgttgatcctgtgcacaacgatatatgcgaggaactcttaagcttagtctttgattctgacagaggcattctatggactgctgcattgaaaagggcttgctgttttcatccaacacctctgtgttgtgtggtcttgctgtgaaaaagaagacaataccttgttttcagtttaagtaggaccactggaggatgcaattatcgggactgtttttaaaacctaaaagcacgtttctttagctgaactctgaagggacagtaaagatacagtattttataaatcaatattctgcatcaaaaagcatcccaacactttgagaggccaaggtgggaggatcgcacgagcccaggagtttgggactagccctggcaacatagtgagaccctgtctctaccaaaaattttaaaaagctgggtgtggtggcacatgcctgtagccctagctactcaggaggctgaggtggtaagactgcttgagtctgggaggtgaaggctacagtgagctgtggtcgtgccactacactctagcctgggtgacagaatgagaccttgtctcaaaaaaaataaaataataaaatttaaaaaaatccttcatttatctctacttatgtttagatagacaactgcatcctgaaataggatggattttgttcaggttaatattagaagagacctgctctgatactacatacaacagaaaggcagtttgctcctactacatacaacagaaaggaaaactaaggtggcctccctattaaacatttgttgcacatttgctgatatttatagtattttataagaaactggcatataacagcagggcaaggtggttcacacctgtagttctagctactcaggagggtgaggcaggaggattgcttgagcccagcagttaaaggctgtagtgatctgattctacgactgcactccagcccgggtgacagagtaagaccctgtctcaaaaaaaaaaaaaaagaaaaaaaagaaacggcatacaaggctgggcatgttggctcatgcctgtaatcgcgcagcactttgcgaggctgaggcagaaagactgcttgacaccaggagtttgagaccagcctgggcaacacagcaggccctgtctctacaaaaaaataaaatgcaaaaaaaattggcacataaaattaaagactgtcctgactagtgcctgaaattatgatgagtttcttcaagtatgaatatataaccaccacctggaaggttcagtaaatgccctcatcaaatacacgctacctttgcacactttgtagtatgtaagatacttgtgtattcagagtaaccaaaatatttaaaggttattggatgttaagaaaacaggcttaccttttagtgttttaaatttcatatagtttctcaatagtactattgtctaataatcaaaattattttatatttctaatctaaacaatattaagctttcactatattttctccgtaccttcatattaaatgcttgagatttactctcaacttcacatgtttgtgcatcactttctttgcagtaactttctgccccaactgtatccataatattgcttccacaattctgcgtattatagccactatccatctgacaggagaaaaaagaaaaaaatatattgtgaggaacttaaaagtcaaatatttaaataagtaaaccactataaactctcattcactacatctgaatgatcctaacatgtaatattgatcatgttgaacaaaattcaaaagtaatgcacaaatataaaaggtagtcctgcatagtactgattattgtagtcattttacaattccttccaatgaaatatatcttgtaacttccttaagaatcagtgaacagcctactgacacaatgctttcctgttattttgtgatcgtacctagtagacaaaaatgagtattacaactaacttcaccttccaacgcattttccaggcttgtctctaaatggcttgaggcatgctgcctttaaaaaagtggattatattatatttacacctagttgttcacaataatgccacatatataatggctctagatgttagttcagcttttcatgttaataaaaattgtagcatcctaagatacactgtttcagtgcaaaagagcaaaaaagaaagattctagcgaacttccagcttggaaacatttattgagtgtctaaaaaggccaggcactatctctatatatttaatatttttttctcctttcaacaaccctaatactttactagagaaggaaattaaggcttaaaaagcttaactttcacaatgtcatccagtgatgaggtgatgaagatgtgagacctaagtccaggttctgttcactgcacaacgctccatttacctgtataatgctgagcaccaaagaaagcaatccacaagggaatcattttgcatttaagccctccctgcaagttaggatcagagggaaggaaaaagctgactgtcattttgtttccctcacaaaggtacagactagcctagaaacggcactctttatcacttaataatcctgaaaaaatgttcccagatttcaaggctggatacatatctgcttactactagaggtcatgttccaattagaacaaaagccttgtgatgtgtaacatttttggggaaaagccttgttctgctatcattcaatagctacttgatcaaaaatataaatgtcagattgctcccagagattctgccaatagctcttccttctaatattcatcactgccaaatagctggcttataatgcaatactaatatgtaactggatatatatggagggaagagttactcattagtacagcaggaagtaaggcatgcggggagtttgtcccacactatgggaagagcaggattgatgagagccaagttgagatggtggctgacttcactgtctctcatctagacttctgctaatgtcaatgcctaatatgtaccaaccaggcaacagataccttgttatcccccacaggcatcaaggcaggcatcaatctcactttatagctaagaaggatgaggggacaaaaattaaaaagtcatgttctattcactgctatgtaaatcttgccttaagatcccacagcctggaaataaaagaactctaattcaaa

SEQ ID NO: 127093 - DNA, 5232 bp, Homo sapiens
  Payload ID: 4902
  Gene Symbol: DIS3
  Gene Name: DIS3 homolog, exosome endoribonuclease and 3'-5' exoribonuclease
  Uniprot ID: Q9Y2L1
  ENST ID: ENST00000377780
  CDS Start-End: 94-2880
aagggaagaacctccggggttaggcgtattctagattgacgccttttgctggaagagcgctgctggggttaggattctgcgcggcgaggcaagatgctcaagtccaagacgttcttaaaaaagacccgggcgggcggcgtgatgaagatcgtgcgcgagcactacctgcgagacgacatcggctgcggtgcgcccgggtgcgcagcgtgtggaggggcgcacgaggggccggccctggagccgcagccccaggacccggcgagcagcgtctgcccgcaaccgcactacttgctgcccgacactaatgtgttactgcaccagattgtaagtgcctggaggccggggacctgggcttctgtggcctccagcctgcgactcccaggcagcttagaaacctatgtagaacaagaacagggagaaaatgctaatgacaggaatgatagagcgattcgagtagcagcaaaatggtacaatgaacatttgaaaaaaatgtcagcagacaaccagctgcaagttatcttcataacaaatgacaggagaaacaaagagaaagccatagaagaaggaataccagctttcacttgtgaagaatatgtaaagagcctaactgctaaccccgaactcatagatcgtcttgcttgtttgtctgaagaagggaatgaaatagaaagtggaaaaataatattttcagagcatcttcccttaagtaagctacagcaaggcataaaatctggtacataccttcaaggaacatttagagctagcagggaaaattacttggaagctacagtatggattcatggcgacaatgaagaaaataaagagataatcttacagggacttaaacatttaaacagagctgttcacgaagatattgtggctgtggagcttctccccaagagtcagtgggtagcaccatcttctgtggttttacatgatgaaggtcaaaatgaagaagatgtggagaaagaagaagagacagaacgaatgcttaagactgctgtaagcgagaaaatgttgaagcctacaggtagagttgtaggaataataaaaaggaattggagaccatattgtggcatgctttccaagtctgacattaaggagtcaagaagacatctctttacacctgctgataagagaatccctcgaattcgcatagaaaccagacaggcttccacattagaaggacggagaattattgttgctattgatggttggcccagaaattccagatatccaaatggacactttgtgagaaatttaggtgatgttggagagaaagagactgaaacagaagttttgttacttgaacacgatgttccccatcagcctttttcacaggctgttcttagttttctgccaaagatgccctggagcattactgaaaaggacatgaaaaaccgagaagacctgaggcatctgtgtatttgtagtgtagacccaccaggatgtactgatatagacgatgctctacattgtcgagaactcgaaaatggaaatttggaggttggtgttcatattgctgatgtgagccattttattaggccaggaaatgccttggatcaagaatcagccagaagaggaacaactgtgtatctttgtgaaaagaggattgacatggttccagagttgcttagctctaacttgtgttccttaaaatgtgacgtggacaggctggcattttcatgtatttgggaaatgaatcacaatgctgaaatcttaaaaacgaagtttaccaaaagtgttattaattcaaaggcatctctgacgtatgctgaagctcagttgagaattgattcagcaaacatgaatgatgatattaccactagtctccgtggactgaataaactagccaaaattctgaagaaaagaaggattgaaaaaggggctttgactctatcctctcctgaagttcgattccacatggacagtgaaactcacgatcctatagatctgcagaccaaggaacttagggaaacaaattccatggttgaagaatttatgttacttgccaatatttctgttgcaaaaaaaattcatgaggaattttctgaacatgctctgcttcgaaaacatcctgctccacctccatcaaattatgaaattcttgttaaggcagccaggtcaaggaatttggaaattaagactgatacagccaagtctttggctgagtctttggatcaggccgaatctcctacttttccatatctaaacactctgttgagaatattagccactcgctgtatgatgcaagctgtgtacttctgttctggaatggataatgattttcatcactatggcttagcgtctccaatatacacacattttacttcacccattagaagatacgcagatgtcattgttcatcggcttttggctgtggctattggggctgactgtacttatccagagttgacagacaaacacaagcttgcagatatatgtaaaaatctaaatttccggcacaaaatggctcaatatgcccaacgtgcatcagtggcttttcatacccagttattcttcaaaagcaaaggaatagtaagtgaagaagcctatattttatttgtaagaaagaatgccattgtggtattaattccaaagtatggtttagaagggacagtcttttttgaagaaaaggacaaaccaaacccacagcttatttatgatgatgagataccctcacttaaaatagaagatacagtgttccatgtatttgataaagttaaagtgaaaatcatgttagactcatctaatcttcaacatcagaagatccgaatgtccctggtagaaccacagataccaggaataagcattcctactgatacttcaaacatggaccttaatggaccaaagaaaaagaagatgaagcttggaaaatagctatattcaacaaaaatcttcaaagactggtttcttttttaaaagaaaaaacttgaaagaacacttctaagcctaagtgtgtgatacagtttgttacttttaagtacattttaataatttcagacatctgcatttttattgaacagttgactgtatctgacccatcatactactatacttctgggttgaacagaattatttatgcagaataattcaattgaatatccatcacttaaatacagtgacaggacagcaacttcagggatctgtaaagatcatttaaatggagtgctcatctcattgaggagcagattaattttgcgtaagtactttgattatttaatatttgtaagaaaaaactttcattttcctacagaggaaaatagaacaattttagaagcaaggaacaatctcttttctaagtcttggaagctgtcagtgttgaggatgtaatctcctttgccatctttaattcacctaacttacactaggtgttctcttactgtctttaaaagcttcctgtattttattagtggtccttgaaaaactgtgaatgtttgggaattggtagaaaggcaaaaagtaggatattttgacctgactggaaagatggttgtgtttttattgccaggtaataagtgtgatcattgttgaacttcagctccagtgtctctccagaataagacattggcattcaaatgtctatatcttgttacttacaaaataaaaaacagattaattagtggcttttaaattgtagttatatcagtgtatatacacgaggggaactgtataaagacatactaaagggaacagattaaaataagtattattaataaaatttggtgtgccagactgactacttcccttgctaatcacagagattagtaatgattaaattaatatcttcaggaatattttgggatagggttgccttaaaacattttacttggcttattcaatttctaaagcacttacgttgtgccaggttccactcaagtaaattatctctgccttcaaggagcttgcagtatagtgagaaaagcctgccaagtaaatcagcaggtatactaaataggtagtcatttaggcactcaataaatgttgactaatttttccagtttcctattactgaggaaaacctccatacactgaggcagaaacttgtgtcagttggaggaaaatagacttgagtagtctttggtccaggtaaaatgggtcagtgacactgaaacagtagagtaggagtcaaaaaaccttttctgtgaagtgctagaacattttagactttgttggctatggtctgtattgcaactatagtacacaactctgccgttgatagtgtgtaaggagccatatacaatatgtaaacaaatcaacatgactgtgtttcaacaaggcctgatttgttaagtttcatatatagtcatatgtcacttaatgacagggatatgttctgagacatgtcacttggcaatttcatcattgtgtgaaaatcatgatgtagttacacaaacctagatggtataccctatggtatcctatatgggatagcctattgctcctaacctacaaacctgtatggcatattactgtactgattactgtaggcggttgtaacacagtgctaagtatttgtgtatctaaacatatctaaacatagaaaaggtacagtaaaaatatatatatagatatatataagatataaaatggtacacctatttaggacatttaccatgaacaagttggcaggactggaagctggctctgggtgagtcagtaagtggttagtgaatgtgaaggccatgatattactgtgcactactgtagacttttataaacactatatacttaggctacataaagtaatttcactatgatgttaccatggctgtgtccccaggcaataggaatttttcagctccattgtaatcttacgggatcatcatcgtatatttggccattgttgaccaaaagttatgcagcacatcattataattttgatgtgtcacaaaacattactcatttgatttcccccacccccgccaaccatttaaaaaagtttgccggctaggtgcggtggctcatgcctgtaatcctagcattttgggaggacgaggcgggtggatcactcgatgtcaggagtttgagaccagcctggccaacatggtaaaacgccgtctctactaaaaatacaaaaacttagctgggtgtaacggcggatgcctgtaatcccagctacttgggaggctgaggcaggagaatcgcttgaacctgggaggcggaagttgcagtgagccgagattgcaccactgcagttcagcctggatgatgagagtgagactccatcgc

SEQ ID NO: 127094 - DNA, 2934 bp, Homo sapiens
  Payload ID: 4902
  Gene Symbol: DIS3
  Gene Name: DIS3 homolog, exosome endoribonuclease and 3'-5' exoribonuclease
  ENST ID: ENST00000490646
  CDS Start-End: 23-1702
ggattctgcgcggcgaggcaagatgctcaagtccaagacgttcttaaaaaagacccgggcgggcggcgtgatgaagatcgtgcgcgagcactacctgcgagacgacatcggctgcggtgcgcccgggtgcgcagcgtgtggaggggcgcacgaggggccggccctggagccgcagccccaggacccggcgagcagcgtctgcccgcaaccgcactacttgctgcccgacactaatgtgttactgcaccagattgatgttcttgaggaccctgccatcaggaatgtaattgtgctacaaacagttcttcaagaagtgagaaatcgcagtgcccccgtatataaacgcatccgagatgtgactaataaccaagagaagcatttctatactttcactaatgagcaccatagagaaacctatgtagaacaagaacagggagaaaatgctaatgacaggaatgatagagcgattcgagtagcagcaaaatggtacaatgaacatttgaaaaaaatgtcagcagacaaccagctgcaagttatcttcataacaaatgacaggagaaacaaagagaaagccatagaagaaggaataccagctttcacttgtgaagaatatgtaaagagcctaactgctaaccccgaactcatagatcgtcttgcttgtttgtctgaagaagggaatgaaatagaaagtggaaaaataatattttcagagcatcttcccttaagtaagctacagcaaggcataaaatctggtacataccttcaaggaacatttagagctagcagggaaaattacttggaagctacagtatggattcatggcgacaatgaagaaaataaagagataatcttacagggacttaaacatttaaacagagctgttcacgaagatattgtggctgtggagcttctccccaagagtcagtgggtagcaccatcttctgtggttttacatgatgaaggtcaaaatgaagaagatgtggagaaagaagaagagacagaacgaatgcttaagactgctgtaagcgagaaaatgttgaagcctacaggtagagttgtaggaataataaaaaggaattggagaccatattgtggcatgctttccaagtctgacattaaggagtcaagaagacatctctttacacctgctgataagagaatccctcgaattcgcatagaaaccagacaggcttccacattagaaggacggagaattattgttgctattgatggttggcccagaaattccagatatccaaatggacactttgtgagaaatttaggtgatgttggagagaaagagactgaaacagaagttttgttacttgaacacgatgttccccatcagcctttttcacaggctgttcttagttttctgccaaagatgccctggagcattactgaaaaggacatgaaaaaccgagaagacctgaggcatctgtgtatttgtagtgtagacccaccaggatgtactgatatagacgatgctctacattgtcgagaactcgaaaatggaaatttggaggttggtgttcatattgctgatgtgagccattttattaggccaggaaatgccttggatcaagaatcagccagaagaggaacaactgtgtatctttgtgaaaagaggattgacatggttccagagttgcttagctctaacttgtgttccttaaaatgtgacgtggacaggcatctctgacgtatgctgaagctcagttgagaattgattcagcaaacatgaatgatgatattaccactagtctccgtggactgaataaactagccaaaattctgaagaaaagaaggattgaaaaaggggctttgactctatcctctcctgaagttcgattccacatggacagtgaaactcacgatcctatagatctgcagaccaaggaacttagggaaacaaattccatggttgaagaatttatgttacttgccaatatttctgttgcaaaaaaaattcatgaggaattttctgaacatgctctgcttcgaaaacatcctgctccacctccatcaaattatgaaattcttgttaaggcagccaggtcaaggaatttggaaattaagactgatacagccaagtctttggctgagtctttggatcaggccgaatctcctacttttccatatctaaacactctgttgagaatattagccactcgctgtatgatgcaagctgtgtacttctgttctggaatggataatgattttcatcactatggcttagcgtctccaatatacacacattttacttcacccattagaagatacgcagatgtcattgttcatcggcttttggctgtggctattggggctgactgtacttatccagagttgacagacaaacacaagcttgcagatatatgtaaaaatctaaatttccggcacaaaatggctcaatatgcccaacgtgcatcagtggcttttcatacccagttattcttcaaaagcaaaggaatagtaagtgaagaagcctatattttatttgtaagaaagaatgccattgtggtattaattccaaagtatggtttagaagggacagtcttttttgaagaaaaggacaaaccaaacccacagcttatttatgatgatgagataccctcacttaaaatagaagatacagtgttccatgtatttgataaagttaaagtgaaaatcatgttagactcatctaatcttcaacatcagaagatccgaatgtccctggtagaaccacagataccaggaataagcattcctactgatacttcaaacatggaccttaatggaccaaagaaaaagaagatgaagcttggaaaatagctatattcaacaaaaatcttcaaagactggtttcttttttaaaagaaaaaacttgaaagaacacttctaagcctaagtgtgtgatacagtttgttacttttaagtacattttaataattt

SEQ ID NO: 127095 - DNA, 3651 bp, Homo sapiens
  Payload ID: 4902
  Gene Symbol: DIS3
  Gene Name: DIS3 homolog, exosome endoribonuclease and 3'-5' exoribonuclease
  ENST ID: ENST00000545453
  CDS Start-End: 819-3209
gtgaggtggcgtccagaaggaagccccgcctaggccacgggcggaaatggctcctcgccttgctttgccgcccctccccactctcgcccaatccccgcggccgtcagagagccaaccaatgtttatctcggcattttcccgcgagaagtgttactaatatccgggaatggaaagggaagaacctccggggttaggcgtattctagattgacgccttttgctggaagagcgctgctggggttaggattctgcgcggcgaggcaagatgctcaagtccaagacgttcttaaaaaagacccgggcgggcggcgtgatgaagatcgtgcgcgagcactacctgcgagacgacatcggctgcggtgcgcccgggtgcgcagcgtgtggaggggcgcacgaggggccggccctggagccgcagccccaggacccggcgagcagcgtctgcccgcaaccgcactacttgctgcccgacactaatgtgttactgcaccagattgtaagtgcctggaggccggggacctgggcttctgtggcctccagcctgcgactcccaggcagcttattgatgttcttgaggaccctgccatcaggaatgtaattgtgctacaaacagttcttcaagaagtgagaaatcgcagtgcccccgtatataaacgcatccgagatgtgactaataaccaagagaagcatttctatactttcactaatgagcaccatagagaaacctatgtagaacaagaacagggagaaaatgctaatgacaggaatgatagagcgattcgagtagcagcaaaatggtacaatgaacatttgaaaaaaatgtcagcagacaaccagctgcaagttatcttcataacaaatgacaggagaaacaaagagaaagccatagaagaaggaataccagctttcacttgtgaagaatatgtaaagagcctaactgctaaccccgaactcatagatcgtcttgcttgtttgtctgaagaagggaatgaaatagaaagtggaaaaataatattttcagagcatcttcccttaagtaagctacagcaaggcataaaatctggtacataccttcaaggaacatttagagctagcagggaaaattacttggaagctacagtatggattcatggcgacaatgaagaaaataaagagataatcttacagggacttaaacatttaaacagagctgttcacgaagatattgtggctgtggagcttctccccaagagtcagtgggtagcaccatcttctgtggttttacatgatgaaggtcaaaatgaagaagatgtggagaaagaagaagagacagaacgaatgcttaagactgctgtaagcgagaaaatgttgaagcctacaggtagagttgtaggaataataaaaaggaattggagaccatattgtggcatgctttccaagtctgacattaaggagtcaagaagacatctctttacacctgctgataagagaatccctcgaattcgcatagaaaccagacaggcttccacattagaaggacggagaattattgttgctattgatggttggcccagaaattccagatatccaaatggacactttgtgagaaatttaggtgatgttggagagaaagagactgaaacagaagttttgttacttgaacacgatgttccccatcagcctttttcacaggctgttcttagttttctgccaaagatgccctggagcattactgaaaaggacatgaaaaaccgagaagacctgaggcatctgtgtatttgtagtgtagacccaccaggatgtactgatatagacgatgctctacattgtcgagaactcgaaaatggaaatttggaggttggtgttcatattgctgatgtgagccattttattaggccaggaaatgccttggatcaagaatcagccagaagaggaacaactgtgtatctttgtgaaaagaggattgacatggttccagagttgcttagctctaacttgtgttccttaaaatgtgacgtggacaggctggcattttcatgtatttgggaaatgaatcacaatgctgaaatcttaaaaacgaagtttaccaaaagtgttattaattcaaaggcatctctgacgtatgctgaagctcagttgagaattgattcagcaaacatgaatgatgatattaccactagtctccgtggactgaataaactagccaaaattctgaagaaaagaaggattgaaaaaggggctttgactctatcctctcctgaagttcgattccacatggacagtgaaactcacgatcctatagatctgcagaccaaggaacttagggaaacaaattccatggttgaagaatttatgttacttgccaatatttctgttgcaaaaaaaattcatgaggaattttctgaacatgctctgcttcgaaaacatcctgctccacctccatcaaattatgaaattcttgttaaggcagccaggtcaaggaatttggaaattaagactgatacagccaagtctttggctgagtctttggatcaggccgaatctcctacttttccatatctaaacactctgttgagaatattagccactcgctgtatgatgcaagctgtgtacttctgttctggaatggataatgattttcatcactatggcttagcgtctccaatatacacacattttacttcacccattagaagatacgcagatgtcattgttcatcggcttttggctgtggctattggggctgactgtacttatccagagttgacagacaaacacaagcttgcagatatatgtaaaaatctaaatttccggcacaaaatggctcaatatgcccaacgtgcatcagtggcttttcatacccagttattcttcaaaagcaaaggaatagtaagtgaagaagcctatattttatttgtaagaaagaatgccattgtggtattaattccaaagtatggtttagaagggacagtcttttttgaagaaaaggacaaaccaaacccacagcttatttatgatgatgagataccctcacttaaaatagaagatacagtgttccatgtatttgataaagttaaagtgaaaatcatgttagactcatctaatcttcaacatcagaagatccgaatgtccctggtagaaccacagataccaggaataagcattcctactgatacttcaaacatggaccttaatggaccaaagaaaaagaagatgaagcttggaaaatagctatattcaacaaaaatcttcaaagactggtttcttttttaaaagaaaaaacttgaaagaacacttctaagcctaagtgtgtgatacagtttgttacttttaagtacattttaataatttcagacatctgcatttttattgaacagttgactgtatctgacccatcatactactatacttctgggttgaacagaattatttatgcagaataattcaattgaatatccatcacttaaatacagtgacaggacagcaacttcagggatctgtaaagatcatttaaatggagtgctcatctcattgaggagcagattaattttgcgtaataagtgtgatcattgttgaacttcagctccagtgtctctccagaataagacattggcattcaaatgtctatatcttgttacttacaaaataaaaaacagattaattagtggctttt

SEQ ID NO: 127096 - DNA, 3201 bp, Homo sapiens
  Payload ID: 4903
  Gene Symbol: DIS3L2
  Gene Name: DIS3 like 3'-5' exoribonuclease 2
  Uniprot ID: Q8IYB7
  ENST ID: ENST00000273009
  CDS Start-End: 615-2426
atgcgggggttgtccatctctgtatccccagtgccagcactgcacctcgccccaagcagttgtccaataaatgagcagtgagtaaatgaaagaatgagcaaagccttgtaacaggaaaggggccggcggcgtctgccgtgcaagacctggcccagtggagcagagcctggaggttcaggagccgggtctggaaggctccttccggtggaagaggggcccggagccagccggcgcctggcacaaggcgtctcagaggccgcccactgggagccaaccgttgcagccagttgtccccgcgagcgaggccggagaaggcgcggcggcccctggcctggccatttcgcccttgtcgcagctgaaccgccgactacgagctcctgcaccgcgcacacaccccgcgcgcttcgctctcggcctcgcccggccaccgtcgctctctagaacgccgcgcccgtgacccggaagagcattctccttagcaactgcgggactgcggcggcgccggcctccggggagaaacgcgaatgacaacagagctgctcaaggcgggaactctgagctaagcagtggaggtttctctggatctggagagaagagtgaccttggagccaataatgagccatcctgactacagaatgaacctccggcccctggggacccccagaggtgtgtctgctgtggctggtccacatgacattggtgcttcgccaggtgacaaaaagtcaaagaacaggtccacacgagggaagaaaaagagcatatttgaaacttacatgtccaaggaggatgtttcagaaggcttgaagagaggaacactcatccagggtgtattgagaattaatccaaagaagtttcatgaagccttcattccttccccggatggtgatcgagacatttttattgatggggttgttgctcgtaatagagccttaaatggggatctggtggtcgtgaaactgcttcccgaggagcattggaaggtagttaaaccagagagcaatgacaaagaaacagaagctgcgtatgaatcagatatccccgaggagctctgtggacaccatctcccgcaacagtccctgaaaagctataatgacagtcctgatgtcattgtagaggctcagtttgatggcagcgactcagaagatggacatggcatcacacaaaatgtgctggttgatggtgttaagaaactctcagtttgtgtttctgagaaaggaagagaggatggtgatgcaccggttacaaaagatgagaccacctgcatttcacaagacacaagagctttatcggagaaatccctgcaaagatcagcaaaggtggtttacatcttggagaaaaaacattctcgagcagcaaccggcttcctcaaactcttggctgataagaacagcgaactgtttaggaaatacgccctgttttctccctcagaccaccgagtgcctagaatttatgtgcctctcaaggactgtccccaggactttgtggcacggcctaaagattatgccaacacactgttcatctgccgcattgtggactggaaggaggactgcaattttgccctggggcagctggctaagagtcttgggcaggctggtgaaattgagcctgaaacagaaggaatactaacagagtatggcgtggatttctctgatttctcttcagaagttctagaatgtcttcctcaaggcctgccatggacaattccaccagaggagttcagcaagagaagggatttaagaaaagactgtatcttcaccattgacccatcaaccgcccgagacctcgatgatgccctctcctgcaagccactcgctgacggcaacttcaaagtgggagttcacattgctgacgtgagttactttgttccggagggatctgatctggataaagtggctgccgagagggctacaagcgtctacttggttcaaaaggtggtccccatgcttcccaggctgctgtgtgaggagctgtgcagcctcaaccccatgtccgacaagctgaccttctctgtgatctggacactgactccagagggcaagatccttgatgaatggtttggccggaccatcatccgctcctgcaccaaacttagctacgagcatgcacagagcatgattgaaagcccaactgagaaaatccctgcgaaagagctgccccccatttccccagagcatagcagcgaggaggtacaccagcagaacgcagacaaggatggggctgcccatcttcaggcctctcacagcccctctgctgaagatgcagaagcacagccctccacagaggaacgcctgcctgagactcggggcatatgtgacagggatccagacacacgactgtttttccttcagcaacagagccgtgtattggaagcaaagccccaaaacacgataagagtagaggagcagacaacccagttgcagatttgaagaagcatgtggaattccttgtggcggagaaggaaagattatggaaagaaagtaaacaggtaaaggctgaaaaggccagacttctaaaaggtccagtagaaaaggagctggatgtgggtgctgattttgtggaaaagtcagagttacggagctcgcctctgcattcagaaactgctataccctcttcagccttgcagaggtttgcagcagatgccaggaaagccaagtacattccaatacccaatcttttccctcagattttccatctccagagcttccctttatggagctttctgaggatattctgaaaggatttatgagtaactaaaatggaaggccatagaagaagggagaagaggaaataatactaagtcatacagttaatccagcaacaaaaaatgaaaagggaaagccacaggcaagggtaatcctggaaatgcctcgtcatctggtgtactgtaggagaagacgcattgccaggatgtggggaacagtcgctgtgaagcgtgtcacatacctgattcactgacttgagctgatgatgccgacctggcagacactaaactcgtggagggtcagtttctcttgacaccaaccaaatggctgcctgaaagaattttttcaagcaacaattatttttcttatcttcagggttaaaatgtataaaagtatgttatgtataattaatctgttatgtcataagtgatcatgcaaaacctaaatattatggcagcctgaggggctgcttcgtatttgaaacatgctttgtctcagg

SEQ ID NO: 127097 - DNA, 3501 bp, Homo sapiens
  Payload ID: 4903
  Gene Symbol: DIS3L2
  Gene Name: DIS3 like 3'-5' exoribonuclease 2
  Uniprot ID: Q8IYB7
  ENST ID: ENST00000325385
  CDS Start-End: 277-2934
tttcgcccttgtcgcagctgaaccgccgactacgagctcctgcaccgcgcacacaccccgcgcgcttcgctctcggcctcgcccggccaccgtcgctctctagaacgccgcgcccgtgacccggaagagcattctccttagcaactgcgggactgcggcggcgccggcctccggggagaaacgcgaatgacaacagagctgctcaaggcgggaactctgagctaagcagtggaggtttctctggatctggagagaagagtgaccttggagccaataatgagccatcctgactacagaatgaacctccggcccctggggacccccagaggtgtgtctgctgtggctggtccacatgacattggtgcttcgccaggtgacaaaaagtcaaagaacaggtccacacgagggaagaaaaagagcatatttgaaacttacatgtccaaggaggatgtttcagaaggcttgaagagaggaacactcatccagggtgtattgagaattaatccaaagaagtttcatgaagccttcattccttccccggatggtgatcgagacatttttattgatggggttgttgctcgtaatagagccttaaatggggatctggtggtcgtgaaactgcttcccgaggagcattggaaggtagttaaaccagagagcaatgacaaagaaacagaagctgcgtatgaatcagatatccccgaggagctctgtggacaccatctcccgcaacagtccctgaaaagctataatgacagtcctgatgtcattgtagaggctcagtttgatggcagcgactcagaagatggacatggcatcacacaaaatgtgctggttgatggtgttaagaaactctcagtttgtgtttctgagaaaggaagagaggatggtgatgcaccggttacaaaagatgagaccacctgcatttcacaagacacaagagctttatcggagaaatccctgcaaagatcagcaaaggtggtttacatcttggagaaaaaacattctcgagcagcaaccggcttcctcaaactcttggctgataagaacagcgaactgtttaggaaatacgccctgttttctccctcagaccaccgagtgcctagaatttatgtgcctctcaaggactgtccccaggactttgtggcacggcctaaagattatgccaacacactgttcatctgccgcattgtggactggaaggaggactgcaattttgccctggggcagctggctaagagtcttgggcaggctggtgaaattgagcctgaaacagaaggaatactaacagagtatggcgtggatttctctgatttctcttcagaagttctagaatgtcttcctcaaggcctgccatggacaattccaccagaggagttcagcaagagaagggatttaagaaaagactgtatcttcaccattgacccatcaaccgcccgagacctcgatgatgccctctcctgcaagccactcgctgacggcaacttcaaagtgggagttcacattgctgacgtgagttactttgttccggagggatctgatctggataaagtggctgccgagagggctacaagcgtctacttggttcaaaaggtggtccccatgcttcccaggctgctgtgtgaggagctgtgcagcctcaaccccatgtccgacaagctgaccttctctgtgatctggacactgactccagagggcaagatccttgatgaatggtttggccggaccatcatccgctcctgcaccaaacttagctacgagcatgcacagagcatgattgaaagcccaactgagaaaatccctgcgaaagagctgccccccatttccccagagcatagcagcgaggaggtacaccaggccgtcttgaatctccacggaattgccaagcagttacgccagcagcgctttgtggacggcgcacttcgtttggatcagctaaagcttgctttcactctggaccacgagaccggattgcctcaaggatgtcatatctatgagtaccgcgagagcaacaagctcgtggaggagttcatgctcttggccaacatggcagtggcccacaagatccaccgcgccttccccgagcaggccctgctgcgccggcaccccccgccccaaacaaggatgctcagtgacctggtggaattctgcgaccagatggggctgcccgtggacttcagctccgcaggagccctcaataaaagcctgacccaaacatttggagatgacaagtactcactggcccgcaaggaggtgctcaccaacatgtgctcccggcccatgcagatggcactgtacttctgctcggggctgctgcaggacccagcgcagttccggcactacgcgctcaatgtgcccctgtacacacacttcacctcgcccatccgccgctttgccgacgtcctggtgcaccgcctcctggctgccgcgttaggctatagggagcgactagacatggcgcccgataccctgcagaaacaggcggaccactgtaacgaccgccgcatggcgtccaagcgcgtgcaggagctcagtaccagtctcttctttgctgttctggtcaaggagagtggccccctggagtcagaagccatggtgatgggcatcctgaagcaagccttcgacgtgctggtgctgcgctacggcgtgcagaagcgcatctactgcaacgcactggccctgcggtcccaccacttccagaaggtgggcaagaagccggaactcacgctggtctgggagcctgaggacatggagcaggagccagcacagcaggtcatcaccatcttcagcctggtggaggtggtcctgcaggcagagtccacagccctcaagtacagcgccatcctgaagcggccaggcacccagggccacctgggccctgagaaggaggaggaggagtctgacggtgagcccgaggactcaagcaccagctgagctccaccagccgcctgccccgcctgccccgcctgcctgtcccgccacactggctttaggacctgttgacacggaggggggtttttaatttggtttttaacaactcaggggtttgtttttatttttatttaatttttgcagctcaacttttaaacaaactgcaggggagagggtggggctggaaggaaggctgaggcctggtcagcagtgaccccagcagagcaggccccagtcctcctgggaggctggccccccttttttctgggccctactgccctcctctgcccaggaaatgggggggtttcagcaactcagtgtcacagaataaaatcaagtgtggagtgccatctggtgtgtagggcgcctctgggaagcctgggcagcagaatgccccttgcacccagggcaagggacccagttcaggcttcacccctcgctgctgagccgatgtcaacacctggaactttcctgtcagttccaacacgattcagagctggctgcctggcagatgattgatactggagtctcattctgcctgattaaaaatggaattagtatgcaacactg

SEQ ID NO: 127098 - DNA, 3328 bp, Homo sapiens
  Payload ID: 4903
  Gene Symbol: DIS3L2
  Gene Name: DIS3 like 3'-5' exoribonuclease 2
  Uniprot ID: Q8IYB7
  ENST ID: ENST00000390005
  CDS Start-End: 176-2035
agaacgccgcgcccgtgacccggaagagcattctccttagcaactgcgggactgcggcggcgccggcctccggggagaaacgcgaatgacaacagagctgctcaaggcgggaactctgagctaagcagtggaggtttctctggatctggagagaagagtgaccttggagccaataatgagccatcctgactacagaatgaacctccggcccctggggacccccagaggtgtgtctgctgtggctggtccacatgacattggtgcttcgccaggtgacaaaaagtcaaagaacaggtccacacgagggaagaaaaagagcatatttgaaacttacatgtccaaggaggatgtttcagaaggcttgaagagaggaacactcatccagggtgtattgagaattaatccaaagaagtttcatgaagccttcattccttccccggatggtgatcgagacatttttattgatggggttgttgctcgtaatagagccttaaatggggatctggtggtcgtgaaactgcttcccgaggagcattggaaggtagttaaaccagagagcaatgacaaagaaacagaagctgcgtatgaatcagatatccccgaggagctctgtggacaccatctcccgcaacagtccctgaaaagctataatgacagtcctgatgtcattgtagaggctcagtttgatggcagcgactcagaagatggacatggcatcacacaaaatgtgctggttgatggtgttaagaaactctcagtttgtgtttctgagaaaggaagagaggatggtgatgcaccggttacaaaagatgagaccacctgcatttcacaagacacaagagctttatcggagaaatccctgcaaagatcagcaaaggtggtttacatcttggagaaaaaacattctcgagcagcaaccggcttcctcaaactcttggctgataagaacagcgaactgtttaggaaatacgccctgttttctccctcagaccaccgagtgcctagaatttatgtgcctctcaaggactgtccccaggactttgtggcacggcctaaagattatgccaacacactgttcatctgccgcattgtggactggaaggaggactgcaattttgccctggggcagctggctaagagtcttgggcaggctggtgaaattgagcctgaaacagaaggaatactaacagagtatggcgtggatttctctgatttctcttcagaagttctagaatgtcttcctcaaggcctgccatggacaattccaccagaggagttcagcaagagaagggatttaagaaaagactgtatcttcaccattgacccatcaaccgcccgagacctcgatgatgccctctcctgcaagccactcgctgacggcaacttcaaagtgggagttcacattgctgacgtgagttactttgttccggagggatctgatctggataaagtggctgccgagagggctacaagcgtctacttggttcaaaaggtggtccccatgcttcccaggctgctgtgtgaggagctgtgcagcctcaaccccatgtccgacaagctgaccttctctgtgatctggacactgactccagagggcaagatccttgatgaatggtttggccggaccatcatccgctcctgcaccaaacttagctacgagcatgcacagagcatgattgaaagcccaactgagaaaatccctgcgaaagagctgccccccatttccccagagcatagcagcgaggaggtacaccaggccgtcttgaatctccacggaattgccaagcagttacgccagcagcgctttgtggacggcgcacttcgtttggatcagctaaagcttgctttcactctggaccacgagaccggattgcctcaaggatgtcatatctatgagtaccgcgagagcaacaagccctgctgcgccggcaccccccgccccaaacaaggatgctcagtgacctggtggaattctgcgaccagatggggctgcccgtggacttcagctccgcaggagccctcaataaaagcctgacccaaacatttggagatgacaagtactcactggcccgcaaggaggtgctcaccaacatgtgctcccggcccatgcagatggcactgtacttctgctcggggctgctgcaggacccagcgcagttccggcactacgcgctcaatgtgcccctgtacacacacttcacctcgcccatccgccgctttgccgacgtcctggtgcaccgcctcctggctgccgcgttaggctatagggagcgactagacatggcgcccgataccctgcagaaacaggcggaccactgtaacgaccgccgcatggcgtccaagcgcgtgcaggagctcagtaccagtctcttctttgctgttctggtcaaggagagtggccccctggagtcagaagccatggtgatgggcatcctgaagcaagccttcgacgtgctggtgctgcgctacggcgtgcagaagcgcatctactgcaacgcactggccctgcggtcccaccacttccagaaggtgggcaagaagccggaactcacgctggtctgggagcctgaggacatggagcaggagccagcacagcaggtcatcaccatcttcagcctggtggaggtggtcctgcaggcagagtccacagccctcaagtacagcgccatcctgaagcggccaggcacccagggccacctgggccctgagaaggaggaggaggagtctgacggtgagcccgaggactcaagcaccagctgagctccaccagccgcctgccccgcctgccccgcctgcctgtcccgccacactggctttaggacctgttgacacggaggggggtttttaatttggtttttaacaactcaggggtttgtttttatttttatttaatttttgcagctcaacttttaaacaaactgcaggggagagggtggggctggaaggaaggctgaggcctggtcagcagtgaccccagcagagcaggccccagtcctcctgggaggctggccccccttttttctgggccctactgccctcctctgcccaggaaatgggggggtttcagcaactcagtgtcacagaataaaatcaagtgtggagtgccatctggtgtgtagggcgcctctgggaagcctgggcagcagaatgccccttgcacccagggcaagggacccagttcaggcttcacccctcgctgctgagccgatgtcaacacctggaactttcctgtcagttccaacacgattcagagctggctgcctggcagatgattgatactggagtctcattctgcctgattaaaaatggaattagtatgcaacactga

SEQ ID NO: 127099 - DNA, 2048 bp, Homo sapiens
  Payload ID: 4903
  Gene Symbol: DIS3L2
  Gene Name: DIS3 like 3'-5' exoribonuclease 2
  Uniprot ID: Q8IYB7
  ENST ID: ENST00000409401
  CDS Start-End: 176-925
agaacgccgcgcccgtgacccggaagagcattctccttagcaactgcgggactgcggcggcgccggcctccggggagaaacgcgaatgacaacagagctgctcaaggcgggaactctgagctaagcagtggaggtttctctggatctggagagaagagtgaccttggagccaataatgagccatcctgactacagaatgaacctccggcccctggggacccccagaggtgtgtctgctgtggctggtccacatgacattggtgcttcgccaggtgacaaaaagtcaaagaacaggtccacacgagggaagaaaaagagcatatttgaaacttacatgtccaaggaggatgtttcagaaggcttgaagagaggaacactcatccagggtgtattgagaattaatccaaagaagtttcatgaagccttcattccttccccggatggtgatcgagacatttttattgatggggttgttgctcgtaatagagccttaaatggggatctggtggtcgtgaaactgcttcccgaggagcattggaaggtagttaaaccagagagcaatgacaaagaaacagaagctgcgtatgaatcagatatccccgaggagctctgtggacaccatctcccgcaacagtccctgaaaagctataatgacagtcctgatgtcattgtagaggctcagtttgatggcagcgactcagaagatggacatggcatcacacaaaatgtgctggttgatggtgttaagaaactctcagtttgtgtttctgagaaaggaagagaggatggtgatgcaccggttacaaaagatgagaccacctgcatttcacaagacacaagagctttatcggagaaatccctgcaaagatcagcaaaggtcattgcctacagattttctccacgtgtccaaatggctttcacctgagctacttgttgaagatctcgtgtgattcagtcaggactgtatttggtcatttaatcagaaaagttagagcagagaatcataaaaagtgaattaaaaaaaaaaaactttaaacatataaatacgaatccatcttcctgcctttggataaggggtcaaggccttttctttgagtgtgggtatgttgattggagttctgtgttatctttcttgcttaaaccacacttgtaatgcagcatttatcactttgagttttggtggagtgagaatttagacagtggagaagcagtatgaatatagactctcttcagatttgtacagtttttgctccaatttttttgttgttaccatgcccatacctaatttaaaaataattttaatgtcttttttagtttttccaaagtattcaatttagttatagaaacaattgtttttatattcctatttcaccattttgcacaattcacttgtattctttaattatagaagctagtgtcattttcagatgtgggatgaaacagctgacttcttttttttttgttttgagacagagtttcactgttgttgcccaggctggagtgcaatggcacgatcttggctcactgcaacctctgcctccctggttcaagcgattcttctgcctcagcctcctgagtagctgggattacaggcgtgtaccaccatgcctggctaattttttgtatttttagtagaaatggggtttcgccaggctggtctcgaactcctgacctcgtgatctgcctgcctcagcctcccaaagtgctgggattacaggtgtgagccaacatgctcgactaaacacagctgacttctagctgtgcacatagctcatagtggcagaaatggtgaagggcaacgtataaagtggcataatggcatgaggctttatgtttcagaagcatccatcagtgtgtttcatatgggaatgcagtgtgcttactctaccaagcaagttgattaatagagtattgctcttgcatactgacatgaggaatttctaaattatactctatatatttgagtactaactgtgctccaggcagcatgctaagtgtgggagattagaatgaatggaaagcctggggatggatctggctcacagacc

SEQ ID NO: 127100 - DNA, 2658 bp, Homo sapiens
  Payload ID: 4903
  Gene Symbol: DIS3L2
  Gene Name: DIS3 like 3'-5' exoribonuclease 2
  Uniprot ID: Q8IYB7
  ENST ID: ENST00000409307
  CDS Start-End: 1-2658
atgagccatcctgactacagaatgaacctccggcccctggggacccccagaggtgtgtctgctgtggctggtccacatgacattggtgcttcgccaggtgacaaaaagtcaaagaacaggtccacacgagggaagaaaaagagcatatttgaaacttacatgtccaaggaggatgtttcagaaggcttgaagagaggaacactcatccagggtgtattgagaattaatccaaagaagtttcatgaagccttcattccttccccggatggtgatcgagacatttttattgatggggttgttgctcgtaatagagccttaaatggggatctggtggtcgtgaaactgcttcccgaggagcattggaaggtagttaaaccagagagcaatgacaaagaaacagaagctgcgtatgaatcagatatccccgaggagctctgtggacaccatctcccgcaacagtccctgaaaagctataatgacagtcctgatgtcattgtagaggctcagtttgatggcagcgactcagaagatggacatggcatcacacaaaatgtgctggttgatggtgttaagaaactctcagtttgtgtttctgagaaaggaagagaggatggtgatgcaccggttacaaaagatgagaccacctgcatttcacaagacacaagagctttatcggagaaatccctgcaaagatcagcaaaggtggtttacatcttggagaaaaaacattctcgagcagcaaccggcttcctcaaactcttggctgataagaacagcgaactgtttaggaaatacgccctgttttctccctcagaccaccgagtgcctagaatttatgtgcctctcaaggactgtccccaggactttgtggcacggcctaaagattatgccaacacactgttcatctgccgcattgtggactggaaggaggactgcaattttgccctggggcagctggctaagagtcttgggcaggctggtgaaattgagcctgaaacagaaggaatactaacagagtatggcgtggatttctctgatttctcttcagaagttctagaatgtcttcctcaaggcctgccatggacaattccaccagaggagttcagcaagagaagggatttaagaaaagactgtatcttcaccattgacccatcaaccgcccgagacctcgatgatgccctctcctgcaagccactcgctgacggcaacttcaaagtgggagttcacattgctgacgtgagttactttgttccggagggatctgatctggataaagtggctgccgagagggctacaagcgtctacttggttcaaaaggtggtccccatgcttcccaggctgctgtgtgaggagctgtgcagcctcaaccccatgtccgacaagctgaccttctctgtgatctggacactgactccagagggcaagatccttgatgaatggtttggccggaccatcatccgctcctgcaccaaacttagctacgagcatgcacagagcatgattgaaagcccaactgagaaaatccctgcgaaagagctgccccccatttccccagagcatagcagcgaggaggtacaccaggccgtcttgaatctccacggaattgccaagcagttacgccagcagcgctttgtggacggcgcacttcgtttggatcagctaaagcttgctttcactctggaccacgagaccggattgcctcaaggatgtcatatctatgagtaccgcgagagcaacaagctcgtggaggagttcatgctcttggccaacatggcagtggcccacaagatccaccgcgccttccccgagcaggccctgctgcgccggcaccccccgccccaaacaaggatgctcagtgacctggtggaattctgcgaccagatggggctgcccgtggacttcagctccgcaggagccctcaataaaagcctgacccaaacatttggagatgacaagtactcactggcccgcaaggaggtgctcaccaacatgtgctcccggcccatgcagatggcactgtacttctgctcggggctgctgcaggacccagcgcagttccggcactacgcgctcaatgtgcccctgtacacacacttcacctcgcccatccgccgctttgccgacgtcctggtgcaccgcctcctggctgccgcgttaggctatagggagcgactagacatggcgcccgataccctgcagaaacaggcggaccactgtaacgaccgccgcatggcgtccaagcgcgtgcaggagctcagtaccagtctcttctttgctgttctggtcaaggagagtggccccctggagtcagaagccatggtgatgggcatcctgaagcaagccttcgacgtgctggtgctgcgctacggcgtgcagaagcgcatctactgcaacgcactggccctgcggtcccaccacttccagaaggtgggcaagaagccggaactcacgctggtctgggagcctgaggacatggagcaggagccagcacagcaggtcatcaccatcttcagcctggtggaggtggtcctgcaggcagagtccacagccctcaagtacagcgccatcctgaagcggccaggcacccagggccacctgggccctgagaaggaggaggaggagtctgacggtgagcccgaggactcaagcaccagctga

SEQ ID NO: 127101 - DNA, 3250 bp, Homo sapiens
  Payload ID: 4903
  Gene Symbol: DIS3L2
  Gene Name: DIS3 like 3'-5' exoribonuclease 2
  Uniprot ID: Q8IYB7
  ENST ID: ENST00000445090
  CDS Start-End: 168-917
gcgcccgtgacccggaagagcattctccttagcaactgcgggactgcggcggcgccggcctccggggagaaacgcgaatgacaacagagctgctcaaggcgggaactctgagctaagcagtggaggtttctctggatctggagagaagagtgaccttggagccaataatgagccatcctgactacagaatgaacctccggcccctggggacccccagaggtgtgtctgctgtggctggtccacatgacattggtgcttcgccaggtgacaaaaagtcaaagaacaggtccacacgagggaagaaaaagagcatatttgaaacttacatgtccaaggaggatgtttcagaaggcttgaagagaggaacactcatccagggtgtattgagaattaatccaaagaagtttcatgaagccttcattccttccccggatggtgatcgagacatttttattgatggggttgttgctcgtaatagagccttaaatggggatctggtggtcgtgaaactgcttcccgaggagcattggaaggtagttaaaccagagagcaatgacaaagaaacagaagctgcgtatgaatcagatatccccgaggagctctgtggacaccatctcccgcaacagtccctgaaaagctataatgacagtcctgatgtcattgtagaggctcagtttgatggcagcgactcagaagatggacatggcatcacacaaaatgtgctggttgatggtgttaagaaactctcagtttgtgtttctgagaaaggaagagaggatggtgatgcaccggttacaaaagatgagaccacctgcatttcacaagacacaagagctttatcggagaaatccctgcaaagatcagcaaaggtcattgcctacagattttctccacgtgtccaaatggctttcacctgagctacttgttgaagatctcgtgtgattcagtcaggactgtatttggtcatttaatcagaaaagttagagcagagaatcataaaaagtgaattaaaaaaaaaaaactttaaacatataaatacgaatccatcttcctgcctttggataaggggtcaaggccttttctttgagtgtgggcagctggctaagagtcttgggcaggctggtgaaattgagcctgaaacagaaggaatactaacagagtatggcgtggatttctctgatttctcttcagaagttctagaatgtcttcctcaaggcctgccatggacaattccaccagaggagttcagcaagagaagggatttaagaaaagactgtatcttcaccattgacccatcaaccgcccgagacctcgatgatgccctctcctgcaagccactcgctgacggcaacttcaaagtgggagttcacattgctgacgtgagttactttgttccggagggatctgatctggataaagtggctgccgagagggctacaagcgtctacttggttcaaaaggtggtccccatgcttcccaggctgctgtgtgaggagctgtgcagcctcaaccccatgtccgacaagctgaccttctctgtgatctggacactgactccagagggcaagatccttgatgaatggtttggccggaccatcatccgctcctgcaccaaacttagctacgagcatgcacagagcatgattgaaagcccaactgagaaaatccctgcgaaagagctgccccccatttccccagagcatagcagcgaggaggtacaccaggccgtcttgaatctccacggaattgccaagcagttacgccagcagcgctttgtggacggcgcacttcgtttggatcagctaaagcttgctttcactctggaccacgagaccggattgcctcaaggatgtcatatctatgagtaccgcgagagcaacaacaggccctgctgcgccggcaccccccgccccaaacaaggatgctcagtgacctggtggaattctgcgaccagatggggctgcccgtggacttcagctccgcaggagccctcaataaaagcctgacccaaacatttggagatgacaagtactcactggcccgcaaggaggtgctcaccaacatgtgctcccggcccatgcagatggcactgtacttctgctcggggctgctgcaggacccagcgcagttccggcactacgcgctcaatgtgcccctgtacacacacttcacctcgcccatccgccgctttgccgacgtcctggtgcaccgcctcctggctgccgcgttaggctatagggagcgactagacatggcgcccgataccctgcagaaacaggcggaccactgtaacgaccgccgcatggcgtccaagcgcgtgcaggagctcagtaccagtctcttctttgctgttctggtcaaggagagtggccccctggagtcagaagccatggtgatgggcatcctgaagcaagccttcgacgtgctggtgctgcgctacggcgtgcagaagcgcatctactgcaacgcactggccctgcggtcccaccacttccagaaggtgggcaagaagccggaactcacgctggtctgggagcctgaggacatggagcaggagccagcacagcaggtcagaacccctctgtgtcccagccccctaagtcctgatgacccctctcctgcctcctgcggtgcccctcattccttcatctgtgtcccctgggctcccccagcactgcagcctcccgggtggggttttagggccctcccagctcacccagaccccctcctgtgggtcctgctttctggcaccaccttcccttccttgggggcaaccacagtggagagaggaggggctctgcctgtcccgctaatgcaggggtgctggccttctagggtcctttagagaacctgatgaaagctatgagtttacacccaagaaattgtctggaaccgttttcaccaacagtgtgccctgaacgcggacccaggccctcaggttgtgtttcataagccttgggagcgctcaggatgcatctgactccccaactctgccctgacccagggcattcttcctggagggggcccccattacagacaggcgagcagaggcttccagaggccgaaggaggggccaggggtcctgctgcagggatggaggcagagctgcgcctcgacatcaggccctgccatccttgtcccctcacggctgggctctgcacaggtcatcaccatcttcagcctggtggaggtggtcctgcaggcagagtccacagccctcaagtacagcgccatcctgaagcggccaggc

SEQ ID NO: 127102 - DNA, 570 bp, Homo sapiens
  Payload ID: 4903
  Gene Symbol: DIS3L2
  Gene Name: DIS3 like 3'-5' exoribonuclease 2
  ENST ID: ENST00000441279
  CDS Start-End: 139-570
agagcattctccttagcaactgcgggactgcggcggcgccggcctccggggagaaacgagctgctcaaggcgggaactctgagctaagcagtggaggtttctctggatctggagagaagagtgaccttggagccaataatgagccatcctgactacagaatgaacctccggcccctggggacccccagaggtgtgtctgctgtggctggtccacatgacattggtgcttcgccaggtgacaaaaagtcaaagaacaggtccacacgagggaagaaaaagagcatatttgaaacttacatgtccaaggaggatgtttcagaaggcttgaagagaggaacactcatccagggtgtattgagaattaatccaaagaagtttcatgaagccttcattccttccccggatggtgatcgagacatttttattgatggggttgttgctcgtaatagagccttaaatggggatctggtggtcgtgaaactgcttcccgaggagcattggaaggtagttaaaccagagagcaatgacaaagaaacagaagctgcgtatgaatcagatatccccgaggag

SEQ ID NO: 127103 - DNA, 4671 bp, Homo sapiens
  Payload ID: 4903
  Gene Symbol: DIS3L2
  Gene Name: DIS3 like 3'-5' exoribonuclease 2
  Uniprot ID: Q8IYB7
  ENST ID: ENST00000433430
  CDS Start-End: 1-1071
atgagccatcctgactacagaatgaacctccggcccctggggacccccagaggtgtgtctgctgtggctggtccacatgacattggtgcttcgccaggtgacaaaaagtcaaagaacaggtccacacgagggaagaaaaagagcatatttgaaacttacatgtccaaggaggatgtttcagaaggcttgaagagaggaacactcatccagggtgtattgagaattaatccaaagaagtttcatgaagccttcattccttccccggatggtgatcgagacatttttattgatggggttgttgctcgtaatagagccttaaatggggatctggtggtcgtgaaactgcttcccgaggagcattggaaggtagttaaaccagagagcaatgacaaagaaacagaagctgcgtatgaatcagatatccccgaggagctctgtggacaccatctcccgcaacagtccctgaaaagctataatgacagtcctgatgtcattgtagaggctcagtttgatggcagcgactcagaagatggacatggcatcacacaaaatgtgctggttgatggtgttaagaaactctcagtttgtgtttctgagaaagacaatgaaattgaggctcagagaagttcctgggcttatccagtatcccacaggaagtcagaagagaggatggtgatgcaccggttacaaaagatgagaccacctgcatttcacaagacacaagagctttatcggagaaatccctgcaaagatcagcaaaggtggtttacatcttggagaaaaaacattctcgagcagcaaccggcttcctcaaactcttggctgataagaacagcgaactgtttaggaaatacgccctgttttctccctcagaccaccgagtgcctagaatttatgtgcctctcaaggactgtccccaggactttgtggcacggcctaaagattatgccaacacactgttcatctgccgcattgtggactggaaggaggactgcaattttgccctggggcagctggctaagagtcttgggcaggctggtgaaattgagcctgaaacagaaggaatactaacagagtatggcgtggatttctctgatttctcttcagaagttctagaatgtcttcctcaaggcctgccatggacaattccaccagaggagttcagcaagagaagggatttaaggtaaactactaccagagataaaagaagaaagagatgttcagagagagcttcggatagagagactttctggcctggtgggactcggctgccctcattgcacccttaggcatggaaagctgcattctgaacaccagcaagcctagctataaatcttcttggacaggaaataaaagagtcagagaccaagccatctctgccctgcatacaaactctcttggttgagttgtgcccagtagttcagtgctttcagaaaagactgtatcttcaccattgacccatcaaccgcccgagacctcgatgatgccctctcctgcaagccactcgctgacggcaacttcaaagtgggagttcacattgctgacgtgagttactttgttccggagggatctgatctggataaagtggctgccgagagggctacaagcgtctacttggttcaaaaggtggtccccatgcttcccaggctgctgtgtgaggagctgtgcagcctcaaccccatgtccgacaagctgaccttctctgtgatctggacactgactccagagggcaaggccaggatgccaaactcctgacatcaagcagtccacccgccttgacttcccaaagtgctgggattgcaggcatgagccaccgtgcttggccaaaattcactagattttgaaagcagttcttgacccatggcttatgtgaaagcaaatgcccgatcagggtgcagtggttgccctgtgctggagcattcactagggaaaaagaccgcagaccctgggaggctgcagaccctgtgacctgaatgctggatgctggagggaacctccagaccacttgtgaaatgtgaaagagaacagtggaatagaactgaaactgacgttccctgagcatgctgaaggcagactgtacagcccaatgtagacgcacaggaggagtgactgggtttggaatgaaatgtagaaaaggaagcaagctaaatcaccaggggaaacccttgagaccacaagaatgaagaggtcatggccctgtcattccagaggaggctggagcagctcttcaggaaatgtggatgtgcgaagaggacaagcctggctgagcctaaaaggggctcttcagactcttctggagacctgcacatggcactccccactgggactgtcaggtggtacctggaattgactctacagttgcttttgcccacagcacacacatgcttcctgagagccaaattcagacctgcttgccacagtggaagatttgtgagattatttgaatcccttatatctttggatagtggtagttcttggaataatatggaaagaatagtttcaggatttttttaaaagaaaagttaaagtcagtgattacagattcaagattcttataagactttgctctggataaaaatatccttgatgaatggtttggccggaccatcatccgctcctgcaccaaacttagctacgagcatgcacagagcatgattgaaagcccaactgagaaaatccctgcgaaagagctgccccccatttccccagagcatagcagcgaggaggtacaccaggccgtcttgaatctccacggaattgccaagcagttacgccagcagcgctttgtggacggcgcacttcgtttggatcagctaaagcttgctttcactctggaccacgagaccggattgcctcaaggatgtcatatctatgagtaccgcgagagcaacaagctcgtggaggagttcatgctcttggccaacatggcagtggcccacaagatccaccgcgccttccccgagcaggccctgctgcgccggcaccccccgccccaaacaaggatgctcagtgacctggtggaattctgcgaccagatggggctgcccgtggacttcagctccgcaggagccctcaataaaagcctgacccaaacatttggagatgacaagtactcactggcccgcaaggaggtgctcaccaacatgtgctcccggcccatgcagcggctctaggcctggcagagaaggcacagcagcccctgagtcccagaactgcctctggctctgccctgctggggcccctcccatgtccctgcctctgacgccatcacctccaaggaggtacaagccaagctggagctccagagatcggagccgctccggagttagccagagcccgaaaagcctgcattctcctggctcgcctcccagggagctcagaggtgcccttgcccgggaatccgatggcagagagttaccagatggcactgtacttctgctcggggctgctgcaggacccagcgcagttccggcactacgcgctcaatgtgcccctgtacacacacttcacctcgcccatccgccgctttgccgacgtcctggtgcaccgcctcctggctgccgcgttaggctatagggagcgactagacatggcgcccgataccctgcagaaacaggcggaccactgtaacgaccgccgcatggcgtccaagcgcgtgcaggagctcagtaccagtctcttctttgctgttctggtcaaggagagtggccccctggagtcagaagccatggtgatgggcatcctgaagcaagccttcgacgtgctggtgctgcgctacggcgtgcagaagcgcatctactgcaacgcactggccctgcggtcccaccacttccagaaggtgggcaagaagccggaactcacgctggtctgggagcctgaggacatggagcaggagccagcacagcagtgtgccctgaacgcggacccaggccctcaggttgtgtttcataagccttgggagcgctcaggatgcatctgactccccaactctgccctgacccagggcattcttcctggagggggcccccattacagacaggcgagcagaggcttccagaggccgaaggaggggccaggggtcctgctgcagggatggaggcagagctgcgcctcgacatcaggccctgccatccttgtcccctcacggctgggctctgcacaggtcatcaccatcttcagcctggtggaggtggtcctgcaggcagagtccacagccctcaagtacagcgccatcctgaagcggccaggcacccagggccacctgggccctgagaaggaggaggaggagtctgacggtgagcccgaggactcaagcaccagctgagctccaccagccgcctgccccgcctgccccgcctgcctgtcccgccacactggctttaggacctgttgacacggaggggggtttttaatttggtttttaacaactcaggggtttgtttttatttttatttaatttttgcagctcaacttttaaacaaactgcaggggagagggtggggctggaaggaaggctgaggcctggtcagcagtgaccccagcagagcaggccccagtcctcctgggaggctggccccccttttttctgggccctactgccctcctctgcccaggaaatgggggggtttcagcaactcagtgtcacagaataaaatcaagtgtggagtgcca

SEQ ID NO: 127104 - DNA, 659 bp, Homo sapiens
  Payload ID: 4903
  Gene Symbol: DIS3L2
  Gene Name: DIS3 like 3'-5' exoribonuclease 2
  ENST ID: ENST00000434477
  CDS Start-End: 1-590
gctttgccgacgtcctggtgcaccgcctcctggctgccgcgttaggctatagggagcgactagacatggcgcccgataccctgcagaaacaggcggaccactgtaacgaccgccgcatggcgtccaagcgcgtgcaggagctcagtaccagtctcttctttgctgttctggtcaaggagagtggccccctggagtcagaagccatggtgatgggcatcctgaagcaagccttcgacgtgctggtgctgcgctacggcgtgcagaagcgcatctactgcaacgcactggccctgcggtcccaccacttccagaaggtgggcaagaagccggaactcacgctggtctgggagcctgaggacatggagcaggagccagcacagcaggagacaaagaacccaacctcagagattcctcaactcggagacccagccaggccaccctccagagcatctcagtctgcaagccccttggtgtgctcagagcttccagtcacactgctcatgcctatccgtgcacagccagggattgcccttcgtggaggaaaacttcatgaaacaaaaaacaagctccgtggggaacacagaccatagaggaaaaagaaagctgtagaaaaagaaatgatgaatgccttcctggaggtgagaaagccatcgtgaaac

SEQ ID NO: 127105 - DNA, 843 bp, Homo sapiens
  Payload ID: 4903
  Gene Symbol: DIS3L2
  Gene Name: DIS3 like 3'-5' exoribonuclease 2
  ENST ID: ENST00000418143
  CDS Start-End: 1-499
ggtgatgggcatcctgaagcaagccttcgacgtgctggtgctgcgctacggcgtgcagaagcgcatctactgcaacgcactggccctgcggtcccaccacttccagaaggtgggcaagaagccggaactcacgctggtctgggagcctgaggacatggagcaggagccagcacagcagggcattcttcctggagggggcccccattacagacaggcgagcagaggcttccagaggccgaaggaggggccaggggtcctgctgcagggatggaggcagagctgcgcctcgacatcaggccctgccatccttgtcccctcacggctgggctctgcacaggtcatcaccatcttcagcctggtggaggtggtcctgcaggcagagtccacagccctcaagtacagcgccatcctgaagcggccaggcacccagggccacctgggccctgagaaggaggaggaggagtctgacggtgagcccgaggactcaagcaccagctgagctccaccagccgcctgccccgcctgccccgcctgcctgtcccgccacactggctttaggacctgttgacacggaggggggtttttaatttggtttttaacaactcaggggtttgtttttatttttatttaatttttgcagctcaacttttaaacaaactgcaggggagagggtggggctggaaggaaggctgaggcctggtcagcagtgaccccagcagagcaggccccagtcctcctgggaggctggccccccttttttctgggccctactgccctcctctgcccaggaaatgggggggtttcagcaactcagtgtcacagaataaaatcaagtgtggagtg

SEQ ID NO: 127106 - DNA, 923 bp, Homo sapiens
  Payload ID: 4903
  Gene Symbol: DIS3L2
  Gene Name: DIS3 like 3'-5' exoribonuclease 2
  ENST ID: ENST00000417808
  CDS Start-End: 1-207
cggtcccaccacttccagaaggtgggcaagaagccggaactcacgctggtctgggagcctgaggacatggagcaggagccagcacagcagggtcctttagagaacctgatgaaagctatgagtttacacccaagaaattgtctggaaccgttttcaccaacagtgtgccctgaacgcggacccaggccctcaggttgtgtttcataagccttgggagcgctcaggatgcatctgactccccaactctgccctgacccagggcattcttcctggagggggcccccattacagacaggcgagcagaggcttccagaggccgaaggaggggccaggggtcctgctgcagggatggaggcagagctgcgcctcgacatcaggccctgccatccttgtcccctcacggctgggctctgcacaggtcatcaccatcttcagcctggtggaggtggtcctgcaggcagagtccacagccctcaagtacagcgccatcctgaagcggccaggcacccagggccacctgggccctgagaaggaggaggaggagtctgacggtgagcccgaggactcaagcaccagctgagctccaccagccgcctgccccgcctgccccgcctgcctgtcccgccacactggctttaggacctgttgacacggaggggggtttttaatttggtttttaacaactcaggggtttgtttttatttttatttaatttttgcagctcaacttttaaacaaactgcaggggagagggtggggctggaaggaaggctgaggcctggtcagcagtgaccccagcagagcaggccccagtcctcctgggaggctggccccccttttttctgggccctactgccctcctctgcccaggaaatgggggggtttcagcaactcagtgtcacagaataaaatcaagtgtggagt

SEQ ID NO: 127107 - DNA, 1149 bp, Homo sapiens
  Payload ID: 4903
  Gene Symbol: DIS3L2
  Gene Name: DIS3 like 3'-5' exoribonuclease 2
  ENST ID: ENST00000424049
  CDS Start-End: 1-1149
gaggagttcagcaagagaagggatttaagaaaagactgtatcttcaccattgacccatcaaccgcccgagacctcgatgatgccctctcctgcaagccactcgctgacggcaacttcaaagtgggagttcacattgctgacgtgagttactttgttccggagggatctgatctggataaagtggctgccgagagggctacaagcgtctacttggttcaaaaggtggtccccatgcttcccaggctgctgtgtgaggagctgtgcagcctcaaccccatgtccgacaagctgaccttctctgtgatctggacactgactccagagggcaagatccttgatgaatggtttggccggaccatcatccgctcctgcaccaaacttagctacgagcatgcacagagcatgattgaaagcccaactgagaaaatccctgcgaaagagctgccccccatttccccagagcatagcagcgaggaggtacaccaggccgtcttgaatctccacggaattgccaagcagttacgccagcagcgctttgtggacggcgcacttcgtttggatcagctaaagcttgctttcactctggaccacgagaccggattgcctcaaggatgtcatatctatgagtaccgcgagagcaacaagctcgtggaggagttcatgctcttggccaacatggcagtggcccacaagatccaccgcgccttccccgagcaggccctgctgcgccggcaccccccgccccaaacaaggatgctcagtgacctggtggaattctgcgaccagatggggctgcccgtggacttcagctccgcaggagccctcaataaaagcctgacccaaacatttggagatgacaagtactcactggcccgcaaggaggtgctcaccaacatgtgctcccggcccatgcagatggcactgtacttctgctcggggctgctgcaggacccagcgcagttccggcactacgcgctcaatgtgcccctgtacacacacttcacctcgcccatccgccgctttgccgacgtcctggtgcaccgcctcctggctgccgcgttaggctatagggagcgactagacatggcgcccgataccctgcagaaacaggcggaccactgtaacgaccgccgcatggcgtccaagcgc

SEQ ID NO: 127108 - DNA, 3763 bp, Homo sapiens
  Payload ID: 4904
  Gene Symbol: DIS3L
  Gene Name: DIS3 like exosome 3'-5' exoribonuclease
  Uniprot ID: Q8TF46
  ENST ID: ENST00000319194
  CDS Start-End: 262-3177
attaattacccggtattagtattaatacggcggctccattcccacatggacctgggggggacaaacaaagtctcctaatcttggacagctgcgcccagcccttcttcacctgccgtccaggtatcatcctagtcttccctccgtctctgggatgggaaactcttgtctagtgatgtgactcattacgtgatcccagactggaaagttgttcaagattatcttgagatccttgagtttcctgagttgaagggaattattttcatgcagacagcttgtcaagctgtgcagcatcaaagaggcaggagacagtataacaaactgcgaaacctgctgaaggatgcgcgtcatgattgcattctctttgctaatgaattccagcaatgctgctatctgccacgggaaagaggagagtccatggagaagtggcagaccaggagcatatacaacgcagctgtttggtactatcatcactgccaggacaggatgccaattgttatggtgacagaagatgaagaggcaattcagcagtatggaagtgaaacagaaggagtattcgtgattactttcaagaattacctggacaatttctggcctgatttaaaagctgcccacgagctttgtgattctatccttcagtctcgacgggagagagagaatgagagtcaggagagccatgggaaggagtacccagaacatcttcccctggaagtgttagaagctgggattaaatctggacgctatatccagggaattctgaatgtcaacaaacacagagcccaaatagaagcttttgttcgacttcaaggagccagcagtaaagattcagatttagtcagtgacatcctaatccacgggatgaaggctcgaaaccgctcaattcatggagatgtggtagttgtggagctgcttcctaaaaatgaatggaaaggaagaaccgtagccctgtgtgagaatgactgtgacgacaaggcttcgggcgagtccccaagtgagcccatgcctacaggtcgagtggtgggcatacttcagaagaactggcgggattatgtggtgacatttccgtccaaagaagaggtccaatctcagggcaaaaatgctcagaaaatcctggttacaccttgggattacagaattcccaaaattcgaattagcactcagcaagcagaaaccctccaggacttcagggtggtcgtgcgcatcgattcctgggagtcaacatctgtgtatccaaatggacattttgtgcgtgttttaggaagaatcggagatctggaaggggaaattgcaaccatcctggtggaaaacagtatttcagttattcctttctcagaagctcagatgtgtgagatgccagtaaacacaccagaaagtccctggaaggtgagtcctgaagaggaacaaaaacgtaaagacttgaggaaaagccatctcgtattcagcattgaccccaaaggttgtgaagatgtggatgacacactctcagtcagaaccttaaataatggcaacctggaacttggggtccacatcgcagatgtaacacactttgtggcaccaaattcttacattgatattgaagctagaacaagggccaccacttattatctagcagatcgtcgctatgacatgctgccttccgtcctcagtgcagatttgtgttcccttctgggaggcgttgataggtatgctgtaagcatcatgtgggaactggataaagcctcttatgaaattaagaaagtgtggtatggcagaaccattattcgatcagcatacaaactgttctatgaagcagcccaagaactactggatggaaacttaagcgttgttgatgatattccagaattcaaagacttggatgagaagagcagacaagccaagctggaggagttggtgtgggcaattggaaagctgaccgacatagctcgccatgtcagagctaaacgagacggatgtggtgccctggaactggaaggggtagaggtttgcgtacagctagatgacaaaaagaacattcacgacctcatccccaagcagcccctggaagtccacgagacagtggctgaatgcatgatcctggccaaccactgggtcgccaaaaagatctgggagagcttccctcatcaggccttgctgcgccagcaccctcctccacaccaggagttcttttcagaactccgggaatgtgctaaagccaaaggcttcttcatagatacacggtccaataaaacactggctgattctctggataatgcgaacgacccccacgatcccattgtgaacaggctactgcgctccatggccacgcaggccatgtcgaatgctctgtacttctccaccggatcctgtgcggaggaggagttccatcattacggtcttgcattagataaatatacccactttacttctccaataagaagatattcagatattgtagtacaccgcttgttaatggcagccatttcaaaagataagaaaatggaaattaagggaaatctgttcagcaacaaagatcttgaggaattatgcagacatatcaacaacagaaaccaagcagcacagcattctcagaagcagtctactgagctcttccagtgcatgtacttcaaagacaaagaccctgccaccgaggagcgttgcatatctgacggagttatttattcaattagaacaaatggtgtgcttctatttataccaaggtttgggattaaaggtgctgcttatctaaaaaataaagatggtttagtcatctcatgtggcccagatagctgttctgaatggaaaccaggatcccttcaacgatttcaaaacaaaattacctctactacaacagatggggaatctgttacgttccatttgtttgaccatgtaaccgtaagaatatccatacaggcctcacgttgccattctgatacaatcagacttgaaataattagtaacaaaccatacaagataccaaatacagaacttattcatcagagttcccccttgctgaagagtgagttagtgaaagaagtaactaaatctgtggaagaagctcagcttgcccaagaagtcaaagtaaacatcattcaggaggaatatcaagaatatcgccaaacaaagggaaggagcctatacacacttctagaggagatacgggacctagctctcctggatgtttcaaacaattatggaatatgagaggctcttacttcactaagagctgtcatatgtgaatgttttacagtcttttcaaacttaacatttaatgtgtgtcactcagtgctctagtcgatcaggactgggtagctatttcgcatatatgtaaaatgttctcagccgggcacggtggctcacgcctgtaaccccagcactttgggaggctgaggcgggcggatcacgaggtcaggagattgagaccatcctggctaacacggtgaaacccagtctctactaaaaatacaaaaattagcccggcgtggtggcatgcgcctgtagtcccagctacttgggaggctgaagcaggagaattgcctgaacccaggaagaggaggttgcagtgagccgagatcgcaccactgcattccagcctgggcaacagagcgagactccatctcaaaaaaaaaaaaaaaaaaaaaaaaagttctctcattcattaaagttgcattaaataaagtataattaggtcactatggaaacagagttttcagtaatgagtggacagtaagtggtggctctgcagatggcccctttctaataagtttaataaacccgaaattactggtta

SEQ ID NO: 127109 - DNA, 3647 bp, Homo sapiens
  Payload ID: 4904
  Gene Symbol: DIS3L
  Gene Name: DIS3 like exosome 3'-5' exoribonuclease
  Uniprot ID: Q8TF46
  ENST ID: ENST00000319212
  CDS Start-End: 51-3215
cttgcctccgccgcgcccgccactccgcggccgccgggagacacgccgccatgctgcagaagcgggagaaggtgctgctgctgaggaccttccagggccgcacgctgcggatcgtgcgcgagcactacctgcggccctgcgtgccctgccacagcccgctctgcccgcagcccgccgcctgcagccacgatgggaaactcttgtctagtgatgtgactcattacgtgatcccagactggaaagttgttcaagattatcttgagatccttgagtttcctgagttgaagggaattattttcatgcagacagcttgtcaagctgtgcagcatcaaagaggcaggagacagtataacaaactgcgaaacctgctgaaggatgcgcgtcatgattgcattctctttgctaatgaattccagcaatgctgctatctgccacgggaaagaggagagtccatggagaagtggcagaccaggagcatatacaacgcagctgtttggtactatcatcactgccaggacaggatgccaattgttatggtgacagaagatgaagaggcaattcagcagtatggaagtgaaacagaaggagtattcgtgattactttcaagaattacctggacaatttctggcctgatttaaaagctgcccacgagctttgtgattctatccttcagtctcgacgggagagagagaatgagagtcaggagagccatgggaaggagtacccagaacatcttcccctggaagtgttagaagctgggattaaatctggacgctatatccagggaattctgaatgtcaacaaacacagagcccaaatagaagcttttgttcgacttcaaggagccagcagtaaagattcagatttagtcagtgacatcctaatccacgggatgaaggctcgaaaccgctcaattcatggagatgtggtagttgtggagctgcttcctaaaaatgaatggaaaggaagaaccgtagccctgtgtgagaatgactgtgacgacaaggcttcgggcgagtccccaagtgagcccatgcctacaggtcgagtggtgggcatacttcagaagaactggcgggattatgtggtgacatttccgtccaaagaagaggtccaatctcagggcaaaaatgctcagaaaatcctggttacaccttgggattacagaattcccaaaattcgaattagcactcagcaagcagaaaccctccaggacttcagggtggtcgtgcgcatcgattcctgggagtcaacatctgtgtatccaaatggacattttgtgcgtgttttaggaagaatcggagatctggaaggggaaattgcaaccatcctggtggaaaacagtatttcagttattcctttctcagaagctcagatgtgtgagatgccagtaaacacaccagaaagtccctggaaggtgagtcctgaagaggaacaaaaacgtaaagacttgaggaaaagccatctcgtattcagcattgaccccaaaggttgtgaagatgtggatgacacactctcagtcagaaccttaaataatggcaacctggaacttggggtccacatcgcagatgtaacacactttgtggcaccaaattcttacattgatattgaagctagaacaagggccaccacttattatctagcagatcgtcgctatgacatgctgccttccgtcctcagtgcagatttgtgttcccttctgggaggcgttgataggtatgctgtaagcatcatgtgggaactggataaagcctcttatgaaattaagaaagtgtggtatggcagaaccattattcgatcagcatacaaactgttctatgaagcagcccaagaactactggatggaaacttaagcgttgttgatgatattccagaattcaaagacttggatgagaagagcagacaagccaagctggaggagttggtgtgggcaattggaaagctgaccgacatagctcgccatgtcagagctaaacgagacggatgtggtgccctggaactggaaggggtagaggtttgcgtacagctagatgacaaaaagaacattcacgacctcatccccaagcagcccctggaagtccacgagacagtggctgaatgcatgatcctggccaaccactgggtcgccaaaaagatctgggagagcttccctcatcaggccttgctgcgccagcaccctcctccacaccaggagttcttttcagaactccgggaatgtgctaaagccaaaggcttcttcatagatacacggtccaataaaacactggctgattctctggataatgcgaacgacccccacgatcccattgtgaacaggctactgcgctccatggccacgcaggccatgtcgaatgctctgtacttctccaccggatcctgtgcggaggaggagttccatcattacggtcttgcattagataaatatacccactttacttctccaataagaagatattcagatattgtagtacaccgcttgttaatggcagccatttcaaaagataagaaaatggaaattaagggaaatctgttcagcaacaaagatcttgaggaattatgcagacatatcaacaacagaaaccaagcagcacagcattctcagaagcagtctactgagctcttccagtgcatgtacttcaaagacaaagaccctgccaccgaggagcgttgcatatctgacggagttatttattcaattagaacaaatggtgtgcttctatttataccaaggtttgggattaaaggtgctgcttatctaaaaaataaagatggtttagtcatctcatgtggcccagatagctgttctgaatggaaaccaggatcccttcaacgatttcaaaacaaaattacctctactacaacagatggggaatctgttacgttccatttgtttgaccatgtaaccgtaagaatatccatacaggcctcacgttgccattctgatacaatcagacttgaaataattagtaacaaaccatacaagataccaaatacagaacttattcatcagagttcccccttgctgaagagtgagttagtgaaagaagtaactaaatctgtggaagaagctcagcttgcccaagaagtcaaagtaaacatcattcaggaggaatatcaagaatatcgccaaacaaagggaaggagcctatacacacttctagaggagatacgggacctagctctcctggatgtttcaaacaattatggaatatgagaggctcttacttcactaagagctgtcatatgtgaatgttttacagtcttttcaaacttaacatttaatgtgtgtcactcagtgctctagtcgatcaggactgggtagctatttcgcatatatgtaaaatgttctcagccgggcacggtggctcacgcctgtaaccccagcactttgggaggctgaggcgggcggatcacgaggtcaggagattgagaccatcctggctaacacggtgaaacccagtctctactaaaaatacaaaaattagcccggcgtggtggcatgcgcctgtagtcccagctacttgggaggctgaagcaggagaattgcctgaacccaggaagaggaggttgcagtgagccgagatcgcaccactgcattccagcctgggcaacagagcgagactccatctcaaaaaaaaaaaaaaaa

SEQ ID NO: 127110 - DNA, 873 bp, Homo sapiens
  Payload ID: 4904
  Gene Symbol: DIS3L
  Gene Name: DIS3 like exosome 3'-5' exoribonuclease
  ENST ID: ENST00000525109
  CDS Start-End: 423-873
cagggccgcacgctgcggatcgtgcgcgagcactacctgcggccctgcgtgccctgccacagcccgctctgcccgcagcccgccgcctgcagccacgatgggaaactcttgtctagtgatgtgactcattacgtgatcccagactggaaagttgttcaagattatcttgagatccttgagtttcctgagttgaagggaattattttcatgcagacagcttgtcaagctgtgcagcatcaaagaggcaggagcaagagatagcagtggatgagtacctgctttgttagagttatttttctcctccgtgtcacagacagtataacaaactgcgaaacctgctgaaggatgcgcgtcatgattgcattctctttgctaatgaattccagcaatgctgctatctgccacgggaaagaggagagtccatggagaagtggcagaccaggagcatatacaacgcagctgtttggtactatcatcactgccaggacaggatgccaattgttatggtgacagaagatgaagaggcaattcagcagtatggaagtgaaacagaaggagtattcgtgattactttcaagaattacctggacaatttctggcctgatttaaaagctgcccacgagctttgtgattctatccttcagtctcgacgggagagagagaatgagagtcaggagagccatgggaaggagtacccagaacatcttcccctggaagtgttagaagctgggattaaatctggacgctatatccagggaattctgaatgtcaacaaacacagagcccaaatagaagcttttgttcgacttcaaggagccagcagtaaagattcagatttagtcagtgacatcctaatccacgggatgaaggctc

SEQ ID NO: 127111 - DNA, 3260 bp, Homo sapiens
  Payload ID: 4904
  Gene Symbol: DIS3L
  Gene Name: DIS3 like exosome 3'-5' exoribonuclease
  ENST ID: ENST00000530537
  CDS Start-End: 2-169
catgcagacagcttgtcaagctgtgcagcatcaaagaggcaggagcaatgctgctatctgccacgggaaagaggagagtccatggagaagtggcagaccaggagcatatacaacgcagctgtttggtactatcatcactgccaggacaggatgccaattgttatggtgacagaagatgaagaggcaattcagcagtatggaagtgaaacagaaggagtattcgtgattactttcaagaattacctggacaatttctggcctgatttaaaagctgcccacgagctttgtgattctatccttcagtctcgacgggagagagagaatgagagtcaggagagccatgggaaggagtacccagaacatcttcccctggaagtgttagaagctgggattaaatctggacgctatatccagggaattctgaatgtcaacaaacacagagcccaaatagaagcttttgttcgacttcaaggagccagcagtaaagattcagatttagtcagtgacatcctaatccacgggatgaaggctcgaaaccgctcaattcatggagatgtggtagttgtggagctgcttcctaaaaatgaatggaaaggaagaaccgtagccctgtgtgagaatgactgtgacgacaaggcttcgggcgagtccccaagtgagcccatgcctacaggtcgagtggtgggcatacttcagaagaactggcgggattatgtggtgacatttccgtccaaagaagaggtccaatctcagggcaaaaatgctcagaaaatcctggttacaccttgggattacagaattcccaaaattcgaattagcactcagcaagcagaaaccctccaggacttcagggtggtcgtgcgcatcgattcctgggagtcaacatctgtgtatccaaatggacattttgtgcgtgttttaggaagaatcggagatctggaaggggaaattgcaaccatcctggtggaaaacagtatttcagttattcctttctcagaagctcagatgtgtgagatgccagtaaacacaccagaaagtccctggaaggtgagtcctgaagaggaacaaaaacgtaaagacttgaggaaaagccatctcgtattcagcattgaccccaaaggttgtgaagatgtggatgacacactctcagtcagaaccttaaataatggcaacctggaacttggggtccacatcgcagatgtaacacactttgtggcaccaaattcttacattgatattgaagctagaacaagggccaccacttattatctagcagatcgtcgctatgacatgctgccttccgtcctcagtgcagatttgtgttcccttctgggaggcgttgataggtatgctgtaagcatcatgtgggaactggataaagcctcttatgaaattaagaaagtgtggtatggcagaaccattattcgatcagcatacaaactgttctatgaagcagcccaagaactactggatggaaacttaagcgttgttgatgatattccagaattcaaagacttggatgagaagagcagacaagccaagctggaggagttggtgtgggcaattggaaagctgaccgacatagctcgccatgtcagagctaaacgagacggatgtggtgccctggaactggaaggggtagaggtttgcgtacagctagatgacaaaaagaacattcacgacctcatccccaagcagcccctggaagtccacgagacagtggctgaatgcatgatcctggccaaccactgggtcgccaaaaagatctgggagagcttccctcatcaggccttgctgcgccagcaccctcctccacaccaggagttcttttcagaactccgggaatgtgctaaagccaaaggcttcttcatagatacacggtccaataaaacactggctgattctctggataatgcgaacgacccccacgatcccattgtgaacaggctactgcgctccatggccacgcaggccatgtcgaatgctctgtacttctccaccggatcctgtgcggaggaggagttccatcattacggtcttgcattagataaatatacccactttacttctccaataagaagatattcagatattgtagtacaccgcttgttaatggcagccatttcaaaagataagaaaatggaaattaagggaaatctgttcagcaacaaagatcttgaggaattatgcagacatatcaacaacagaaaccaagcagcacagcattctcagaagcagtctactgagctcttccagtgcatgtacttcaaagacaaagaccctgccaccgaggagcgttgcatatctgacggagttatttattcaattagaacaaatggtgtgcttctatttataccaaggtttgggattaaaggtgctgcttatctaaaaaataaagatggtttagtcatctcatgtggcccagatagctgttctgaatggaaaccaggatcccttcaacgatttcaaaacaaaattacctctactacaacagatggggaatctgttacgttccatttgtttgaccatgtaaccgtaagaatatccatacaggcctcacgttgccattctgatacaatcagacttgaaataattagtaacaaaccatacaagataccaaatacagaacttattcatcagagttcccccttgctgaagagtgagttagtgaaagaagtaactaaatctgtggaagaagctcagcttgcccaagaagtcaaagtaaacatcattcaggaggaatatcaagaatatcgccaaacaaagggaaggagcctatacacacttctagaggagatacgggacctagctctcctggatgtttcaaacaattatggaatatgagaggctcttacttcactaagagctgtcatatgtgaatgttttacagtcttttcaaacttaacatttaatgtgtgtcactcagtgctctagtcgatcaggactgggtagctatttcgcatatatgtaaaatgttctcagccgggcacggtggctcacgcctgtaaccccagcactttgggaggctgaggcgggcggatcacgaggtcaggagattgagaccatcctggctaacacggtgaaacccagtctctactaaaaatacaaaaattagcccggcgtggtggcatgcgcctgtagtcccagctacttgggaggctgaagcaggagaattgcctgaacccaggaagaggaggttgcagtgagccgagatcgcaccactgcattccagcctgggcaacagagcgagactccatctc

SEQ ID NO: 127112 - DNA, 1504 bp, Homo sapiens
  Payload ID: 4904
  Gene Symbol: DIS3L
  Gene Name: DIS3 like exosome 3'-5' exoribonuclease
  ENST ID: ENST00000524795
  CDS Start-End: 172-339
gcgcccagcccttcttcacctgccgtccaggtatcatcctagtcttccctccgtctctgggatgggaaactcttgtctagtgatgtgactcattacgtgatcccagactggaaagttgttcaagattatcttgagatccttgagtttcctgagttgaagggaattattttcatgcagacagcttgtcaagctgtgcagcatcaaagaggcaggagcaatgctgctatctgccacgggaaagaggagagtccatggagaagtggcagaccaggagcatatacaacgcagctgtttggtactatcatcactgccaggacaggatgccaattgttatggtgacagaagatgaagaggcaattcagcagtatggaagtgaaacagaaggagtattcgtgattactttcaagaattacctggacaatttctggcctgatttaaaagctgcccacgagctttgtgattctatccttcagtctcgacgggagagagagaatgagagtcaggagagccatgggaaggagtacccagaacatcttcccctggaagtgttagaagctgggattaaatctggacgctatatccagggaattctgaatgtcaacaaacacagagcccaaatagaagcttttgttcgacttcaaggagccagcagtaaagattcagatttagtcagtgacatcctaatccacgggatgaaggctcgaaaccgctcaattcatggagatgtggtagttgtggagctgcttcctaaaaatgaatggaaaggaagaaccgtagccctgtgtgagaatgactgtgacgacaaggcttcgggcgagtccccaagtgagcccatgcctacaggacttcagggtggtcgtgcgcatcgattcctgggagtcaacatctgtgtatccaaatggacattttgtgcgtgttttaggaagaatcggagatctggaaggggaaattgcaaccatcctggtggaaaacagtatttcagttattcctttctcagaagctcagatgtgtgagatgccagtaaacacaccagaaagtccctggaaggtgagtcctgaagaggaacaaaaacgtaaagacttgaggaaaagccatctcgtattcagcattgaccccaaaggttgtgaagatgtggatgacacactctcagtcagaaccttaaataatggcaacctggaacttggggtccacatcgcagatgtaacacactttgtggcaccaaattcttacattgatattgaagctagaacaagggccaccacttattatctagcagatcgtcgctatgacatgctgccttccgtcctcagtgcagatttgtgttcccttctgggaggcgttgataggtatgctgtaagcatcatgtgggaactggataaagcctcttatgaaattaagaaagtgtggtatggcagaaccattattcgatcagcatacaaactgttctatgaagcagcccaagaactactggatggaaacttaagcgttgttgatgatattccag

SEQ ID NO: 127113 - DNA, 327 bp, Homo sapiens
  Payload ID: 4904
  Gene Symbol: DIS3L
  Gene Name: DIS3 like exosome 3'-5' exoribonuclease
  ENST ID: ENST00000525134
  CDS Start-End: 157-327
ctaatcttggacagctgcgcccagcccttcttcacctgccgtccagatgggaaactcttgtctagtgatgtgactcattacgtgatcccagactggaaagttgttcaagattatcttgagatccttgagtttcctgagttgaagggaattattttcatgcagacagcttgtcaagctgtgcagcatcaaagaggcaggagacagtataacaaactgcgaaacctgctgaaggatgcgcgtcatgattgcattctctttgctaatgaattccagcaatgctgctatctgccacgggaaagaggagagtccatggagaagtggcagacc

SEQ ID NO: 127114 - DNA, 792 bp, Homo sapiens
  Payload ID: 4904
  Gene Symbol: DIS3L
  Gene Name: DIS3 like exosome 3'-5' exoribonuclease
  ENST ID: ENST00000530615
  CDS Start-End: 501-792
tcccgccgcaacctcgcgccgtggagaaatggggaggtcccgagctgggagcccccgggagctacaggccagctgctgccgctgcgaagctgacatcgcctgctttgcagccacaggtttcctgacctgcccgcactgttgccccagacttttcccccagtggagagccacttcaccgtagatttgtgaactctctgggcccgcactggagcggaaggtcacggggaagttggactggggactcctgggccccagtccttggtttctaggccacaagggtggccgatagaacgatgcacgttactggctctcttcccccatgggaggatgagaatgggctgggggtccttgtcagcgaatgtgtggaatcctccaaacattgtgattaagatgggaaactcttgtctagtgatgtgactcattacgtgatcccagactggaaagttgttcaagattatcttgagatccttgagtttcctgagttgaagggaattattttcatgcagacagcttgtcaagctgtgcagcatcaaagaggcaggagacagtataacaaactgcgaaacctgctgaaggatgcgcgtcatgattgcattctctttgctaatgaattccagcaatgctgctatctgccacgggaaagaggagagtccatggagaagtggcagaccaggagcatatacaacgcagctgtttggtactatcatcactgccaggacaggatgccaattgttatggtgacagaagatgaagaggcaattcagcagtatggaagtgaaacagaaggagtat

SEQ ID NO: 127115 - DNA, 504 bp, Homo sapiens
  Payload ID: 4904
  Gene Symbol: DIS3L
  Gene Name: DIS3 like exosome 3'-5' exoribonuclease
  ENST ID: ENST00000532580
  CDS Start-End: 196-504
gacacggaggcgtaggccccgcggcctgcgcccgctcgccggcctcaccccccggctctctgccggtggggacccagcggcccggatgggaaactcttgtctagtgatgtgactcattacgtgatcccagactggaaagttgttcaagattatcttgagatccttgagtttcctgagttgaagggaattattttcatgcagacagcttgtcaagctgtgcagcatcaaagaggcaggagacagtataacaaactgcgaaacctgctgaaggatgcgcgtcatgattgcattctctttgctaatgaattccagcaatgctgctatctgccacgggaaagaggagagtccatggagaagtggcagaccaggagcatatacaacgcagctgtttggtactatcatcactgccaggacaggatgccaattgttatggtgacagaagatgaagaggcaattcagcagtatggaagtgaaacagaaggagtattcgtgattactttcaag

SEQ ID NO: 127116 - DNA, 3845 bp, Homo sapiens
  Payload ID: 4905
  Gene Symbol: DDR1
  Gene Name: discoidin domain receptor tyrosine kinase 1
  Uniprot ID: Q08345
  ENST ID: ENST00000259875
  CDS Start-End: 355-2985
gatcccagaagtaggaggggcgtcttcccctcgtgggccctgagcgggactgcagccagccccctggggagccagctttggaggcccccgacagctgctctcgggagccgcctcccgacacccgagccccgccggcgcctcccgctcccggctcccggctcctggctccctccgcctcccccgcccctcgccccgccgccgaagaggccccgctcccgggtcggacgcctgggtctgccgggaagagcgatgagaggtgtctgaaggtggctattcactgagcgatggggttggacttgaaggaatgccaagagatgctgcccccacccccttaggcccgagggatcaggagctatgggaccagaggccctgtcatctttactgctgctgctcttggtggcaagtggagatgctgacatgaagggacattttgatcctgccaagtgccgctatgccctgggcatgcaggaccggaccatcccagacagtgacatctctgcttccagctcctggtcagattccactgccgcccgccacagcaggttggagagcagtgacggggatggggcctggtgccccgcagggtcggtgtttcccaaggaggaggagtacttgcaggtggatctacaacgactgcacctggtggctctggtgggcacccagggacggcatgccgggggcctgggcaaggagttctcccggagctaccggctgcgttactcccgggatggtcgccgctggatgggctggaaggaccgctggggtcaggaggtgatctcaggcaatgaggaccctgagggagtggtgctgaaggaccttgggccccccatggttgcccgactggttcgcttctacccccgggctgaccgggtcatgagcgtctgtctgcgggtagagctctatggctgcctctggagggatggactcctgtcttacaccgcccctgtggggcagacaatgtatttatctgaggccgtgtacctcaacgactccacctatgacggacataccgtgggcggactgcagtatgggggtctgggccagctggcagatggtgtggtggggctggatgactttaggaagagtcaggagctgcgggtctggccaggctatgactatgtgggatggagcaaccacagcttctccagtggctatgtggagatggagtttgagtttgaccggctgagggccttccaggctatgcaggtccactgtaacaacatgcacacgctgggagcccgtctgcctggcggggtggaatgtcgcttccggcgtggccctgccatggcctgggagggggagcccatgcgccacaacctagggggcaacctgggggaccccagagcccgggctgtctcagtgccccttggcggccgtgtggctcgctttctgcagtgccgcttcctctttgcggggccctggttactcttcagcgaaatctccttcatctctgatgtggtgaacaattcctctccggcactgggaggcaccttcccgccagccccctggtggccgcctggcccacctcccaccaacttcagcagcttggagctggagcccagaggccagcagcccgtggccaaggccgaggggagcccgaccgccatcctcatcggctgcctggtggccatcatcctgctcctgctgctcatcattgccctcatgctctggcggctgcactggcgcaggctcctcagcaaggctgaacggagggtgttggaagaggagctgacggttcacctctctgtccctggggacactatcctcatcaacaaccgcccaggtcctagagagccacccccgtaccaggagccccggcctcgtgggaatccgccccactctgctccctgtgtccccaatggctctgcctacagtggggactatatggagcctgagaagccaggcgccccgcttctgcccccacctccccagaacagcgtcccccattatgccgaggctgacattgttaccctgcagggcgtcaccgggggcaacacctatgctgtgcctgcactgcccccaggggcagtcggggatgggccccccagagtggatttccctcgatctcgactccgcttcaaggagaagcttggcgagggccagtttggggaggtgcacctgtgtgaggtcgacagccctcaagatctggtcagtcttgatttcccccttaatgtgcgtaagggacaccctttgctggtagctgtcaagatcttacggccagatgccaccaagaatgccaggaatgatttcctgaaagaggtgaagatcatgtcgaggctcaaggacccaaacatcattcggctgctgggcgtgtgtgtgcaggacgaccccctctgcatgattactgactacatggagaacggcgacctcaaccagttcctcagtgcccaccagctggaggacaaggcagccgagggggcccctggggacgggcaggctgcgcaggggcccaccatcagctacccaatgctgctgcatgtggcagcccagatcgcctccggcatgcgctatctggccacactcaactttgtacatcgggacctggccacgcggaactgcctagttggggaaaatttcaccatcaaaatcgcagactttggcatgagccggaacctctatgctggggactattaccgtgtgcagggccgggcagtgctgcccatccgctggatggcctgggagtgcatcctcatggggaagttcacgactgcgagtgacgtgtgggcctttggtgtgaccctgtgggaggtgctgatgctctgtagggcccagccctttgggcagctcaccgacgagcaggtcatcgagaacgcgggggagttcttccgggaccagggccggcaggtgtacctgtcccggccgcctgcctgcccgcagggcctatatgagctgatgcttcggtgctggagccgggagtctgagcagcgaccacccttttcccagctgcatcggttcctggcagaggatgcactcaacacggtgtgaatcacacatccagctgcccctccctcagggagcgatccaggggaagccagtgacactaaaacaagaggacacaatggcacctctgcccttcccctcccgacagcccatcacctctaatagaggcagtgagactgcaggtgggctgggcccacccagggagctgatgccccttctccccttcctggacacactctcatgtccccttcctgttcttccttcctagaagcccctgtcgcccacccagctggtcctgtggatgggatcctctccaccctcctctagccatcccttggggaagggtggggagaaatataggatagacactggacatggcccattggagcacctgggccccactggacaacactgattcctggagaggtggctgcgcccccagcttctctctccctgtcacacactggaccccactggctgagaatctgggggtgaggaagacaagaaggagaggaaaatgtttccttgtgcctgctcctgtacttgtcctcagcttgggcttcttcctcctccatcacctgaaacactggacctgggggtagccccgccccagccctcagtcacccccacttcccacttgcagtcttgtagctagaacttctctaagcctatacgtttctgtggagtaaatattgggattggggggaaagagggagcaacggcccatagccttggggttggacatctctagtgtagctgccacattgatttttctataatcacttggggtttgtacatttttggggggagagacacagatttttacactaatatatggacctagcttgaggcaattttaatcccctgcactaggcaggtaataataaaggttgagttttccacaa

SEQ ID NO: 127117 - DNA, 4148 bp, Homo sapiens
  Payload ID: 4905
  Gene Symbol: DDR1
  Gene Name: discoidin domain receptor tyrosine kinase 1
  Uniprot ID: Q08345
  ENST ID: ENST00000324771
  CDS Start-End: 549-3290
cctttggttctgtttcacagttctcagcctcccctccctttctccacagccaggctgctcagtccctctctgcgggggcctagaggctcggtgaggggagcgggacttggttgccatggtcacattgaagccagccgcagctggcccgggcagctgctcctcctgggcccggggccccggacgctcggacaaagccaggcagcgttggcagccccagacccgaccccaaaggcctgagactggggtgactgggacctaagagaatcctgagctggaggcccccgacagctgctctcgggagccgcctcccgacacccgagccccgccggcgcctcccgctcccggctcccggctcctggctccctccgcctcccccgcccctcgccccgccgccgaagaggccccgctcccgggtcggacgcctgggtctgccgggaagagcgatgagaggtgtctgaaggtggctattcactgagcgatggggttggacttgaaggaatgccaagagatgctgcccccacccccttaggcccgagggatcaggagctatgggaccagaggccctgtcatctttactgctgctgctcttggtggcaagtggagatgctgacatgaagggacattttgatcctgccaagtgccgctatgccctgggcatgcaggaccggaccatcccagacagtgacatctctgcttccagctcctggtcagattccactgccgcccgccacagcaggttggagagcagtgacggggatggggcctggtgccccgcagggtcggtgtttcccaaggaggaggagtacttgcaggtggatctacaacgactgcacctggtggctctggtgggcacccagggacggcatgccgggggcctgggcaaggagttctcccggagctaccggctgcgttactcccgggatggtcgccgctggatgggctggaaggaccgctggggtcaggaggtgatctcaggcaatgaggaccctgagggagtggtgctgaaggaccttgggccccccatggttgcccgactggttcgcttctacccccgggctgaccgggtcatgagcgtctgtctgcgggtagagctctatggctgcctctggagggatggactcctgtcttacaccgcccctgtggggcagacaatgtatttatctgaggccgtgtacctcaacgactccacctatgacggacataccgtgggcggactgcagtatgggggtctgggccagctggcagatggtgtggtggggctggatgactttaggaagagtcaggagctgcgggtctggccaggctatgactatgtgggatggagcaaccacagcttctccagtggctatgtggagatggagtttgagtttgaccggctgagggccttccaggctatgcaggtccactgtaacaacatgcacacgctgggagcccgtctgcctggcggggtggaatgtcgcttccggcgtggccctgccatggcctgggagggggagcccatgcgccacaacctagggggcaacctgggggaccccagagcccgggctgtctcagtgccccttggcggccgtgtggctcgctttctgcagtgccgcttcctctttgcggggccctggttactcttcagcgaaatctccttcatctctgatgtggtgaacaattcctctccggcactgggaggcaccttcccgccagccccctggtggccgcctggcccacctcccaccaacttcagcagcttggagctggagcccagaggccagcagcccgtggccaaggccgaggggagcccgaccgccatcctcatcggctgcctggtggccatcatcctgctcctgctgctcatcattgccctcatgctctggcggctgcactggcgcaggctcctcagcaaggctgaacggagggtgttggaagaggagctgacggttcacctctctgtccctggggacactatcctcatcaacaaccgcccaggtcctagagagccacccccgtaccaggagccccggcctcgtgggaatccgccccactccgctccctgtgtccccaatggctctgcgttgctgctctccaatccagcctaccgcctccttctggccacttacgcccgtccccctcgaggcccgggcccccccacacccgcctgggccaaacccaccaacacccaggcctacagtggggactatatggagcctgagaagccaggcgccccgcttctgcccccacctccccagaacagcgtcccccattatgccgaggctgacattgttaccctgcagggcgtcaccgggggcaacacctatgctgtgcctgcactgcccccaggggcagtcggggatgggccccccagagtggatttccctcgatctcgactccgcttcaaggagaagcttggcgagggccagtttggggaggtgcacctgtgtgaggtcgacagccctcaagatctggttagtcttgatttcccccttaatgtgcgtaagggacaccctttgctggtagctgtcaagatcttacggccagatgccaccaagaatgccaggaatgatttcctgaaagaggtgaagatcatgtcgaggctcaaggacccaaacatcattcggctgctgggcgtgtgtgtgcaggacgaccccctctgcatgattactgactacatggagaacggcgacctcaaccagttcctcagtgcccaccagctggaggacaaggcagccgagggggcccctggggacgggcaggctgcgcaggggcccaccatcagctacccaatgctgctgcatgtggcagcccagatcgcctccggcatgcgctatctggccacactcaactttgtacatcgggacctggccacgcggaactgcctagttggggaaaatttcaccatcaaaatcgcagactttggcatgagccggaacctctatgctggggactattaccgtgtgcagggccgggcagtgctgcccatccgctggatggcctgggagtgcatcctcatggggaagttcacgactgcgagtgacgtgtgggcctttggtgtgaccctgtgggaggtgctgatgctctgtagggcccagccctttgggcagctcaccgacgagcaggtcatcgagaacgcgggggagttcttccgggaccagggccggcaggtgtacctgtcccggccgcctgcctgcccgcagggcctatatgagctgatgcttcggtgctggagccgggagtctgagcagcgaccacccttttcccagctgcatcggttcctggcagaggatgcactcaacacggtgtgaatcacacatccagctgcccctccctcagggagcgatccaggggaagccagtgacactaaaacaagaggacacaatggcacctctgcccttcccctcccgacagcccatcacctctaatagaggcagtgagactgcaggtgggctgggcccacccagggagctgatgccccttctccccttcctggacacactctcatgtccccttcctgttcttccttcctagaagcccctgtcgcccacccagctggtcctgtggatgggatcctctccaccctcctctagccatcccttggggaagggtggggagaaatataggatagacactggacatggcccattggagcacctgggccccactggacaacactgattcctggagaggtggctgcgcccccagcttctctctccctgtcacacactggaccccactggctgagaatctgggggtgaggaggacaagaaggagaggaaaatgtttccttgtgcctgctcctgtacttgtcctcagcttgggcttcttcctcctccatcacctgaaacactggacctgggggtagccccgccccagccctcagtcacccccacttcccacttgcagtcttgtagctagaacttctctaagcctatacgtttctgtggagtaaatattgggattggggggaaagagggagcaacggcccatagccttggggttggacatctctagtgtagctgccacattgatttttctataatcacttggggtttgtacatttttggggggagagacacagatttttacactaatatatggacctagcttgaggcaattttaatcccctgcactaggcaggtaataataaaggttgagttttccac

SEQ ID NO: 127118 - DNA, 3832 bp, Homo sapiens
  Payload ID: 4905
  Gene Symbol: DDR1
  Gene Name: discoidin domain receptor tyrosine kinase 1
  Uniprot ID: Q08345
  ENST ID: ENST00000376567
  CDS Start-End: 342-2972
ggctttaggaagttatttaactgatctctgccctagtttcttcatgtgttaaatatggatagtaatagtatctaccttatgaagtgactgtgaagataaaattatggattctgtttaagggtttaggccagtgtctggcacaggggaagcattctaaaaatatagctgatgctgttaaacaatgactgttgttgttgttttactgttattatccccaaagcggcccattctgtctgttgctgtcagctatgactcagtcccctgattaacttacgcaccacccattttatcccctgcagagatgctgcccccacccccttaggcccgagggatcaggagctatgggaccagaggccctgtcatctttactgctgctgctcttggtggcaagtggagatgctgacatgaagggacattttgatcctgccaagtgccgctatgccctgggcatgcaggaccggaccatcccagacagtgacatctctgcttccagctcctggtcagattccactgccgcccgccacagcaggttggagagcagtgacggggatggggcctggtgccccgcagggtcggtgtttcccaaggaggaggagtacttgcaggtggatctacaacgactgcacctggtggctctggtgggcacccagggacggcatgccgggggcctgggcaaggagttctcccggagctaccggctgcgttactcccgggatggtcgccgctggatgggctggaaggaccgctggggtcaggaggtgatctcaggcaatgaggaccctgagggagtggtgctgaaggaccttgggccccccatggttgcccgactggttcgcttctacccccgggctgaccgggtcatgagcgtctgtctgcgggtagagctctatggctgcctctggagggatggactcctgtcttacaccgcccctgtggggcagacaatgtatttatctgaggccgtgtacctcaacgactccacctatgacggacataccgtgggcggactgcagtatgggggtctgggccagctggcagatggtgtggtggggctggatgactttaggaagagtcaggagctgcgggtctggccaggctatgactatgtgggatggagcaaccacagcttctccagtggctatgtggagatggagtttgagtttgaccggctgagggccttccaggctatgcaggtccactgtaacaacatgcacacgctgggagcccgtctgcctggcggggtggaatgtcgcttccggcgtggccctgccatggcctgggagggggagcccatgcgccacaacctagggggcaacctgggggaccccagagcccgggctgtctcagtgccccttggcggccgtgtggctcgctttctgcagtgccgcttcctctttgcggggccctggttactcttcagcgaaatctccttcatctctgatgtggtgaacaattcctctccggcactgggaggcaccttcccgccagccccctggtggccgcctggcccacctcccaccaacttcagcagcttggagctggagcccagaggccagcagcccgtggccaaggccgaggggagcccgaccgccatcctcatcggctgcctggtggccatcatcctgctcctgctgctcatcattgccctcatgctctggcggctgcactggcgcaggctcctcagcaaggctgaacggagggtgttggaagaggagctgacggttcacctctctgtccctggggacactatcctcatcaacaaccgcccaggtcctagagagccacccccgtaccaggagccccggcctcgtgggaatccgccccactccgctccctgtgtccccaatggctctgcctacagtggggactatatggagcctgagaagccaggcgccccgcttctgcccccacctccccagaacagcgtcccccattatgccgaggctgacattgttaccctgcagggcgtcaccgggggcaacacctatgctgtgcctgcactgcccccaggggcagtcggggatgggccccccagagtggatttccctcgatctcgactccgcttcaaggagaagcttggcgagggccagtttggggaggtgcacctgtgtgaggtcgacagccctcaagatctggttagtcttgatttcccccttaatgtgcgtaagggacaccctttgctggtagctgtcaagatcttacggccagatgccaccaagaatgccaggaatgatttcctgaaagaggtgaagatcatgtcgaggctcaaggacccaaacatcattcggctgctgggcgtgtgtgtgcaggacgaccccctctgcatgattactgactacatggagaacggcgacctcaaccagttcctcagtgcccaccagctggaggacaaggcagccgagggggcccctggggacgggcaggctgcgcaggggcccaccatcagctacccaatgctgctgcatgtggcagcccagatcgcctccggcatgcgctatctggccacactcaactttgtacatcgggacctggccacgcggaactgcctagttggggaaaatttcaccatcaaaatcgcagactttggcatgagccggaacctctatgctggggactattaccgtgtgcagggccgggcagtgctgcccatccgctggatggcctgggagtgcatcctcatggggaagttcacgactgcgagtgacgtgtgggcctttggtgtgaccctgtgggaggtgctgatgctctgtagggcccagccctttgggcagctcaccgacgagcaggtcatcgagaacgcgggggagttcttccgggaccagggccggcaggtgtacctgtcccggccgcctgcctgcccgcagggcctatatgagctgatgcttcggtgctggagccgggagtctgagcagcgaccacccttttcccagctgcatcggttcctggcagaggatgcactcaacacggtgtgaatcacacatccagctgcccctccctcagggagcgatccaggggaagccagtgacactaaaacaagaggacacaatggcacctctgcccttcccctcccgacagcccatcacctctaatagaggcagtgagactgcaggtgggctgggcccacccagggagctgatgccccttctccccttcctggacacactctcatgtccccttcctgttcttccttcctagaagcccctgtcgcccacccagctggtcctgtggatgggatcctctccaccctcctctagccatcccttggggaagggtggggagaaatataggatagacactggacatggcccattggagcacctgggccccactggacaacactgattcctggagaggtggctgcgcccccagcttctctctccctgtcacacactggaccccactggctgagaatctgggggtgaggaggacaagaaggagaggaaaatgtttccttgtgcctgctcctgtacttgtcctcagcttgggcttcttcctcctccatcacctgaaacactggacctgggggtagccccgccccagccctcagtcacccccacttcccacttgcagtcttgtagctagaacttctctaagcctatacgtttctgtggagtaaatattgggattggggggaaagagggagcaacggcccatagccttggggttggacatctctagtgtagctgccacattgatttttctataatcacttggggtttgtacatttttggggggagagacacagatttttacactaatatatggacctagcttgaggcaattttaatcccctgcactaggcaggtaataataaaggttgagttttccacaa

SEQ ID NO: 127119 - DNA, 3894 bp, Homo sapiens
  Payload ID: 4905
  Gene Symbol: DDR1
  Gene Name: discoidin domain receptor tyrosine kinase 1
  Uniprot ID: Q08345
  ENST ID: ENST00000376568
  CDS Start-End: 296-3037
ggaagggagggagccgaggcgagggggaggcggcgcctgggcccgagccgccccagccctggctcctctccccggaacaggcccccgacagctgctctcgggagccgcctcccgacacccgagccccgccggcgcctcccgctcccggctcccggctcctggctccctccgcctcccccgcccctcgccccgccgccgaagaggccccgctcccgggtcggacgcctgggtctgccgggaagagcgatgagagagatgctgcccccacccccttaggcccgagggatcaggagctatgggaccagaggccctgtcatctttactgctgctgctcttggtggcaagtggagatgctgacatgaagggacattttgatcctgccaagtgccgctatgccctgggcatgcaggaccggaccatcccagacagtgacatctctgcttccagctcctggtcagattccactgccgcccgccacagcaggttggagagcagtgacggggatggggcctggtgccccgcagggtcggtgtttcccaaggaggaggagtacttgcaggtggatctacaacgactgcacctggtggctctggtgggcacccagggacggcatgccgggggcctgggcaaggagttctcccggagctaccggctgcgttactcccgggatggtcgccgctggatgggctggaaggaccgctggggtcaggaggtgatctcaggcaatgaggaccctgagggagtggtgctgaaggaccttgggccccccatggttgcccgactggttcgcttctacccccgggctgaccgggtcatgagcgtctgtctgcgggtagagctctatggctgcctctggagggatggactcctgtcttacaccgcccctgtggggcagacaatgtatttatctgaggccgtgtacctcaacgactccacctatgacggacataccgtgggcggactgcagtatgggggtctgggccagctggcagatggtgtggtggggctggatgactttaggaagagtcaggagctgcgggtctggccaggctatgactatgtgggatggagcaaccacagcttctccagtggctatgtggagatggagtttgagtttgaccggctgagggccttccaggctatgcaggtccactgtaacaacatgcacacgctgggagcccgtctgcctggcggggtggaatgtcgcttccggcgtggccctgccatggcctgggagggggagcccatgcgccacaacctagggggcaacctgggggaccccagagcccgggctgtctcagtgccccttggcggccgtgtggctcgctttctgcagtgccgcttcctctttgcggggccctggttactcttcagcgaaatctccttcatctctgatgtggtgaacaattcctctccggcactgggaggcaccttcccgccagccccctggtggccgcctggcccacctcccaccaacttcagcagcttggagctggagcccagaggccagcagcccgtggccaaggccgaggggagcccgaccgccatcctcatcggctgcctggtggccatcatcctgctcctgctgctcatcattgccctcatgctctggcggctgcactggcgcaggctcctcagcaaggctgaacggagggtgttggaagaggagctgacggttcacctctctgtccctggggacactatcctcatcaacaaccgcccaggtcctagagagccacccccgtaccaggagccccggcctcgtgggaatccgccccactccgctccctgtgtccccaatggctctgcgttgctgctctccaatccagcctaccgcctccttctggccacttacgcccgtccccctcgaggcccgggcccccccacacccgcctgggccaaacccaccaacacccaggcctacagtggggactatatggagcctgagaagccaggcgccccgcttctgcccccacctccccagaacagcgtcccccattatgccgaggctgacattgttaccctgcagggcgtcaccgggggcaacacctatgctgtgcctgcactgcccccaggggcagtcggggatgggccccccagagtggatttccctcgatctcgactccgcttcaaggagaagcttggcgagggccagtttggggaggtgcacctgtgtgaggtcgacagccctcaagatctggttagtcttgatttcccccttaatgtgcgtaagggacaccctttgctggtagctgtcaagatcttacggccagatgccaccaagaatgccaggaatgatttcctgaaagaggtgaagatcatgtcgaggctcaaggacccaaacatcattcggctgctgggcgtgtgtgtgcaggacgaccccctctgcatgattactgactacatggagaacggcgacctcaaccagttcctcagtgcccaccagctggaggacaaggcagccgagggggcccctggggacgggcaggctgcgcaggggcccaccatcagctacccaatgctgctgcatgtggcagcccagatcgcctccggcatgcgctatctggccacactcaactttgtacatcgggacctggccacgcggaactgcctagttggggaaaatttcaccatcaaaatcgcagactttggcatgagccggaacctctatgctggggactattaccgtgtgcagggccgggcagtgctgcccatccgctggatggcctgggagtgcatcctcatggggaagttcacgactgcgagtgacgtgtgggcctttggtgtgaccctgtgggaggtgctgatgctctgtagggcccagccctttgggcagctcaccgacgagcaggtcatcgagaacgcgggggagttcttccgggaccagggccggcaggtgtacctgtcccggccgcctgcctgcccgcagggcctatatgagctgatgcttcggtgctggagccgggagtctgagcagcgaccacccttttcccagctgcatcggttcctggcagaggatgcactcaacacggtgtgaatcacacatccagctgcccctccctcagggagcgatccaggggaagccagtgacactaaaacaagaggacacaatggcacctctgcccttcccctcccgacagcccatcacctctaatagaggcagtgagactgcaggtgggctgggcccacccagggagctgatgccccttctccccttcctggacacactctcatgtccccttcctgttcttccttcctagaagcccctgtcgcccacccagctggtcctgtggatgggatcctctccaccctcctctagccatcccttggggaagggtggggagaaatataggatagacactggacatggcccattggagcacctgggccccactggacaacactgattcctggagaggtggctgcgcccccagcttctctctccctgtcacacactggaccccactggctgagaatctgggggtgaggaggacaagaaggagaggaaaatgtttccttgtgcctgctcctgtacttgtcctcagcttgggcttcttcctcctccatcacctgaaacactggacctgggggtagccccgccccagccctcagtcacccccacttcccacttgcagtcttgtagctagaacttctctaagcctatacgtttctgtggagtaaatattgggattggggggaaagagggagcaacggcccatagccttggggttggacatctctagtgtagctgccacattgatttttctataatcacttggggtttgtacatttttggggggagagacacagatttttacactaatatatggacctagcttgaggcaattttaatcccctgcactaggcaggtaataataaaggttgagttttcca

SEQ ID NO: 127120 - DNA, 3783 bp, Homo sapiens
  Payload ID: 4905
  Gene Symbol: DDR1
  Gene Name: discoidin domain receptor tyrosine kinase 1
  Uniprot ID: Q08345
  ENST ID: ENST00000376569
  CDS Start-End: 293-2923
agaagtaggaggggcgtcttcccctcgtgggccctgagcgggactgcagccagccccctggggcgccagctttggaggcccccgacagctgctctcgggagccgcctcccgacacccgagccccgccggcgcctcccgctcccggctcccggctcctggctccctccgcctcccccgcccctcgccccgccgccgaagaggccccgctcccgggtcggacgcctgggtctgccgggaagagcgatgagagagatgctgcccccacccccttaggcccgagggatcaggagctatgggaccagaggccctgtcatctttactgctgctgctcttggtggcaagtggagatgctgacatgaagggacattttgatcctgccaagtgccgctatgccctgggcatgcaggaccggaccatcccagacagtgacatctctgcttccagctcctggtcagattccactgccgcccgccacagcaggttggagagcagtgacggggatggggcctggtgccccgcagggtcggtgtttcccaaggaggaggagtacttgcaggtggatctacaacgactgcacctggtggctctggtgggcacccagggacggcatgccgggggcctgggcaaggagttctcccggagctaccggctgcgttactcccgggatggtcgccgctggatgggctggaaggaccgctggggtcaggaggtgatctcaggcaatgaggaccctgagggagtggtgctgaaggaccttgggccccccatggttgcccgactggttcgcttctacccccgggctgaccgggtcatgagcgtctgtctgcgggtagagctctatggctgcctctggagggatggactcctgtcttacaccgcccctgtggggcagacaatgtatttatctgaggccgtgtacctcaacgactccacctatgacggacataccgtgggcggactgcagtatgggggtctgggccagctggcagatggtgtggtggggctggatgactttaggaagagtcaggagctgcgggtctggccaggctatgactatgtgggatggagcaaccacagcttctccagtggctatgtggagatggagtttgagtttgaccggctgagggccttccaggctatgcaggtccactgtaacaacatgcacacgctgggagcccgtctgcctggcggggtggaatgtcgcttccggcgtggccctgccatggcctgggagggggagcccatgcgccacaacctagggggcaacctgggggaccccagagcccgggctgtctcagtgccccttggcggccgtgtggctcgctttctgcagtgccgcttcctctttgcggggccctggttactcttcagcgaaatctccttcatctctgatgtggtgaacaattcctctccggcactgggaggcaccttcccgccagccccctggtggccgcctggcccacctcccaccaacttcagcagcttggagctggagcccagaggccagcagcccgtggccaaggccgaggggagcccgaccgccatcctcatcggctgcctggtggccatcatcctgctcctgctgctcatcattgccctcatgctctggcggctgcactggcgcaggctcctcagcaaggctgaacggagggtgttggaagaggagctgacggttcacctctctgtccctggggacactatcctcatcaacaaccgcccaggtcctagagagccacccccgtaccaggagccccggcctcgtgggaatccgccccactccgctccctgtgtccccaatggctctgcctacagtggggactatatggagcctgagaagccaggcgccccgcttctgcccccacctccccagaacagcgtcccccattatgccgaggctgacattgttaccctgcagggcgtcaccgggggcaacacctatgctgtgcctgcactgcccccaggggcagtcggggatgggccccccagagtggatttccctcgatctcgactccgcttcaaggagaagcttggcgagggccagtttggggaggtgcacctgtgtgaggtcgacagccctcaagatctggttagtcttgatttcccccttaatgtgcgtaagggacaccctttgctggtagctgtcaagatcttacggccagatgccaccaagaatgccaggaatgatttcctgaaagaggtgaagatcatgtcgaggctcaaggacccaaacatcattcggctgctgggcgtgtgtgtgcaggacgaccccctctgcatgattactgactacatggagaacggcgacctcaaccagttcctcagtgcccaccagctggaggacaaggcagccgagggggcccctggggacgggcaggctgcgcaggggcccaccatcagctacccaatgctgctgcatgtggcagcccagatcgcctccggcatgcgctatctggccacactcaactttgtacatcgggacctggccacgcggaactgcctagttggggaaaatttcaccatcaaaatcgcagactttggcatgagccggaacctctatgctggggactattaccgtgtgcagggccgggcagtgctgcccatccgctggatggcctgggagtgcatcctcatggggaagttcacgactgcgagtgacgtgtgggcctttggtgtgaccctgtgggaggtgctgatgctctgtagggcccagccctttgggcagctcaccgacgagcaggtcatcgagaacgcgggggagttcttccgggaccagggccggcaggtgtacctgtcccggccgcctgcctgcccgcagggcctatatgagctgatgcttcggtgctggagccgggagtctgagcagcgaccacccttttcccagctgcatcggttcctggcagaggatgcactcaacacggtgtgaatcacacatccagctgcccctccctcagggagcgatccaggggaagccagtgacactaaaacaagaggacacaatggcacctctgcccttcccctcccgacagcccatcacctctaatagaggcagtgagactgcaggtgggctgggcccacccagggagctgatgccccttctccccttcctggacacactctcatgtccccttcctgttcttccttcctagaagcccctgtcgcccacccagctggtcctgtggatgggatcctctccaccctcctctagccatcccttggggaagggtggggagaaatataggatagacactggacatggcccattggagcacctgggccccactggacaacactgattcctggagaggtggctgcgcccccagcttctctctccctgtcacacactggaccccactggctgagaatctgggggtgaggaggacaagaaggagaggaaaatgtttccttgtgcctgctcctgtacttgtcctcagcttgggcttcttcctcctccatcacctgaaacactggacctgggggtagccccgccccagccctcagtcacccccacttcccacttgcagtcttgtagctagaacttctctaagcctatacgtttctgtggagtaaatattgggattggggggaaagagggagcaacggcccatagccttggggttggacatctctagtgtagctgccacattgatttttctataatcacttggggtttgtacatttttggggggagagacacagatttttacactaatatatggacctagcttgaggcaattttaatcccctgcactaggcaggtaataataaaggttgagttttccacaa

SEQ ID NO: 127121 - DNA, 3820 bp, Homo sapiens
  Payload ID: 4905
  Gene Symbol: DDR1
  Gene Name: discoidin domain receptor tyrosine kinase 1
  Uniprot ID: Q08345
  ENST ID: ENST00000376570
  CDS Start-End: 334-2964
gtcttcccctcgtgggccctgagcgggactgcagccagccccctggggcgccagctttggaggcccccgacagctgctctcgggagccgcctcccgacacccgagccccgccggcgcctcccgctcccggctcccggctcctggctccctccgcctcccccgcccctcgccccgccgccgaagaggccccgctcccgggtcggacgcctgggtctgccgggaagagcgatgagaggtgtctgaaggtggctattcactgagcgatggggttggacttgaaggaatgccaagagatgctgcccccacccccttaggcccgagggatcaggagctatgggaccagaggccctgtcatctttactgctgctgctcttggtggcaagtggagatgctgacatgaagggacattttgatcctgccaagtgccgctatgccctgggcatgcaggaccggaccatcccagacagtgacatctctgcttccagctcctggtcagattccactgccgcccgccacagcaggttggagagcagtgacggggatggggcctggtgccccgcagggtcggtgtttcccaaggaggaggagtacttgcaggtggatctacaacgactgcacctggtggctctggtgggcacccagggacggcatgccgggggcctgggcaaggagttctcccggagctaccggctgcgttactcccgggatggtcgccgctggatgggctggaaggaccgctggggtcaggaggtgatctcaggcaatgaggaccctgagggagtggtgctgaaggaccttgggccccccatggttgcccgactggttcgcttctacccccgggctgaccgggtcatgagcgtctgtctgcgggtagagctctatggctgcctctggagggatggactcctgtcttacaccgcccctgtggggcagacaatgtatttatctgaggccgtgtacctcaacgactccacctatgacggacataccgtgggcggactgcagtatgggggtctgggccagctggcagatggtgtggtggggctggatgactttaggaagagtcaggagctgcgggtctggccaggctatgactatgtgggatggagcaaccacagcttctccagtggctatgtggagatggagtttgagtttgaccggctgagggccttccaggctatgcaggtccactgtaacaacatgcacacgctgggagcccgtctgcctggcggggtggaatgtcgcttccggcgtggccctgccatggcctgggagggggagcccatgcgccacaacctagggggcaacctgggggaccccagagcccgggctgtctcagtgccccttggcggccgtgtggctcgctttctgcagtgccgcttcctctttgcggggccctggttactcttcagcgaaatctccttcatctctgatgtggtgaacaattcctctccggcactgggaggcaccttcccgccagccccctggtggccgcctggcccacctcccaccaacttcagcagcttggagctggagcccagaggccagcagcccgtggccaaggccgaggggagcccgaccgccatcctcatcggctgcctggtggccatcatcctgctcctgctgctcatcattgccctcatgctctggcggctgcactggcgcaggctcctcagcaaggctgaacggagggtgttggaagaggagctgacggttcacctctctgtccctggggacactatcctcatcaacaaccgcccaggtcctagagagccacccccgtaccaggagccccggcctcgtgggaatccgccccactccgctccctgtgtccccaatggctctgcctacagtggggactatatggagcctgagaagccaggcgccccgcttctgcccccacctccccagaacagcgtcccccattatgccgaggctgacattgttaccctgcagggcgtcaccgggggcaacacctatgctgtgcctgcactgcccccaggggcagtcggggatgggccccccagagtggatttccctcgatctcgactccgcttcaaggagaagcttggcgagggccagtttggggaggtgcacctgtgtgaggtcgacagccctcaagatctggttagtcttgatttcccccttaatgtgcgtaagggacaccctttgctggtagctgtcaagatcttacggccagatgccaccaagaatgccaggaatgatttcctgaaagaggtgaagatcatgtcgaggctcaaggacccaaacatcattcggctgctgggcgtgtgtgtgcaggacgaccccctctgcatgattactgactacatggagaacggcgacctcaaccagttcctcagtgcccaccagctggaggacaaggcagccgagggggcccctggggacgggcaggctgcgcaggggcccaccatcagctacccaatgctgctgcatgtggcagcccagatcgcctccggcatgcgctatctggccacactcaactttgtacatcgggacctggccacgcggaactgcctagttggggaaaatttcaccatcaaaatcgcagactttggcatgagccggaacctctatgctggggactattaccgtgtgcagggccgggcagtgctgcccatccgctggatggcctgggagtgcatcctcatggggaagttcacgactgcgagtgacgtgtgggcctttggtgtgaccctgtgggaggtgctgatgctctgtagggcccagccctttgggcagctcaccgacgagcaggtcatcgagaacgcgggggagttcttccgggaccagggccggcaggtgtacctgtcccggccgcctgcctgcccgcagggcctatatgagctgatgcttcggtgctggagccgggagtctgagcagcgaccacccttttcccagctgcatcggttcctggcagaggatgcactcaacacggtgtgaatcacacatccagctgcccctccctcagggagcgatccaggggaagccagtgacactaaaacaagaggacacaatggcacctctgcccttcccctcccgacagcccatcacctctaatagaggcagtgagactgcaggtgggctgggcccacccagggagctgatgccccttctccccttcctggacacactctcatgtccccttcctgttcttccttcctagaagcccctgtcgcccacccagctggtcctgtggatgggatcctctccaccctcctctagccatcccttggggaagggtggggagaaatataggatagacactggacatggcccattggagcacctgggccccactggacaacactgattcctggagaggtggctgcgcccccagcttctctctccctgtcacacactggaccccactggctgagaatctgggggtgaggaggacaagaaggagaggaaaatgtttccttgtgcctgctcctgtacttgtcctcagcttgggcttcttcctcctccatcacctgaaacactggacctgggggtagccccgccccagccctcagtcacccccacttcccacttgcagtcttgtagctagaacttctctaagcctatacgtttctgtggagtaaatattgggattggggggaaagagggagcaacggcccatagccttggggttggacatctctagtgtagctgccacattgatttttctataatcacttggggtttgtacatttttggggggagagacacagatttttacactaatatatggacctagcttgaggcaattttaatcccctgcactaggcaggtaataataaaggttgagttttcc

SEQ ID NO: 127122 - DNA, 732 bp, Homo sapiens
  Payload ID: 4905
  Gene Symbol: DDR1
  Gene Name: discoidin domain receptor tyrosine kinase 1
  Uniprot ID: Q08345
  ENST ID: ENST00000376575
  CDS Start-End: 1-732
atgggaccagaggccctgtcatctttactgctgctgctcttggtggcaagtggagatgctgacatgaagggacattttgatcctgccaagtgccgctatgccctgggcatgcaggaccggaccatcccagacagtgacatctctgcttccagctcctggtcagattccactgccgcccgccacagcaggttggagagcagtgacggggatggggcctggtgccccgcagggtcggtgtttcccaaggaggaggagtacttgcaggtggatctacaacgactgcacctggtggctctggtgggcacccagggacggcatgccgggggcctgggcaaggagttctcccggagctaccggctgcgttactcccgggatggtcgccgctggatgggctggaaggaccgctggggtcaggaggtgatctcaggcaatgaggaccctgagggagtggtgctgaaggaccttgggccccccatggttgcccgactggttcgcttctacccccgggctgaccgggtcatgagcgtctgtctgcgggtagagctctatggctgcctctggagggactgcagtatgggggtctgggccagctggcagatggtgtggtggggctggatgactttaggaagagtcaggagctgcgggtctggccaggctatgactatgtgggatggagcaaccacagcttctccagtggctatgtggagatggagtttgagtttgaccggctga

SEQ ID NO: 127123 - DNA, 3971 bp, Homo sapiens
  Payload ID: 4905
  Gene Symbol: DDR1
  Gene Name: discoidin domain receptor tyrosine kinase 1
  Uniprot ID: Q08345
  ENST ID: ENST00000383377
  CDS Start-End: 370-3111
gacgctcggacaaagccaggcagcgttggcagccccagacccgaccccaaaggcctgagactggggtgactgggacctaagagaatcctgagctggaggcccccgacagctgctctcgggagccgcctcccgacacccgagccccgccggcgcctcccgctcccggctcccggctcctggctccctccgcctcccccgcccctcgccccgccgccgaagaggccccgctcccgggtcggacgcctgggtctgccgggaagagcgatgagaggtgtctgaaggtggctattcactgagcgatggggttggacttgaaggaatgccaagagatgctgcccccacccccttaggcccgagggatcaggagctatgggaccagaggccctgtcatctttactgctgctgctcttggtggcaagtggagatgctgacatgaagggacattttgatcctgccaagtgccgctatgccctgggcatgcaggaccggaccatcccagacagtgacatctctgcttccagctcctggtcagattccactgccgcccgccacagcaggttggagagcagtgacggggatggggcctggtgccccgcagggtcggtgtttcccaaggaggaggagtacttgcaggtggatctacaacgactgcacctggtggctctggtgggcacccagggacggcatgccgggggcctgggcaaggagttctcccggagctaccggctgcgttactcccgggatggtcgccgctggatgggctggaaggaccgctggggtcaggaggtgatctcaggcaatgaggaccctgagggagtggtgctgaaggaccttgggccccccatggttgcccgactggttcgcttctacccccgggctgaccgggtcatgagcgtctgtctgcgggtagagctctatggctgcctctggagggatggactcctgtcttacaccgcccctgtggggcagacaatgtatttatctgaggccgtgtacctcaacgactccacctatgacggacataccgtgggcggactgcagtatgggggtctgggccagctggcagatggtgtggtggggctggatgactttaggaagagtcaggagctgcgggtctggccaggctatgactatgtgggatggagcaaccacagcttctccagtggctatgtggagatggagtttgagtttgaccggctgagggccttccaggctatgcaggtccactgtaacaacatgcacacgctgggagcccgtctgcctggcggggtggaatgtcgcttccggcgtggccctgccatggcctgggagggggagcccatgcgccacaacctagggggcaacctgggggaccccagagcccgggctgtctcagtgccccttggcggccgtgtggctcgctttctgcagtgccgcttcctctttgcggggccctggttactcttcagcgaaatctccttcatctctgatgtggtgaacaattcctctccggcactgggaggcaccttcccgccagccccctggtggccgcctggcccacctcccaccaacttcagcagcttggagctggagcccagaggccagcagcccgtggccaaggccgaggggagcccgaccgccatcctcatcggctgcctggtggccatcatcctgctcctgctgctcatcattgccctcatgctctggcggctgcactggcgcaggctcctcagcaaggctgaacggagggtgttggaagaggagctgacggttcacctctctgtccctggggacactatcctcatcaacaaccgcccaggtcctagagagccacccccgtaccaggagccccggcctcgtgggaatccgccccactctgctccctgtgtccccaatggctctgcgttgctgctctccaatccagcctaccgcctccttctggccacttacgcccgtccccctcgaggcccgggcccccccacacccgcctgggccaaacccaccaacacccaggcctacagtggggactatatggagcctgagaagccaggcgccccgcttctgcccccacctccccagaacagcgtcccccattatgccgaggctgacattgttaccctgcagggcgtcaccgggggcaacacctatgctgtgcctgcactgcccccaggggcagtcggggatgggccccccagagtggatttccctcgatctcgactccgcttcaaggagaagcttggcgagggccagtttggggaggtgcacctgtgtgaggtcgacagccctcaagatctggtcagtcttgatttcccccttaatgtgcgtaagggacaccctttgctggtagctgtcaagatcttacggccagatgccaccaagaatgccaggaatgatttcctgaaagaggtgaagatcatgtcgaggctcaaggacccaaacatcattcggctgctgggcgtgtgtgtgcaggacgaccccctctgcatgattactgactacatggagaacggcgacctcaaccagttcctcagtgcccaccagctggaggacaaggcagccgagggggcccctggggacgggcaggctgcgcaggggcccaccatcagctacccaatgctgctgcatgtggcagcccagatcgcctccggcatgcgctatctggccacactcaactttgtacatcgggacctggccacgcggaactgcctagttggggaaaatttcaccatcaaaatcgcagactttggcatgagccggaacctctatgctggggactattaccgtgtgcagggccgggcagtgctgcccatccgctggatggcctgggagtgcatcctcatggggaagttcacgactgcgagtgacgtgtgggcctttggtgtgaccctgtgggaggtgctgatgctctgtagggcccagccctttgggcagctcaccgacgagcaggtcatcgagaacgcgggggagttcttccgggaccagggccggcaggtgtacctgtcccggccgcctgcctgcccgcagggcctatatgagctgatgcttcggtgctggagccgggagtctgagcagcgaccacccttttcccagctgcatcggttcctggcagaggatgcactcaacacggtgtgaatcacacatccagctgcccctccctcagggagcgatccaggggaagccagtgacactaaaacaagaggacacaatggcacctctgcccttcccctcccgacagcccatcacctctaatagaggcagtgagactgcaggtgggctgggcccacccagggagctgatgccccttctccccttcctggacacactctcatgtccccttcctgttcttccttcctagaagcccctgtcgcccacccagctggtcctgtggatgggatcctctccaccctcctctagccatcccttggggaagggtggggagaaatataggatagacactggacatggcccattggagcacctgggccccactggacaacactgattcctggagaggtggctgcgcccccagcttctctctccctgtcacacactggaccccactggctgagaatctgggggtgaggaagacaagaaggagaggaaaatgtttccttgtgcctgctcctgtacttgtcctcagcttgggcttcttcctcctccatcacctgaaacactggacctgggggtagccccgccccagccctcagtcacccccacttcccacttgcagtcttgtagctagaacttctctaagcctatacgtttctgtggagtaaatattgggattggggggaaagagggagcaacggcccatagccttggggttggacatctctagtgtagctgccacattgatttttctataatcacttggggtttgtacatttttggggggagagacacagatttttacactaatatatggacctagcttgaggcaattttaatcccctgcactaggcaggtaataataaaggttgagttttccacaa

SEQ ID NO: 127124 - DNA, 675 bp, Homo sapiens
  Payload ID: 4905
  Gene Symbol: DDR1
  Gene Name: discoidin domain receptor tyrosine kinase 1
  ENST ID: ENST00000396342
  CDS Start-End: 233-675
ctggaggggtaggtgttctgggggaatgaatccctgggggcttggtgggacaggaaggcgggaagaagctgctcttcgagtgaccctggggctgtctgttagcaggtccctcagccgttggaacgtccttgggcttctgaactagtgcccatgtgtgcctcggcctttcccaagggccagcttcttcctgagatgctgcccccacccccttaggcccgagggatcaggagctatgggaccagaggccctgtcatctttactgctgctgctcttggtggcaagtggagatgctgacatgaagggacattttgatcctgccaagtgccgctatgccctgggcatgcaggaccggaccatcccagacagtgacatctctgcttccagctcctggtcagattccactgccgcccgccacagcaggttggagagcagtgacggggatggggcctggtgccccgcagggtcggtgtttcccaaggaggaggagtacttgcaggtggatctacaacgactgcacctggtggctctggtgggcacccagggacggcatgccgggggcctgggcaaggagttctcccggagctaccggctgcgttactcccgggatggtcgccgctggatgggctggaaggaccgctggggtcaggaggtgatctcaggcaatgaggaccctga

SEQ ID NO: 127125 - DNA, 560 bp, Homo sapiens
  Payload ID: 4905
  Gene Symbol: DDR1
  Gene Name: discoidin domain receptor tyrosine kinase 1
  ENST ID: ENST00000400407
  CDS Start-End: 118-560
cgttggaacgtccttgggcttctgaactagtgcccatgtgtgcctcggcctttcccaagggccagcttcttcctgagatgctgcccccacccccttaggcccgagggatcaggagctatgggaccagaggccctgtcatctttactgctgctgctcttggtggcaagtggagatgctgacatgaagggacattttgatcctgccaagtgccgctatgccctgggcatgcaggaccggaccatcccagacagtgacatctctgcttccagctcctggtcagattccactgccgcccgccacagcaggttggagagcagtgacggggatggggcctggtgccccgcagggtcggtgtttcccaaggaggaggagtacttgcaggtggatctacaacgactgcacctggtggctctggtgggcacccagggacggcatgccgggggcctgggcaaggagttctcccggagctaccggctgcgttactcccgggatggtcgccgctggatgggctggaaggaccgctggggtcaggaggtgatctcaggcaatgaggaccctga

SEQ ID NO: 127126 - DNA, 3832 bp, Homo sapiens
  Payload ID: 4905
  Gene Symbol: DDR1
  Gene Name: discoidin domain receptor tyrosine kinase 1
  Uniprot ID: Q08345
  ENST ID: ENST00000400410
  CDS Start-End: 342-2972
ggctttaggaagttatttaactgatctctgccctagtttcttcatgtgttaaatatggatagtaatagtatctaccttatgaagtgactgtgaagataaaattatggattctgtttaagggtttaggccagtgtctggcacaggggaagcattctaaaaatatagctgatgctgttaaacaatgactgttgttgttgttttactgttattatccccaaagcggcccattctgtctgttgctgtcagctatgactcagtcccctgattaacttacgcaccacccattttatcccctgcagagatgctgcccccacccccttaggcccgagggatcaggagctatgggaccagaggccctgtcatctttactgctgctgctcttggtggcaagtggagatgctgacatgaagggacattttgatcctgccaagtgccgctatgccctgggcatgcaggaccggaccatcccagacagtgacatctctgcttccagctcctggtcagattccactgccgcccgccacagcaggttggagagcagtgacggggatggggcctggtgccccgcagggtcggtgtttcccaaggaggaggagtacttgcaggtggatctacaacgactgcacctggtggctctggtgggcacccagggacggcatgccgggggcctgggcaaggagttctcccggagctaccggctgcgttactcccgggatggtcgccgctggatgggctggaaggaccgctggggtcaggaggtgatctcaggcaatgaggaccctgagggagtggtgctgaaggaccttgggccccccatggttgcccgactggttcgcttctacccccgggctgaccgggtcatgagcgtctgtctgcgggtagagctctatggctgcctctggagggatggactcctgtcttacaccgcccctgtggggcagacaatgtatttatctgaggccgtgtacctcaacgactccacctatgacggacataccgtgggcggactgcagtatgggggtctgggccagctggcagatggtgtggtggggctggatgactttaggaagagtcaggagctgcgggtctggccaggctatgactatgtgggatggagcaaccacagcttctccagtggctatgtggagatggagtttgagtttgaccggctgagggccttccaggctatgcaggtccactgtaacaacatgcacacgctgggagcccgtctgcctggcggggtggaatgtcgcttccggcgtggccctgccatggcctgggagggggagcccatgcgccacaacctagggggcaacctgggggaccccagagcccgggctgtctcagtgccccttggcggccgtgtggctcgctttctgcagtgccgcttcctctttgcggggccctggttactcttcagcgaaatctccttcatctctgatgtggtgaacaattcctctccggcactgggaggcaccttcccgccagccccctggtggccgcctggcccacctcccaccaacttcagcagcttggagctggagcccagaggccagcagcccgtggccaaggccgaggggagcccgaccgccatcctcatcggctgcctggtggccatcatcctgctcctgctgctcatcattgccctcatgctctggcggctgcactggcgcaggctcctcagcaaggctgaacggagggtgttggaagaggagctgacggttcacctctctgtccctggggacactatcctcatcaacaaccgcccaggtcctagagagccacccccgtaccaggagccccggcctcgtgggaatccgccccactctgctccctgtgtccccaatggctctgcctacagtggggactatatggagcctgagaagccaggcgccccgcttctgcccccacctccccagaacagcgtcccccattatgccgaggctgacattgttaccctgcagggcgtcaccgggggcaacacctatgctgtgcctgcactgcccccaggggcagtcggggatgggccccccagagtggatttccctcgatctcgactccgcttcaaggagaagcttggcgagggccagtttggggaggtgcacctgtgtgaggtcgacagccctcaagatctggtcagtcttgatttcccccttaatgtgcgtaagggacaccctttgctggtagctgtcaagatcttacggccagatgccaccaagaatgccaggaatgatttcctgaaagaggtgaagatcatgtcgaggctcaaggacccaaacatcattcggctgctgggcgtgtgtgtgcaggacgaccccctctgcatgattactgactacatggagaacggcgacctcaaccagttcctcagtgcccaccagctggaggacaaggcagccgagggggcccctggggacgggcaggctgcgcaggggcccaccatcagctacccaatgctgctgcatgtggcagcccagatcgcctccggcatgcgctatctggccacactcaactttgtacatcgggacctggccacgcggaactgcctagttggggaaaatttcaccatcaaaatcgcagactttggcatgagccggaacctctatgctggggactattaccgtgtgcagggccgggcagtgctgcccatccgctggatggcctgggagtgcatcctcatggggaagttcacgactgcgagtgacgtgtgggcctttggtgtgaccctgtgggaggtgctgatgctctgtagggcccagccctttgggcagctcaccgacgagcaggtcatcgagaacgcgggggagttcttccgggaccagggccggcaggtgtacctgtcccggccgcctgcctgcccgcagggcctatatgagctgatgcttcggtgctggagccgggagtctgagcagcgaccacccttttcccagctgcatcggttcctggcagaggatgcactcaacacggtgtgaatcacacatccagctgcccctccctcagggagcgatccaggggaagccagtgacactaaaacaagaggacacaatggcacctctgcccttcccctcccgacagcccatcacctctaatagaggcagtgagactgcaggtgggctgggcccacccagggagctgatgccccttctccccttcctggacacactctcatgtccccttcctgttcttccttcctagaagcccctgtcgcccacccagctggtcctgtggatgggatcctctccaccctcctctagccatcccttggggaagggtggggagaaatataggatagacactggacatggcccattggagcacctgggccccactggacaacactgattcctggagaggtggctgcgcccccagcttctctctccctgtcacacactggaccccactggctgagaatctgggggtgaggaagacaagaaggagaggaaaatgtttccttgtgcctgctcctgtacttgtcctcagcttgggcttcttcctcctccatcacctgaaacactggacctgggggtagccccgccccagccctcagtcacccccacttcccacttgcagtcttgtagctagaacttctctaagcctatacgtttctgtggagtaaatattgggattggggggaaagagggagcaacggcccatagccttggggttggacatctctagtgtagctgccacattgatttttctataatcacttggggtttgtacatttttggggggagagacacagatttttacactaatatatggacctagcttgaggcaattttaatcccctgcactaggcaggtaataataaaggttgagttttccacaa

SEQ ID NO: 127127 - DNA, 3678 bp, Homo sapiens
  Payload ID: 4905
  Gene Symbol: DDR1
  Gene Name: discoidin domain receptor tyrosine kinase 1
  Uniprot ID: Q08345
  ENST ID: ENST00000400411
  CDS Start-End: 188-2818
ctcccgacacccgagccccgccggcgcctcccgctcccggctcccggctcctggctccctccgcctcccccgcccctcgccccgccgccgaagaggccccgctcccgggtcggacgcctgggtctgccgggaagagcgatgagagagatgctgcccccacccccttaggcccgagggatcaggagctatgggaccagaggccctgtcatctttactgctgctgctcttggtggcaagtggagatgctgacatgaagggacattttgatcctgccaagtgccgctatgccctgggcatgcaggaccggaccatcccagacagtgacatctctgcttccagctcctggtcagattccactgccgcccgccacagcaggttggagagcagtgacggggatggggcctggtgccccgcagggtcggtgtttcccaaggaggaggagtacttgcaggtggatctacaacgactgcacctggtggctctggtgggcacccagggacggcatgccgggggcctgggcaaggagttctcccggagctaccggctgcgttactcccgggatggtcgccgctggatgggctggaaggaccgctggggtcaggaggtgatctcaggcaatgaggaccctgagggagtggtgctgaaggaccttgggccccccatggttgcccgactggttcgcttctacccccgggctgaccgggtcatgagcgtctgtctgcgggtagagctctatggctgcctctggagggatggactcctgtcttacaccgcccctgtggggcagacaatgtatttatctgaggccgtgtacctcaacgactccacctatgacggacataccgtgggcggactgcagtatgggggtctgggccagctggcagatggtgtggtggggctggatgactttaggaagagtcaggagctgcgggtctggccaggctatgactatgtgggatggagcaaccacagcttctccagtggctatgtggagatggagtttgagtttgaccggctgagggccttccaggctatgcaggtccactgtaacaacatgcacacgctgggagcccgtctgcctggcggggtggaatgtcgcttccggcgtggccctgccatggcctgggagggggagcccatgcgccacaacctagggggcaacctgggggaccccagagcccgggctgtctcagtgccccttggcggccgtgtggctcgctttctgcagtgccgcttcctctttgcggggccctggttactcttcagcgaaatctccttcatctctgatgtggtgaacaattcctctccggcactgggaggcaccttcccgccagccccctggtggccgcctggcccacctcccaccaacttcagcagcttggagctggagcccagaggccagcagcccgtggccaaggccgaggggagcccgaccgccatcctcatcggctgcctggtggccatcatcctgctcctgctgctcatcattgccctcatgctctggcggctgcactggcgcaggctcctcagcaaggctgaacggagggtgttggaagaggagctgacggttcacctctctgtccctggggacactatcctcatcaacaaccgcccaggtcctagagagccacccccgtaccaggagccccggcctcgtgggaatccgccccactctgctccctgtgtccccaatggctctgcctacagtggggactatatggagcctgagaagccaggcgccccgcttctgcccccacctccccagaacagcgtcccccattatgccgaggctgacattgttaccctgcagggcgtcaccgggggcaacacctatgctgtgcctgcactgcccccaggggcagtcggggatgggccccccagagtggatttccctcgatctcgactccgcttcaaggagaagcttggcgagggccagtttggggaggtgcacctgtgtgaggtcgacagccctcaagatctggtcagtcttgatttcccccttaatgtgcgtaagggacaccctttgctggtagctgtcaagatcttacggccagatgccaccaagaatgccaggaatgatttcctgaaagaggtgaagatcatgtcgaggctcaaggacccaaacatcattcggctgctgggcgtgtgtgtgcaggacgaccccctctgcatgattactgactacatggagaacggcgacctcaaccagttcctcagtgcccaccagctggaggacaaggcagccgagggggcccctggggacgggcaggctgcgcaggggcccaccatcagctacccaatgctgctgcatgtggcagcccagatcgcctccggcatgcgctatctggccacactcaactttgtacatcgggacctggccacgcggaactgcctagttggggaaaatttcaccatcaaaatcgcagactttggcatgagccggaacctctatgctggggactattaccgtgtgcagggccgggcagtgctgcccatccgctggatggcctgggagtgcatcctcatggggaagttcacgactgcgagtgacgtgtgggcctttggtgtgaccctgtgggaggtgctgatgctctgtagggcccagccctttgggcagctcaccgacgagcaggtcatcgagaacgcgggggagttcttccgggaccagggccggcaggtgtacctgtcccggccgcctgcctgcccgcagggcctatatgagctgatgcttcggtgctggagccgggagtctgagcagcgaccacccttttcccagctgcatcggttcctggcagaggatgcactcaacacggtgtgaatcacacatccagctgcccctccctcagggagcgatccaggggaagccagtgacactaaaacaagaggacacaatggcacctctgcccttcccctcccgacagcccatcacctctaatagaggcagtgagactgcaggtgggctgggcccacccagggagctgatgccccttctccccttcctggacacactctcatgtccccttcctgttcttccttcctagaagcccctgtcgcccacccagctggtcctgtggatgggatcctctccaccctcctctagccatcccttggggaagggtggggagaaatataggatagacactggacatggcccattggagcacctgggccccactggacaacactgattcctggagaggtggctgcgcccccagcttctctctccctgtcacacactggaccccactggctgagaatctgggggtgaggaagacaagaaggagaggaaaatgtttccttgtgcctgctcctgtacttgtcctcagcttgggcttcttcctcctccatcacctgaaacactggacctgggggtagccccgccccagccctcagtcacccccacttcccacttgcagtcttgtagctagaacttctctaagcctatacgtttctgtggagtaaatattgggattggggggaaagagggagcaacggcccatagccttggggttggacatctctagtgtagctgccacattgatttttctataatcacttggggtttgtacatttttggggggagagacacagatttttacactaatatatggacctagcttgaggcaattttaatcccctgcactaggcaggtaataataaaggttgagttttccacaa

SEQ ID NO: 127128 - DNA, 3968 bp, Homo sapiens
  Payload ID: 4905
  Gene Symbol: DDR1
  Gene Name: discoidin domain receptor tyrosine kinase 1
  Uniprot ID: Q08345
  ENST ID: ENST00000400414
  CDS Start-End: 367-3108
gaggaactgagaggagaaggagaagagagtgggcccgccttcagggtctggggccttccaggttgggtcgtaggggcgggagcgcacaggctgcgagagaggagcaaaggttggtggagggagaagagcagtctggggcctggctggacaggcccccgacagctgctctcgggagccgcctcccgacacccgagccccgccggcgcctcccgctcccggctcccggctcctggctccctccgcctcccccgcccctcgccccgccgccgaagaggccccgctcccgggtcggacgcctgggtctgccgggaagagcgatgagagagatgctgcccccacccccttaggcccgagggatcaggagctatgggaccagaggccctgtcatctttactgctgctgctcttggtggcaagtggagatgctgacatgaagggacattttgatcctgccaagtgccgctatgccctgggcatgcaggaccggaccatcccagacagtgacatctctgcttccagctcctggtcagattccactgccgcccgccacagcaggttggagagcagtgacggggatggggcctggtgccccgcagggtcggtgtttcccaaggaggaggagtacttgcaggtggatctacaacgactgcacctggtggctctggtgggcacccagggacggcatgccgggggcctgggcaaggagttctcccggagctaccggctgcgttactcccgggatggtcgccgctggatgggctggaaggaccgctggggtcaggaggtgatctcaggcaatgaggaccctgagggagtggtgctgaaggaccttgggccccccatggttgcccgactggttcgcttctacccccgggctgaccgggtcatgagcgtctgtctgcgggtagagctctatggctgcctctggagggatggactcctgtcttacaccgcccctgtggggcagacaatgtatttatctgaggccgtgtacctcaacgactccacctatgacggacataccgtgggcggactgcagtatgggggtctgggccagctggcagatggtgtggtggggctggatgactttaggaagagtcaggagctgcgggtctggccaggctatgactatgtgggatggagcaaccacagcttctccagtggctatgtggagatggagtttgagtttgaccggctgagggccttccaggctatgcaggtccactgtaacaacatgcacacgctgggagcccgtctgcctggcggggtggaatgtcgcttccggcgtggccctgccatggcctgggagggggagcccatgcgccacaacctagggggcaacctgggggaccccagagcccgggctgtctcagtgccccttggcggccgtgtggctcgctttctgcagtgccgcttcctctttgcggggccctggttactcttcagcgaaatctccttcatctctgatgtggtgaacaattcctctccggcactgggaggcaccttcccgccagccccctggtggccgcctggcccacctcccaccaacttcagcagcttggagctggagcccagaggccagcagcccgtggccaaggccgaggggagcccgaccgccatcctcatcggctgcctggtggccatcatcctgctcctgctgctcatcattgccctcatgctctggcggctgcactggcgcaggctcctcagcaaggctgaacggagggtgttggaagaggagctgacggttcacctctctgtccctggggacactatcctcatcaacaaccgcccaggtcctagagagccacccccgtaccaggagccccggcctcgtgggaatccgccccactctgctccctgtgtccccaatggctctgcgttgctgctctccaatccagcctaccgcctccttctggccacttacgcccgtccccctcgaggcccgggcccccccacacccgcctgggccaaacccaccaacacccaggcctacagtggggactatatggagcctgagaagccaggcgccccgcttctgcccccacctccccagaacagcgtcccccattatgccgaggctgacattgttaccctgcagggcgtcaccgggggcaacacctatgctgtgcctgcactgcccccaggggcagtcggggatgggccccccagagtggatttccctcgatctcgactccgcttcaaggagaagcttggcgagggccagtttggggaggtgcacctgtgtgaggtcgacagccctcaagatctggtcagtcttgatttcccccttaatgtgcgtaagggacaccctttgctggtagctgtcaagatcttacggccagatgccaccaagaatgccaggaatgatttcctgaaagaggtgaagatcatgtcgaggctcaaggacccaaacatcattcggctgctgggcgtgtgtgtgcaggacgaccccctctgcatgattactgactacatggagaacggcgacctcaaccagttcctcagtgcccaccagctggaggacaaggcagccgagggggcccctggggacgggcaggctgcgcaggggcccaccatcagctacccaatgctgctgcatgtggcagcccagatcgcctccggcatgcgctatctggccacactcaactttgtacatcgggacctggccacgcggaactgcctagttggggaaaatttcaccatcaaaatcgcagactttggcatgagccggaacctctatgctggggactattaccgtgtgcagggccgggcagtgctgcccatccgctggatggcctgggagtgcatcctcatggggaagttcacgactgcgagtgacgtgtgggcctttggtgtgaccctgtgggaggtgctgatgctctgtagggcccagccctttgggcagctcaccgacgagcaggtcatcgagaacgcgggggagttcttccgggaccagggccggcaggtgtacctgtcccggccgcctgcctgcccgcagggcctatatgagctgatgcttcggtgctggagccgggagtctgagcagcgaccacccttttcccagctgcatcggttcctggcagaggatgcactcaacacggtgtgaatcacacatccagctgcccctccctcagggagcgatccaggggaagccagtgacactaaaacaagaggacacaatggcacctctgcccttcccctcccgacagcccatcacctctaatagaggcagtgagactgcaggtgggctgggcccacccagggagctgatgccccttctccccttcctggacacactctcatgtccccttcctgttcttccttcctagaagcccctgtcgcccacccagctggtcctgtggatgggatcctctccaccctcctctagccatcccttggggaagggtggggagaaatataggatagacactggacatggcccattggagcacctgggccccactggacaacactgattcctggagaggtggctgcgcccccagcttctctctccctgtcacacactggaccccactggctgagaatctgggggtgaggaagacaagaaggagaggaaaatgtttccttgtgcctgctcctgtacttgtcctcagcttgggcttcttcctcctccatcacctgaaacactggacctgggggtagccccgccccagccctcagtcacccccacttcccacttgcagtcttgtagctagaacttctctaagcctatacgtttctgtggagtaaatattgggattggggggaaagagggagcaacggcccatagccttggggttggacatctctagtgtagctgccacattgatttttctataatcacttggggtttgtacatttttggggggagagacacagatttttacactaatatatggacctagcttgaggcaattttaatcccctgcactaggcaggtaataataaaggttgagttttccacaa

SEQ ID NO: 127129 - DNA, 560 bp, Homo sapiens; identical to SEQ ID NO: 127125
  Payload ID: 4905
  Gene Symbol: DDR1
  Gene Name: discoidin domain receptor tyrosine kinase 1
  ENST ID: ENST00000400484
  CDS Start-End: 118-560

SEQ ID NO: 127130 - DNA, 3832 bp, Homo sapiens; identical to SEQ ID NO: 127118
  Payload ID: 4905
  Gene Symbol: DDR1
  Gene Name: discoidin domain receptor tyrosine kinase 1
  Uniprot ID: Q08345
  ENST ID: ENST00000400486
  CDS Start-End: 342-2972

SEQ ID NO: 127131 - DNA, 3678 bp, Homo sapiens
  Payload ID: 4905
  Gene Symbol: DDR1
  Gene Name: discoidin domain receptor tyrosine kinase 1
  Uniprot ID: Q08345
  ENST ID: ENST00000400488
  CDS Start-End: 188-2818
ctcccgacacccgagccccgccggcgcctcccgctcccggctcccggctcctggctccctccgcctcccccgcccctcgccccgccgccgaagaggccccgctcccgggtcggacgcctgggtctgccgggaagagcgatgagagagatgctgcccccacccccttaggcccgagggatcaggagctatgggaccagaggccctgtcatctttactgctgctgctcttggtggcaagtggagatgctgacatgaagggacattttgatcctgccaagtgccgctatgccctgggcatgcaggaccggaccatcccagacagtgacatctctgcttccagctcctggtcagattccactgccgcccgccacagcaggttggagagcagtgacggggatggggcctggtgccccgcagggtcggtgtttcccaaggaggaggagtacttgcaggtggatctacaacgactgcacctggtggctctggtgggcacccagggacggcatgccgggggcctgggcaaggagttctcccggagctaccggctgcgttactcccgggatggtcgccgctggatgggctggaaggaccgctggggtcaggaggtgatctcaggcaatgaggaccctgagggagtggtgctgaaggaccttgggccccccatggttgcccgactggttcgcttctacccccgggctgaccgggtcatgagcgtctgtctgcgggtagagctctatggctgcctctggagggatggactcctgtcttacaccgcccctgtggggcagacaatgtatttatctgaggccgtgtacctcaacgactccacctatgacggacataccgtgggcggactgcagtatgggggtctgggccagctggcagatggtgtggtggggctggatgactttaggaagagtcaggagctgcgggtctggccaggctatgactatgtgggatggagcaaccacagcttctccagtggctatgtggagatggagtttgagtttgaccggctgagggccttccaggctatgcaggtccactgtaacaacatgcacacgctgggagcccgtctgcctggcggggtggaatgtcgcttccggcgtggccctgccatggcctgggagggggagcccatgcgccacaacctagggggcaacctgggggaccccagagcccgggctgtctcagtgccccttggcggccgtgtggctcgctttctgcagtgccgcttcctctttgcggggccctggttactcttcagcgaaatctccttcatctctgatgtggtgaacaattcctctccggcactgggaggcaccttcccgccagccccctggtggccgcctggcccacctcccaccaacttcagcagcttggagctggagcccagaggccagcagcccgtggccaaggccgaggggagcccgaccgccatcctcatcggctgcctggtggccatcatcctgctcctgctgctcatcattgccctcatgctctggcggctgcactggcgcaggctcctcagcaaggctgaacggagggtgttggaagaggagctgacggttcacctctctgtccctggggacactatcctcatcaacaaccgcccaggtcctagagagccacccccgtaccaggagccccggcctcgtgggaatccgccccactccgctccctgtgtccccaatggctctgcctacagtggggactatatggagcctgagaagccaggcgccccgcttctgcccccacctccccagaacagcgtcccccattatgccgaggctgacattgttaccctgcagggcgtcaccgggggcaacacctatgctgtgcctgcactgcccccaggggcagtcggggatgggccccccagagtggatttccctcgatctcgactccgcttcaaggagaagcttggcgagggccagtttggggaggtgcacctgtgtgaggtcgacagccctcaagatctggttagtcttgatttcccccttaatgtgcgtaagggacaccctttgctggtagctgtcaagatcttacggccagatgccaccaagaatgccaggaatgatttcctgaaagaggtgaagatcatgtcgaggctcaaggacccaaacatcattcggctgctgggcgtgtgtgtgcaggacgaccccctctgcatgattactgactacatggagaacggcgacctcaaccagttcctcagtgcccaccagctggaggacaaggcagccgagggggcccctggggacgggcaggctgcgcaggggcccaccatcagctacccaatgctgctgcatgtggcagcccagatcgcctccggcatgcgctatctggccacactcaactttgtacatcgggacctggccacgcggaactgcctagttggggaaaatttcaccatcaaaatcgcagactttggcatgagccggaacctctatgctggggactattaccgtgtgcagggccgggcagtgctgcccatccgctggatggcctgggagtgcatcctcatggggaagttcacgactgcgagtgacgtgtgggcctttggtgtgaccctgtgggaggtgctgatgctctgtagggcccagccctttgggcagctcaccgacgagcaggtcatcgagaacgcgggggagttcttccgggaccagggccggcaggtgtacctgtcccggccgcctgcctgcccgcagggcctatatgagctgatgcttcggtgctggagccgggagtctgagcagcgaccacccttttcccagctgcatcggttcctggcagaggatgcactcaacacggtgtgaatcacacatccagctgcccctccctcagggagcgatccaggggaagccagtgacactaaaacaagaggacacaatggcacctctgcccttcccctcccgacagcccatcacctctaatagaggcagtgagactgcaggtgggctgggcccacccagggagctgatgccccttctccccttcctggacacactctcatgtccccttcctgttcttccttcctagaagcccctgtcgcccacccagctggtcctgtggatgggatcctctccaccctcctctagccatcccttggggaagggtggggagaaatataggatagacactggacatggcccattggagcacctgggccccactggacaacactgattcctggagaggtggctgcgcccccagcttctctctccctgtcacacactggaccccactggctgagaatctgggggtgaggaggacaagaaggagaggaaaatgtttccttgtgcctgctcctgtacttgtcctcagcttgggcttcttcctcctccatcacctgaaacactggacctgggggtagccccgccccagccctcagtcacccccacttcccacttgcagtcttgtagctagaacttctctaagcctatacgtttctgtggagtaaatattgggattggggggaaagagggagcaacggcccatagccttggggttggacatctctagtgtagctgccacattgatttttctataatcacttggggtttgtacatttttggggggagagacacagatttttacactaatatatggacctagcttgaggcaattttaatcccctgcactaggcaggtaataataaaggttgagttttccacaa

SEQ ID NO: 127132 - DNA, 3845 bp, Homo sapiens
  Payload ID: 4905
  Gene Symbol: DDR1
  Gene Name: discoidin domain receptor tyrosine kinase 1
  Uniprot ID: Q08345
  ENST ID: ENST00000400489
  CDS Start-End: 355-2985
gatcccagaagtaggaggggcgtcttcccctcgtgggccctgagcgggactgcagccagccccctggggcgccagctttggaggcccccgacagctgctctcgggagccgcctcccgacacccgagccccgccggcgcctcccgctcccggctcccggctcctggctccctccgcctcccccgcccctcgccccgccgccgaagaggccccgctcccgggtcggacgcctgggtctgccgggaagagcgatgagaggtgtctgaaggtggctattcactgagcgatggggttggacttgaaggaatgccaagagatgctgcccccacccccttaggcccgagggatcaggagctatgggaccagaggccctgtcatctttactgctgctgctcttggtggcaagtggagatgctgacatgaagggacattttgatcctgccaagtgccgctatgccctgggcatgcaggaccggaccatcccagacagtgacatctctgcttccagctcctggtcagattccactgccgcccgccacagcaggttggagagcagtgacggggatggggcctggtgccccgcagggtcggtgtttcccaaggaggaggagtacttgcaggtggatctacaacgactgcacctggtggctctggtgggcacccagggacggcatgccgggggcctgggcaaggagttctcccggagctaccggctgcgttactcccgggatggtcgccgctggatgggctggaaggaccgctggggtcaggaggtgatctcaggcaatgaggaccctgagggagtggtgctgaaggaccttgggccccccatggttgcccgactggttcgcttctacccccgggctgaccgggtcatgagcgtctgtctgcgggtagagctctatggctgcctctggagggatggactcctgtcttacaccgcccctgtggggcagacaatgtatttatctgaggccgtgtacctcaacgactccacctatgacggacataccgtgggcggactgcagtatgggggtctgggccagctggcagatggtgtggtggggctggatgactttaggaagagtcaggagctgcgggtctggccaggctatgactatgtgggatggagcaaccacagcttctccagtggctatgtggagatggagtttgagtttgaccggctgagggccttccaggctatgcaggtccactgtaacaacatgcacacgctgggagcccgtctgcctggcggggtggaatgtcgcttccggcgtggccctgccatggcctgggagggggagcccatgcgccacaacctagggggcaacctgggggaccccagagcccgggctgtctcagtgccccttggcggccgtgtggctcgctttctgcagtgccgcttcctctttgcggggccctggttactcttcagcgaaatctccttcatctctgatgtggtgaacaattcctctccggcactgggaggcaccttcccgccagccccctggtggccgcctggcccacctcccaccaacttcagcagcttggagctggagcccagaggccagcagcccgtggccaaggccgaggggagcccgaccgccatcctcatcggctgcctggtggccatcatcctgctcctgctgctcatcattgccctcatgctctggcggctgcactggcgcaggctcctcagcaaggctgaacggagggtgttggaagaggagctgacggttcacctctctgtccctggggacactatcctcatcaacaaccgcccaggtcctagagagccacccccgtaccaggagccccggcctcgtgggaatccgccccactccgctccctgtgtccccaatggctctgcctacagtggggactatatggagcctgagaagccaggcgccccgcttctgcccccacctccccagaacagcgtcccccattatgccgaggctgacattgttaccctgcagggcgtcaccgggggcaacacctatgctgtgcctgcactgcccccaggggcagtcggggatgggccccccagagtggatttccctcgatctcgactccgcttcaaggagaagcttggcgagggccagtttggggaggtgcacctgtgtgaggtcgacagccctcaagatctggttagtcttgatttcccccttaatgtgcgtaagggacaccctttgctggtagctgtcaagatcttacggccagatgccaccaagaatgccaggaatgatttcctgaaagaggtgaagatcatgtcgaggctcaaggacccaaacatcattcggctgctgggcgtgtgtgtgcaggacgaccccctctgcatgattactgactacatggagaacggcgacctcaaccagttcctcagtgcccaccagctggaggacaaggcagccgagggggcccctggggacgggcaggctgcgcaggggcccaccatcagctacccaatgctgctgcatgtggcagcccagatcgcctccggcatgcgctatctggccacactcaactttgtacatcgggacctggccacgcggaactgcctagttggggaaaatttcaccatcaaaatcgcagactttggcatgagccggaacctctatgctggggactattaccgtgtgcagggccgggcagtgctgcccatccgctggatggcctgggagtgcatcctcatggggaagttcacgactgcgagtgacgtgtgggcctttggtgtgaccctgtgggaggtgctgatgctctgtagggcccagccctttgggcagctcaccgacgagcaggtcatcgagaacgcgggggagttcttccgggaccagggccggcaggtgtacctgtcccggccgcctgcctgcccgcagggcctatatgagctgatgcttcggtgctggagccgggagtctgagcagcgaccacccttttcccagctgcatcggttcctggcagaggatgcactcaacacggtgtgaatcacacatccagctgcccctccctcagggagcgatccaggggaagccagtgacactaaaacaagaggacacaatggcacctctgcccttcccctcccgacagcccatcacctctaatagaggcagtgagactgcaggtgggctgggcccacccagggagctgatgccccttctccccttcctggacacactctcatgtccccttcctgttcttccttcctagaagcccctgtcgcccacccagctggtcctgtggatgggatcctctccaccctcctctagccatcccttggggaagggtggggagaaatataggatagacactggacatggcccattggagcacctgggccccactggacaacactgattcctggagaggtggctgcgcccccagcttctctctccctgtcacacactggaccccactggctgagaatctgggggtgaggaggacaagaaggagaggaaaatgtttccttgtgcctgctcctgtacttgtcctcagcttgggcttcttcctcctccatcacctgaaacactggacctgggggtagccccgccccagccctcagtcacccccacttcccacttgcagtcttgtagctagaacttctctaagcctatacgtttctgtggagtaaatattgggattggggggaaagagggagcaacggcccatagccttggggttggacatctctagtgtagctgccacattgatttttctataatcacttggggtttgtacatttttggggggagagacacagatttttacactaatatatggacctagcttgaggcaattttaatcccctgcactaggcaggtaataataaaggttgagttttccacaa

SEQ ID NO: 127133 - DNA, 3968 bp, Homo sapiens
  Payload ID: 4905
  Gene Symbol: DDR1
  Gene Name: discoidin domain receptor tyrosine kinase 1
  Uniprot ID: Q08345
  ENST ID: ENST00000400491
  CDS Start-End: 367-3108
gaggaactgagaggagaaggagaagagagtgggcccgccttcagggtctggggccttccaggttgggtcgtaggggcgggagcgcacaggctgcgagagaggagcaaaggttggtggagggagaagagcagtctggggcctggctggacaggcccccgacagctgctctcgggagccgcctcccgacacccgagccccgccggcgcctcccgctcccggctcccggctcctggctccctccgcctcccccgcccctcgccccgccgccgaagaggccccgctcccgggtcggacgcctgggtctgccgggaagagcgatgagagagatgctgcccccacccccttaggcccgagggatcaggagctatgggaccagaggccctgtcatctttactgctgctgctcttggtggcaagtggagatgctgacatgaagggacattttgatcctgccaagtgccgctatgccctgggcatgcaggaccggaccatcccagacagtgacatctctgcttccagctcctggtcagattccactgccgcccgccacagcaggttggagagcagtgacggggatggggcctggtgccccgcagggtcggtgtttcccaaggaggaggagtacttgcaggtggatctacaacgactgcacctggtggctctggtgggcacccagggacggcatgccgggggcctgggcaaggagttctcccggagctaccggctgcgttactcccgggatggtcgccgctggatgggctggaaggaccgctggggtcaggaggtgatctcaggcaatgaggaccctgagggagtggtgctgaaggaccttgggccccccatggttgcccgactggttcgcttctacccccgggctgaccgggtcatgagcgtctgtctgcgggtagagctctatggctgcctctggagggatggactcctgtcttacaccgcccctgtggggcagacaatgtatttatctgaggccgtgtacctcaacgactccacctatgacggacataccgtgggcggactgcagtatgggggtctgggccagctggcagatggtgtggtggggctggatgactttaggaagagtcaggagctgcgggtctggccaggctatgactatgtgggatggagcaaccacagcttctccagtggctatgtggagatggagtttgagtttgaccggctgagggccttccaggctatgcaggtccactgtaacaacatgcacacgctgggagcccgtctgcctggcggggtggaatgtcgcttccggcgtggccctgccatggcctgggagggggagcccatgcgccacaacctagggggcaacctgggggaccccagagcccgggctgtctcagtgccccttggcggccgtgtggctcgctttctgcagtgccgcttcctctttgcggggccctggttactcttcagcgaaatctccttcatctctgatgtggtgaacaattcctctccggcactgggaggcaccttcccgccagccccctggtggccgcctggcccacctcccaccaacttcagcagcttggagctggagcccagaggccagcagcccgtggccaaggccgaggggagcccgaccgccatcctcatcggctgcctggtggccatcatcctgctcctgctgctcatcattgccctcatgctctggcggctgcactggcgcaggctcctcagcaaggctgaacggagggtgttggaagaggagctgacggttcacctctctgtccctggggacactatcctcatcaacaaccgcccaggtcctagagagccacccccgtaccaggagccccggcctcgtgggaatccgccccactccgctccctgtgtccccaatggctctgcgttgctgctctccaatccagcctaccgcctccttctggccacttacgcccgtccccctcgaggcccgggcccccccacacccgcctgggccaaacccaccaacacccaggcctacagtggggactatatggagcctgagaagccaggcgccccgcttctgcccccacctccccagaacagcgtcccccattatgccgaggctgacattgttaccctgcagggcgtcaccgggggcaacacctatgctgtgcctgcactgcccccaggggcagtcggggatgggccccccagagtggatttccctcgatctcgactccgcttcaaggagaagcttggcgagggccagtttggggaggtgcacctgtgtgaggtcgacagccctcaagatctggttagtcttgatttcccccttaatgtgcgtaagggacaccctttgctggtagctgtcaagatcttacggccagatgccaccaagaatgccaggaatgatttcctgaaagaggtgaagatcatgtcgaggctcaaggacccaaacatcattcggctgctgggcgtgtgtgtgcaggacgaccccctctgcatgattactgactacatggagaacggcgacctcaaccagttcctcagtgcccaccagctggaggacaaggcagccgagggggcccctggggacgggcaggctgcgcaggggcccaccatcagctacccaatgctgctgcatgtggcagcccagatcgcctccggcatgcgctatctggccacactcaactttgtacatcgggacctggccacgcggaactgcctagttggggaaaatttcaccatcaaaatcgcagactttggcatgagccggaacctctatgctggggactattaccgtgtgcagggccgggcagtgctgcccatccgctggatggcctgggagtgcatcctcatggggaagttcacgactgcgagtgacgtgtgggcctttggtgtgaccctgtgggaggtgctgatgctctgtagggcccagccctttgggcagctcaccgacgagcaggtcatcgagaacgcgggggagttcttccgggaccagggccggcaggtgtacctgtcccggccgcctgcctgcccgcagggcctatatgagctgatgcttcggtgctggagccgggagtctgagcagcgaccacccttttcccagctgcatcggttcctggcagaggatgcactcaacacggtgtgaatcacacatccagctgcccctccctcagggagcgatccaggggaagccagtgacactaaaacaagaggacacaatggcacctctgcccttcccctcccgacagcccatcacctctaatagaggcagtgagactgcaggtgggctgggcccacccagggagctgatgccccttctccccttcctggacacactctcatgtccccttcctgttcttccttcctagaagcccctgtcgcccacccagctggtcctgtggatgggatcctctccaccctcctctagccatcccttggggaagggtggggagaaatataggatagacactggacatggcccattggagcacctgggccccactggacaacactgattcctggagaggtggctgcgcccccagcttctctctccctgtcacacactggaccccactggctgagaatctgggggtgaggaggacaagaaggagaggaaaatgtttccttgtgcctgctcctgtacttgtcctcagcttgggcttcttcctcctccatcacctgaaacactggacctgggggtagccccgccccagccctcagtcacccccacttcccacttgcagtcttgtagctagaacttctctaagcctatacgtttctgtggagtaaatattgggattggggggaaagagggagcaacggcccatagccttggggttggacatctctagtgtagctgccacattgatttttctataatcacttggggtttgtacatttttggggggagagacacagatttttacactaatatatggacctagcttgaggcaattttaatcccctgcactaggcaggtaataataaaggttgagttttccacaa

SEQ ID NO: 127134 - DNA, 3971 bp, Homo sapiens
  Payload ID: 4905
  Gene Symbol: DDR1
  Gene Name: discoidin domain receptor tyrosine kinase 1
  Uniprot ID: Q08345
  ENST ID: ENST00000400492
  CDS Start-End: 370-3111
gacgctcggacaaagccaggcagcgttggcagccccagacccgaccccaaaggcctgagactggggtgactgggacctaagagaatcctgagctggaggcccccgacagctgctctcgggagccgcctcccgacacccgagccccgccggcgcctcccgctcccggctcccggctcctggctccctccgcctcccccgcccctcgccccgccgccgaagaggccccgctcccgggtcggacgcctgggtctgccgggaagagcgatgagaggtgtctgaaggtggctattcactgagcgatggggttggacttgaaggaatgccaagagatgctgcccccacccccttaggcccgagggatcaggagctatgggaccagaggccctgtcatctttactgctgctgctcttggtggcaagtggagatgctgacatgaagggacattttgatcctgccaagtgccgctatgccctgggcatgcaggaccggaccatcccagacagtgacatctctgcttccagctcctggtcagattccactgccgcccgccacagcaggttggagagcagtgacggggatggggcctggtgccccgcagggtcggtgtttcccaaggaggaggagtacttgcaggtggatctacaacgactgcacctggtggctctggtgggcacccagggacggcatgccgggggcctgggcaaggagttctcccggagctaccggctgcgttactcccgggatggtcgccgctggatgggctggaaggaccgctggggtcaggaggtgatctcaggcaatgaggaccctgagggagtggtgctgaaggaccttgggccccccatggttgcccgactggttcgcttctacccccgggctgaccgggtcatgagcgtctgtctgcgggtagagctctatggctgcctctggagggatggactcctgtcttacaccgcccctgtggggcagacaatgtatttatctgaggccgtgtacctcaacgactccacctatgacggacataccgtgggcggactgcagtatgggggtctgggccagctggcagatggtgtggtggggctggatgactttaggaagagtcaggagctgcgggtctggccaggctatgactatgtgggatggagcaaccacagcttctccagtggctatgtggagatggagtttgagtttgaccggctgagggccttccaggctatgcaggtccactgtaacaacatgcacacgctgggagcccgtctgcctggcggggtggaatgtcgcttccggcgtggccctgccatggcctgggagggggagcccatgcgccacaacctagggggcaacctgggggaccccagagcccgggctgtctcagtgccccttggcggccgtgtggctcgctttctgcagtgccgcttcctctttgcggggccctggttactcttcagcgaaatctccttcatctctgatgtggtgaacaattcctctccggcactgggaggcaccttcccgccagccccctggtggccgcctggcccacctcccaccaacttcagcagcttggagctggagcccagaggccagcagcccgtggccaaggccgaggggagcccgaccgccatcctcatcggctgcctggtggccatcatcctgctcctgctgctcatcattgccctcatgctctggcggctgcactggcgcaggctcctcagcaaggctgaacggagggtgttggaagaggagctgacggttcacctctctgtccctggggacactatcctcatcaacaaccgcccaggtcctagagagccacccccgtaccaggagccccggcctcgtgggaatccgccccactccgctccctgtgtccccaatggctctgcgttgctgctctccaatccagcctaccgcctccttctggccacttacgcccgtccccctcgaggcccgggcccccccacacccgcctgggccaaacccaccaacacccaggcctacagtggggactatatggagcctgagaagccaggcgccccgcttctgcccccacctccccagaacagcgtcccccattatgccgaggctgacattgttaccctgcagggcgtcaccgggggcaacacctatgctgtgcctgcactgcccccaggggcagtcggggatgggccccccagagtggatttccctcgatctcgactccgcttcaaggagaagcttggcgagggccagtttggggaggtgcacctgtgtgaggtcgacagccctcaagatctggttagtcttgatttcccccttaatgtgcgtaagggacaccctttgctggtagctgtcaagatcttacggccagatgccaccaagaatgccaggaatgatttcctgaaagaggtgaagatcatgtcgaggctcaaggacccaaacatcattcggctgctgggcgtgtgtgtgcaggacgaccccctctgcatgattactgactacatggagaacggcgacctcaaccagttcctcagtgcccaccagctggaggacaaggcagccgagggggcccctggggacgggcaggctgcgcaggggcccaccatcagctacccaatgctgctgcatgtggcagcccagatcgcctccggcatgcgctatctggccacactcaactttgtacatcgggacctggccacgcggaactgcctagttggggaaaatttcaccatcaaaatcgcagactttggcatgagccggaacctctatgctggggactattaccgtgtgcagggccgggcagtgctgcccatccgctggatggcctgggagtgcatcctcatggggaagttcacgactgcgagtgacgtgtgggcctttggtgtgaccctgtgggaggtgctgatgctctgtagggcccagccctttgggcagctcaccgacgagcaggtcatcgagaacgcgggggagttcttccgggaccagggccggcaggtgtacctgtcccggccgcctgcctgcccgcagggcctatatgagctgatgcttcggtgctggagccgggagtctgagcagcgaccacccttttcccagctgcatcggttcctggcagaggatgcactcaacacggtgtgaatcacacatccagctgcccctccctcagggagcgatccaggggaagccagtgacactaaaacaagaggacacaatggcacctctgcccttcccctcccgacagcccatcacctctaatagaggcagtgagactgcaggtgggctgggcccacccagggagctgatgccccttctccccttcctggacacactctcatgtccccttcctgttcttccttcctagaagcccctgtcgcccacccagctggtcctgtggatgggatcctctccaccctcctctagccatcccttggggaagggtggggagaaatataggatagacactggacatggcccattggagcacctgggccccactggacaacactgattcctggagaggtggctgcgcccccagcttctctctccctgtcacacactggaccccactggctgagaatctgggggtgaggaggacaagaaggagaggaaaatgtttccttgtgcctgctcctgtacttgtcctcagcttgggcttcttcctcctccatcacctgaaacactggacctgggggtagccccgccccagccctcagtcacccccacttcccacttgcagtcttgtagctagaacttctctaagcctatacgtttctgtggagtaaatattgggattggggggaaagagggagcaacggcccatagccttggggttggacatctctagtgtagctgccacattgatttttctataatcacttggggtttgtacatttttggggggagagacacagatttttacactaatatatggacctagcttgaggcaattttaatcccctgcactaggcaggtaataataaaggttgagttttccacaa

SEQ ID NO: 127135 - DNA, 758 bp, Homo sapiens
  Payload ID: 4905
  Gene Symbol: DDR1
  Gene Name: discoidin domain receptor tyrosine kinase 1
  ENST ID: ENST00000434428
  CDS Start-End: 342-758
ggctttaggaagttatttaactgatctctgccctagtttcttcatgtgttaaatatggatagtaatagtatctaccttatgaagtgactgtgaagataaaattatggattctgtttaagggtttaggccagtgtctggcacaggggaagcattctaaaaatatagctgatgctgttaaacaatgactgttgttgttgttttactgttattatccccaaagcggcccattctgtctgttgctgtcagctatgactcagtcccctgattaacttacgcaccacccattttatcccctgcagagatgctgcccccacccccttaggcccgagggatcaggagctatgggaccagaggccctgtcatctttactgctgctgctcttggtggcaagtggagatgctgacatgaagggacattttgatcctgccaagtgccgctatgccctgggcatgcaggaccggaccatcccagacagtgacatctctgcttccagctcctggtcagattccactgccgcccgccacagcaggttggagagcagtgacggggatggggcctggtgccccgcagggtcggtgtttcccaaggaggaggagtacttgcaggtggatctacaacgactccacctggtggctctggtgggcacccagggacggcatgccgggggcctgggcaaggagttctcccggagctaccggctgcgttactcccgggatggtcgccgctggatgggctggaaggaccgctggggtcaggag

SEQ ID NO: 127136 - DNA, 588 bp, Homo sapiens
  Payload ID: 4905
  Gene Symbol: DDR1
  Gene Name: discoidin domain receptor tyrosine kinase 1
  ENST ID: ENST00000433393
  CDS Start-End: 172-588
ctgccggtgagcgccagcttcagggtcccacccccccatgcctggctcttggctgaacatttcttcccagcgcttccagcagccagaggcaggcgcccaagctcgctggctgttgctgagggcctgtagagatgctgcccccacccccttaggcccgagggatcaggagctatgggaccagaggccctgtcatctttactgctgctgctcttggtggcaagtggagatgctgacatgaagggacattttgatcctgccaagtgccgctatgccctgggcatgcaggaccggaccatcccagacagtgacatctctgcttccagctcctggtcagattccactgccgcccgccacagcaggttggagagcagtgacggggatggggcctggtgccccgcagggtcggtgtttcccaaggaggaggagtacttgcaggtggatctacaacgactccacctggtggctctggtgggcacccagggacggcatgccgggggcctgggcaaggagttctcccggagctaccggctgcgttactcccgggatggtcgccgctggatgggctggaaggaccgctggggtcaggag

SEQ ID NO: 127137 - DNA, 873 bp, Homo sapiens
  Payload ID: 4905
  Gene Symbol: DDR1
  Gene Name: discoidin domain receptor tyrosine kinase 1
  ENST ID: ENST00000418397
  CDS Start-End: 457-873
gggagccactgggactactgggtccgggagggggaagggagggctgcgagcccgaacgcgcggcgagaaggccgaggggagggaggggagcgaggagcgggaggaggaagggagggagccgaggcgagggggaggcggcgcctgggcccgagccgccccagccctggctcctctccccggaacaggcccccgacagctgctctcgggagccgcctcccgacacccgagccccgccggcgcctcccgctcccggctcccggctcctggctccctccgcctcccccgcccctcgccccgccgccgaagaggccccgctcccgggtcggacgcctgggtctgccgggaagagcgatgagaggtgtctgaaggtggctattcactgagcgatggggttggacttgaaggaatgccaagagatgctgcccccacccccttaggcccgagggatcaggagctatgggaccagaggccctgtcatctttactgctgctgctcttggtggcaagtggagatgctgacatgaagggacattttgatcctgccaagtgccgctatgccctgggcatgcaggaccggaccatcccagacagtgacatctctgcttccagctcctggtcagattccactgccgcccgccacagcaggttggagagcagtgacggggatggggcctggtgccccgcagggtcggtgtttcccaaggaggaggagtacttgcaggtggatctacaacgactgcacctggtggctctggtgggcacccagggacggcatgccgggggcctgggcaaggagttctcccggagctaccggctgcgttactcccgggatggtcgccgctggatgggctggaaggaccgctggggtcaggag

SEQ ID NO: 127138 - DNA, 873 bp, Homo sapiens
  Payload ID: 4905
  Gene Symbol: DDR1
  Gene Name: discoidin domain receptor tyrosine kinase 1
  ENST ID: ENST00000414794
  CDS Start-End: 457-873
gggagccactgggactactgggtccgggagggggaagggagggctgcgagcccgaacgcgcggcgagaaggccgaggggagggaggggagcgaggagcgggaggaggaagggagggagccgaggcgagggggaggcggcgcctgggcccgagccgccccagccctggctcctctccccggaacaggcccccgacagctgctctcgggagccgcctcccgacacccgagccccgccggcgcctcccgctcccggctcccggctcctggctccctccgcctcccccgcccctcgccccgccgccgaagaggccccgctcccgggtcggacgcctgggtctgccgggaagagcgatgagaggtgtctgaaggtggctattcactgagcgatggggttggacttgaaggaatgccaagagatgctgcccccacccccttaggcccgagggatcaggagctatgggaccagaggccctgtcatctttactgctgctgctcttggtggcaagtggagatgctgacatgaagggacattttgatcctgccaagtgccgctatgccctgggcatgcaggaccggaccatcccagacagtgacatctctgcttccagctcctggtcagattccactgccgcccgccacagcaggttggagagcagtgacggggatggggcctggtgccccgcagggtcggtgtttcccaaggaggaggagtacttgcaggtggatctacaacgactccacctggtggctctggtgggcacccagggacggcatgccgggggcctgggcaaggagttctcccggagctaccggctgcgttactcccgggatggtcgccgctggatgggctggaaggaccgctggggtcaggag

SEQ ID NO: 127139 - DNA, 1257 bp, Homo sapiens
  Payload ID: 4905
  Gene Symbol: DDR1
  Gene Name: discoidin domain receptor tyrosine kinase 1
  ENST ID: ENST00000428153
  CDS Start-End: 457-1257
gggagccactgggactactgggtccgggagggggaagggagggctgcgagcccgaacgcgcggcgagaaggccgaggggagggaggggagcgaggagcgggaggaggaagggagggagccgaggcgagggggaggcggcgcctgggcccgagccgccccagccctggctcctctccccggaacaggcccccgacagctgctctcgggagccgcctcccgacacccgagccccgccggcgcctcccgctcccggctcccggctcctggctccctccgcctcccccgcccctcgccccgccgccgaagaggccccgctcccgggtcggacgcctgggtctgccgggaagagcgatgagaggtgtctgaaggtggctattcactgagcgatggggttggacttgaaggaatgccaagagatgctgcccccacccccttaggcccgagggatcaggagctatgggaccagaggccctgtcatctttactgctgctgctcttggtggcaagtggagatgctgacatgaagggacattttgatcctgccaagtgccgctatgccctgggcatgcaggaccggaccatcccagacagtgacatctctgcttccagctcctggtcagattccactgccgcccgccacagcaggttggagagcagtgacggggatggggcctggtgccccgcagggtcggtgtttcccaaggaggaggagtacttgcaggtggatctacaacgactgcacctggtggctctggtgggcacccagggacggcatgccgggggcctgggcaaggagttctcccggagctaccggctgcgttactcccgggatggtcgccgctggatgggctggaaggaccgctggggtcaggaggtgatctcaggcaatgaggaccctgagggagtggtgctgaaggaccttgggccccccatggttgcccgactggttcgcttctacccccgggctgaccgggtcatgagcgtctgtctgcgggtagagctctatggctgcctctggagggatggactcctgtcttacaccgcccctgtggggcagacaatgtatttatctgaggccgtgtacctcaacgactccacctatgacggacataccgtgggcggactgcagtatgggggtctgggccagctggcagatggtgtggtggggctggatgactttaggaagagtcaggagctgcgggtctggccaggctatgactatgtgggatggagcaaccacagcttctccagtggctat

SEQ ID NO: 127140 - DNA, 1479 bp, Homo sapiens
  Payload ID: 4905
  Gene Symbol: DDR1
  Gene Name: discoidin domain receptor tyrosine kinase 1
  ENST ID: ENST00000442268
  CDS Start-End: 1-1479
tctgaggccgtgtacctcaacgactccacctatgacggacataccgtgggcggactgcagtatgggggtctgggccagctggcagatggtgtggtggggctggatgactttaggaagagtcaggagctgcgggtctggccaggctatgactatgtgggatggagcaaccacagcttctccagtggctatgtggagatggagtttgagtttgaccggctgagggccttccaggctatgcaggtccactgtaacaacatgcacacgctgggagcccgtctgcctggcggggtggaatgtcgcttccggcgtggccctgccatggcctgggagggggagcccatgcgccacaacctagggggcaacctgggggaccccagagcccgggctgtctcagtgccccttggcggccgtgtggctcgctttctgcagtgccgcttcctctttgcggggccctggttactcttcagcgaaatctccttcatctctgatgtggtgaacaattcctctccggcactgggaggcaccttcccgccagccccctggtggccgcctggcccacctcccaccaacttcagcagcttggagctggagcccagaggccagcagcccgtggccaaggccgaggggagcccgaccgccatcctcatcggctgcctggtggccatcatcctgctcctgctgctcatcattgccctcatgctctggcggctgcactggcgcaggctcctcagcaaggtcctagagagccacccccgtaccaggagccccggcctcgtgggaatccgccccactccgctccctgtgtccccaatggctctgcgttgctgctctccaatccagcctaccgcctccttctggccacttacgcccgtccccctcgaggcccgggcccccccacacccgcctgggccaaacccaccaacacccaggggcgtcaccgggggcaacacctatgctgtgcctgcactgcccccaggggcagtcggggatgggccccccagagtggatttccctcgatctcgactccgcttcaaggagaagcttggcgagggccagtttggggaggtgcacctgtgtgaggtcgacagccctcaagatctggttagtcttgatttcccccttaatgtgcgtaagggacaccctttgctggtagctgtcaagatcttacggccagatgccaccaagaatgccaggaatgatttcctgaaagaggtgaagatcatgtcgaggctcaaggacccaaacatcattcggctgctgggcgtgtgtgtgcaggacgaccccctctgcatgattactgactacatggagaacggcgacctcaaccagttcctcagtgcccaccagctggaggacaaggcagccgagggggcccctggggacgggcaggctgcgcaggggcccaccatcagctacccaatgctgctgcatgtggcagcccagatcgcctccggcatgcgctatctggccacactcaac

SEQ ID NO: 127141 - DNA, 485 bp, Homo sapiens
  Payload ID: 4905
  Gene Symbol: DDR1
  Gene Name: discoidin domain receptor tyrosine kinase 1
  ENST ID: ENST00000452052
  CDS Start-End: 296-485
ggaagggagggagccgaggcgagggggaggcggcgcctgggcccgagccgccccagccctggctcctctccccggaacaggcccccgacagctgctctcgggagccgcctcccgacacccgagccccgccggcgcctcccgctcccggctcccggctcctggctccctccgcctcccccgcccctcgccccgccgccgaagaggccccgctcccgggtcggacgcctgggtctgccgggaagagcgatgagagagatgctgcccccacccccttaggcccgagggatcaggagctatgggaccagaggccctgtcatctttactgctgctgctcttggtggcaagtggagatgctgacatgaagggacattttgatcctgccaagtgccgctatgccctgggcatgcaggaccggaccatcccagacagtgacatctctgcttccagctcctggtcagattccactgccgcccgccacagcaggt

SEQ ID NO: 127142 - DNA, 3971 bp, Homo sapiens
  Payload ID: 4905
  Gene Symbol: DDR1
  Gene Name: discoidin domain receptor tyrosine kinase 1
  Uniprot ID: Q08345
  ENST ID: ENST00000412329
  CDS Start-End: 370-3111
gacgctcggacaaagccaggcagcgttggcagccccagacccgaccccaaaggcctgagactggggtgactgggacctaagagaatcctgagctggaggcccccgacagctgctctcgggagccgcctcccgacacccgagccccgccggcgcctcccgctcccggctcccggctcctggctccctccgcctcccccgcccctcgccccgccgccgaagaggccccgctcccgggtcggacgcctgggtctgccgggaagagcgatgagaggtgtctgaaggtggctattcactgagcgatggggttggacttgaaggaatgccaagagatgctgcccccacccccttaggcccgagggatcaggagctatgggaccagaggccctgtcatctttactgctgctgctcttggtggcaagtggagatgctgacatgaagggacattttgatcctgccaagtgccgctatgccctgggcatgcaggaccggaccatcccagacagtgacatctctgcttccagctcctggtcagattccactgccgcccgccacagcaggttggagagcagtgacggggatggggcctggtgccccgcagggtcggtgtttcccaaggaggaggagtacttgcaggtggatctacaacgactccacctggtggctctggtgggcacccagggacggcatgccgggggcctgggcaaggagttctcccggagctaccggctgcgttactcccgggatggtcgccgctggatgggctggaaggaccgctggggtcaggaggtgatctcaggcaatgaggaccctgagggagtggtgctgaaggaccttgggccccccatggttgcccgactggttcgcttctacccccgggctgaccgggtcatgagtgtctgtctgcgggtagagctctatggctgcctctggagggatggactcctgtcttacaccgcccctgtggggcagacaatgtatttatctgaggccgtgtacctcaacgactccacctatgacggacataccgtgggcggactgcagtatgggggtctgggccagctggcagatggtgtggtggggctggatgactttaggaagagtcaggagctgcgggtctggccaggctatgactatgtgggatggagcaaccacagcttctccagtggctatgtggagatggagtttgagtttgaccggctgagggccttccaggctatgcaggtccactgtaacaacatgcacacgctgggagcccgtctgcctggcggggtggaatgtcgcttccggcgtggccctgccatggcctgggagggggagcccatgcgccacaacctagggggcaacctgggggaccccagagcccgggctgtctcagtgccccttggcggccgtgtggctcgctttctgcagtgccgcttcctctttgcggggccctggttactcttcagcgaaatctccttcatctctgatgtggtgaacaattcctctccggcactgggaggcaccttcccgccagccccctggtggccgcctggcccacctcccaccaacttcagcagcttggagctggagcccagaggccagcagcccgtggccaaggccgaggggagcccgaccgccatcctcatcggctgcctggtggccatcatcctgctcctgctgctcatcattgccctcatgctctggcggctgcactggcgcaggctcctcagcaaggctgaacggagggtgttggaagaggagctgacggttcacctctctgtccctggggacactatcctcatcaacaaccgcccaggtcctagagagccacccccgtaccaggagccccggcctcgtgggaatccgccccactccgctccctgtgtccccaatggctctgcgttgctgctctccaatccagcctaccgcctccttctggccacttacgcccgtccccctcgaggcccgggcccccccacacccgcctgggccaaacccaccaacacccaggcctacagtggggactatatggagcctgagaagccaggcgccccgcttctgcccccacctccccagaacagcgtcccccattatgccgaggctgacattgttaccctgcagggcgtcaccgggggcaacacctatgctgtgcctgcactgcccccaggggcagtcggggatgggccccccagagtggatttccctcgatctcgactccgcttcaaggagaagcttggcgagggccagtttggggaggtgcacctgtgtgaggtcgacagccctcaagatctggtcagtcttgatttcccccttaatgtgcgtaagggacaccctttgctggtagctgtcaagatcttacggccagatgccaccaagaatgccaggaatgatttcctgaaagaggtgaagatcatgtcgaggctcaaggaccccaacatcattcggctgctgggcgtgtgtgtgcaggacgaccccctctgcatgattactgactacatggagaacggcgacctcaaccagttcctcagtgcccaccagctggaggacaaggcagccgagggggcccctggggacgggcaggctgcgcaggggcccaccatcagctacccaatgctgctgcatgtggcagcccagatcgcctccggcatgcgctatctggccacactcaactttgtacatcgggacctggccacgcggaactgcctagttggggaaaatttcaccatcaaaatcgcagactttggcatgagccggaacctctatgctggggactattaccgtgtgcagggccgggcagtgctgcccatccgctggatggcctgggagtgcatcctcatggggaagttcacgactgcgagtgacgtgtgggcctttggtgtgaccctgtgggaggtgctgatgctctgtagggcccagccctttgggcagctcaccgacgagcaggtcatcgagaacgcgggggagttcttccgggaccagggccggcaggtgtacctgtcccggccgcctgcctgcccgcagggcctatatgagctgatgcttcggtgctggagccgggagtctgagcagcgaccacccttttcccagctgcatcggttcctggcagaggatgcactcaacacggtgtgaatcacacatccagctgcccctccctcagggagtgatccaggggaagccagtgacactaaaacaagaggacacaatggcacctctgcccttcccctcccgacagcccatcacctctaatagaggcagtgagactgcaggtgggctgggcccacccagggagctgatgccccttctccccttcctggacacactctcatgtccccttcctgttcttccttcctagaagcccctgtcgcccacccagctggtcctgtggatgggatcctctccaccctcctctagccatcccttggggaagggtggggagaaatataggatagacactggacatggcccattggagcacctgggccccactggacaacactgattcctggagaggtggctgcgcccccagcttctctctccctgtcacacactggaccccactggctgagaatctgggggtgaggaggacaagaaggagaggaaaatgtttccttgtgcctgctcctgtacttgtcctcagcttgggcttcttcctcctccatcacctgaaacactggacctgggggtagccccgccccagccctcagtcacccccacttcccacctgcagtcttgtagctagaacttctctaagcctatacgtttctgtggagtaaatattgggattggggggaaagagggagcaacggcccatagccttggggttggacatctctagtgtagctgccacattgatttttctataatcacttggggtttgtacatttttggggggagagacacagatttttacactaatatatggacctagcttgaggcaattttaatcccctgcactaggcaggtaataataaaggttgagttttccacaa

SEQ ID NO: 127143 - DNA, 459 bp, Homo sapiens
  Payload ID: 4905
  Gene Symbol: DDR1
  Gene Name: discoidin domain receptor tyrosine kinase 1
  ENST ID: ENST00000444160
  CDS Start-End: 43-459
agatgctgcccccacccccttaggcccgagggatcaggagctatgggaccagaggccctgtcatctttactgctgctgctcttggtggcaagtggagatgctgacatgaagggacattttgatcctgccaagtgccgctatgccctgggcatgcaggaccggaccatcccagacagtgacatctctgcttccagctcctggtcagattccactgccgcccgccacagcaggttggagagcagtgacggggatggggcctggtgccccgcagggtcggtgtttcccaaggaggaggagtacttgcaggtggatctacaacgactccacctggtggctctggtgggcacccagggacggcatgccgggggcctgggcaaggagttctcccggagctaccggctgcgttactcccgggatggtcgccgctggatgggctggaaggaccgctggggtcaggag

SEQ ID NO: 127144 - DNA, 873 bp, Homo sapiens; identical to SEQ ID NO: 127137
  Payload ID: 4905
  Gene Symbol: DDR1
  Gene Name: discoidin domain receptor tyrosine kinase 1
  ENST ID: ENST00000451632
  CDS Start-End: 457-873

SEQ ID NO: 127145 - DNA, 496 bp, Homo sapiens
  Payload ID: 4905
  Gene Symbol: DDR1
  Gene Name: discoidin domain receptor tyrosine kinase 1
  ENST ID: ENST00000412274
  CDS Start-End: 322-496
agtccagcgtctcctgggcctagattccccagctgctgttctctggaggggcccccgacagctgctctcgggagccgcctcccgacacccgagccccgccggcgcctcccgctcccggctcccggctcctggctccctccgcctcccccgcccctcgccccgccgccgaagaggccccgctcccgggtcggacgcctgggtctgccgggaagagcgatgagaggtgtctgaaggtggctattcactgagcgatggggttggacttgaaggaatgccaagagatgctgcccccacccccttaggcccgagggatcaggagctatgggaccagaggccctgtcatctttactgctgctgctcttggtggcaagtggagatgctgacatgaagggacattttgatcctgccaagtgccgctatgccctgggcatgcaggaccggaccatcccagacagtgacatctctgcttccagctcctggtcagattccactgccg

SEQ ID NO: 127146 - DNA, 873 bp, Homo sapiens; identical to SEQ ID NO: 127137
  Payload ID: 4905
  Gene Symbol: DDR1
  Gene Name: discoidin domain receptor tyrosine kinase 1
  ENST ID: ENST00000416705
  CDS Start-End: 457-873

SEQ ID NO: 127147 - DNA, 515 bp, Homo sapiens
  Payload ID: 4905
  Gene Symbol: DDR1
  Gene Name: discoidin domain receptor tyrosine kinase 1
  ENST ID: ENST00000422275
  CDS Start-End: 99-515
gtgtctgaaggtggctattcactgagcgatggggttggacttgaaggaatgccaagagatgctgcccccacccccttaggcccgagggatcaggagctatgggaccagaggccctgtcatctttactgctgctgctcttggtggcaagtggagatgctgacatgaagggacattttgatcctgccaagtgccgctatgccctgggcatgcaggaccggaccatcccagacagtgacatctctgcttccagctcctggtcagattccactgccgcccgccacagcaggttggagagcagtgacggggatggggcctggtgccccgcagggtcggtgtttcccaaggaggaggagtacttgcaggtggatctacaacgactccacctggtggctctggtgggcacccagggacggcatgccgggggcctgggcaaggagttctcccggagctaccggctgcgttactcccgggatggtcgccgctggatgggctggaaggaccgctggggtcaggag

SEQ ID NO: 127148 - DNA, 1479 bp, Homo sapiens
  Payload ID: 4905
  Gene Symbol: DDR1
  Gene Name: discoidin domain receptor tyrosine kinase 1
  ENST ID: ENST00000444198
  CDS Start-End: 1-1479
tctgaggccgtgtacctcaacgactccacctatgacggacataccgtgggcggactgcagtatgggggtctgggccagctggcagatggtgtggtggggctggatgactttaggaagagtcaggagctgcgggtctggccaggctatgactatgtgggatggagcaaccacagcttctccagtggctatgtggagatggagtttgagtttgaccggctgagggccttccaggctatgcaggtccactgtaacaacatgcacacgctgggagcccgtctgcctggcggggtggaatgtcgcttccggcgtggccctgccatggcctgggagggggagcccatgcgccacaacctagggggcaacctgggggaccccagagcccgggctgtctcagtgccccttggcggccgtgtggctcgctttctgcagtgccgcttcctctttgcggggccctggttactcttcagcgaaatctccttcatctctgatgtggtgaacaattcctctccggcactgggaggcaccttcccgccagccccctggtggccgcctggcccacctcccaccaacttcagcagcttggagctggagcccagaggccagcagcccgtggccaaggccgaggggagcccgaccgccatcctcatcggctgcctggtggccatcatcctgctcctgctgctcatcattgccctcatgctctggcggctgcactggcgcaggctcctcagcaaggtcctagagagccacccccgtaccaggagccccggcctcgtgggaatccgccccactctgctccctgtgtccccaatggctctgcgttgctgctctccaatccagcctaccgcctccttctggccacttacgcccgtccccctcgaggcccgggcccccccacacccgcctgggccaaacccaccaacacccaggggcgtcaccgggggcaacacctatgctgtgcctgcactgcccccaggggcagtcggggatgggccccccagagtggatttccctcgatctcgactccgcttcaaggagaagcttggcgagggccagtttggggaggtgcacctgtgtgaggtcgacagccctcaagatctggtcagtcttgatttcccccttaatgtgcgtaagggacaccctttgctggtagctgtcaagatcttacggccagatgccaccaagaatgccaggaatgatttcctgaaagaggtgaagatcatgtcgaggctcaaggacccaaacatcattcggctgctgggcgtgtgtgtgcaggacgaccccctctgcatgattactgactacatggagaacggcgacctcaaccagttcctcagtgcccaccagctggaggacaaggcagccgagggggcccctggggacgggcaggctgcgcaggggcccaccatcagctacccaatgctgctgcatgtggcagcccagatcgcctccggcatgcgctatctggccacactcaac

SEQ ID NO: 127149 - DNA, 587 bp, Homo sapiens
  Payload ID: 4905
  Gene Symbol: DDR1
  Gene Name: discoidin domain receptor tyrosine kinase 1
  ENST ID: ENST00000437124
  CDS Start-End: 128-587
agattccccagctgctgttctctggaggggtgtctgaaggtggctattcactgagcgatggggttggacttgaaggaatgccaagagatgctgcccccacccccttaggcccgagggatcaggagctatgggaccagaggccctgtcatctttactgctgctgctcttggtggcaagtggagatgctgacatgaagggacattttgatcctgccaagtgccgctatgccctgggcatgcaggaccggaccatcccagacagtgacatctctgcttccagctcctggtcagattccactgccgcccgccacagcaggttggagagcagtgacggggatggggcctggtgccccgcagggtcggtgtttcccaaggaggaggagtacttgcaggtggatctacaacgactgcacctggtggctctggtgggcacccagggacggcatgccgggggcctgggcaaggagttctcccggagctaccggctgcgttactcccgggatggtcgccgctggatgggctggaaggaccgctggggtcaggaggtgatctcaggcaatgaggaccctgagggagtggtgctgaagg

SEQ ID NO: 127150 - DNA, 459 bp, Homo sapiens; identical to SEQ ID NO: 127143
  Payload ID: 4905
  Gene Symbol: DDR1
  Gene Name: discoidin domain receptor tyrosine kinase 1
  ENST ID: ENST00000445749
  CDS Start-End: 43-459

SEQ ID NO: 127151 - DNA, 939 bp, Homo sapiens
  Payload ID: 4905
  Gene Symbol: DDR1
  Gene Name: discoidin domain receptor tyrosine kinase 1
  ENST ID: ENST00000414077
  CDS Start-End: 188-939
ctcccgacacccgagccccgccggcgcctcccgctcccggctcccggctcctggctccctccgcctcccccgcccctcgccccgccgccgaagaggccccgctcccgggtcggacgcctgggtctgccgggaagagcgatgagagagatgctgcccccacccccttaggcccgagggatcaggagctatgggaccagaggccctgtcatctttactgctgctgctcttggtggcaagtggagatgctgacatgaagggacattttgatcctgccaagtgccgctatgccctgggcatgcaggaccggaccatcccagacagtgacatctctgcttccagctcctggtcagattccactgccgcccgccacagcaggttggagagcagtgacggggatggggcctggtgccccgcagggtcggtgtttcccaaggaggaggagtacttgcaggtggatctacaacgactgcacctggtggctctggtgggcacccagggacggcatgccgggggcctgggcaaggagttctcccggagctaccggctgcgttactcccgggatggtcgccgctggatgggctggaaggaccgctggggtcaggaggtgatctcaggcaatgaggaccctgagggagtggtgctgaaggaccttgggccccccatggttgcccgactggttcgcttctacccccgggctgaccgggtcatgagcgtctgtctgcgggtagagctctatggctgcctctggagggatggactcctgtcttacaccgcccctgtggggcagacaatgtatttatctgaggccgtgtacctcaacgactccacctatgacggacataccgtgggcggactgcagtatgggggtctgggccagctggcagatggtgtggtggggctggatgactttaggaagagtcaggagctgcgggtctggcc

SEQ ID NO: 127152 - DNA, 1996 bp, Homo sapiens
  Payload ID: 4905
  Gene Symbol: DDR1
  Gene Name: discoidin domain receptor tyrosine kinase 1
  ENST ID: ENST00000450117
  CDS Start-End: 1-1136
cctacagtggggactatatggagcctgagaagccaggcgccccgcttctgcccccacctccccagaacagcgtcccccattatgccgaggctgacattgttaccctgcagggcgtcaccgggggcaacacctatgctgtgcctgcactgcccccaggggcagtcggggatgggccccccagagtggatttccctcgatctcgactccgcttcaaggagaagcttggcgagggccagtttggggaggtgcacctgtgtgaggtcgacagccctcaagatctggttagtcttgatttcccccttaatgtgcgtaagggacaccctttgctggtagctgtcaagatcttacggccagatgccaccaagaatgccagcttctccttgttctccaggaatgatttcctgaaagaggtgaagatcatgtcgaggctcaaggacccaaacatcattcggctgctgggcgtgtgtgtgcaggacgaccccctctgcatgattactgactacatggagaacggcgacctcaaccagttcctcagtgcccaccagctggaggacaaggcagccgagggggcccctggggacgggcaggctgcgcaggggcccaccatcagctacccaatgctgctgcatgtggcagcccagatcgcctccggcatgcgctatctggccacactcaactttgtacatcgggacctggccacgcggaactgcctagttggggaaaatttcaccatcaaaatcgcagactttggcatgagccggaacctctatgctggggactattaccgtgtgcagggccgggcagtgctgcccatccgctggatggcctgggagtgcatcctcatggggaagttcacgactgcgagtgacgtgtgggcctttggtgtgaccctgtgggaggtgctgatgctctgtagggcccagccctttgggcagctcaccgacgagcaggtcatcgagaacgcgggggagttcttccgggaccagggccggcaggtgtacctgtcccggccgcctgcctgcccgcagggcctatatgagctgatgcttcggtgctggagccgggagtctgagcagcgaccacccttttcccagctgcatcggttcctggcagaggatgcactcaacacggtgtgaatcacacatccagctgcccctccctcagggagcgatccaggggaagccagtgacactaaaacaagaggacacaatggcacctctgcccttcccctcccgacagcccatcacctctaatagaggcagtgagactgcaggtgggctgggcccacccagggagctgatgccccttctccccttcctggacacactctcatgtccccttcctgttcttccttcctagaagcccctgtcgcccacccagctggtcctgtggatgggatcctctccaccctcctctagccatcccttggggaagggtggggagaaatataggatagacactggacatggcccattggagcacctgggccccactggacaacactgattcctggagaggtggctgcgcccccagcttctctctccctgtcacacactggaccccactggctgagaatctgggggtgaggaggacaagaaggagaggaaaatgtttccttgtgcctgctcctgtacttgtcctcagcttgggcttcttcctcctccatcacctgaaacactggacctgggggtagccccgccccagccctcagtcacccccacttcccacttgcagtcttgtagctagaacttctctaagcctatacgtttctgtggagtaaatattgggattggggggaaagagggagcaacggcccatagccttggggttggacatctctagtgtagctgccacattgatttttctataatcacttggggtttgtacatttttggggggagagacacagatttttacactaatatatggacctagcttgaggcaattttaatcccctgcactaggcaggtaataataaaggttgagttttccacaa

SEQ ID NO: 127153 - DNA, 1121 bp, Homo sapiens
  Payload ID: 4905
  Gene Symbol: DDR1
  Gene Name: discoidin domain receptor tyrosine kinase 1
  ENST ID: ENST00000422628
  CDS Start-End: 370-1121
gacgctcggacaaagccaggcagcgttggcagccccagacccgaccccaaaggcctgagactggggtgactgggacctaagagaatcctgagctggaggcccccgacagctgctctcgggagccgcctcccgacacccgagccccgccggcgcctcccgctcccggctcccggctcctggctccctccgcctcccccgcccctcgccccgccgccgaagaggccccgctcccgggtcggacgcctgggtctgccgggaagagcgatgagaggtgtctgaaggtggctattcactgagcgatggggttggacttgaaggaatgccaagagatgctgcccccacccccttaggcccgagggatcaggagctatgggaccagaggccctgtcatctttactgctgctgctcttggtggcaagtggagatgctgacatgaagggacattttgatcctgccaagtgccgctatgccctgggcatgcaggaccggaccatcccagacagtgacatctctgcttccagctcctggtcagattccactgccgcccgccacagcaggttggagagcagtgacggggatggggcctggtgccccgcagggtcggtgtttcccaaggaggaggagtacttgcaggtggatctacaacgactgcacctggtggctctggtgggcacccagggacggcatgccgggggcctgggcaaggagttctcccggagctaccggctgcgttactcccgggatggtcgccgctggatgggctggaaggaccgctggggtcaggaggtgatctcaggcaatgaggaccctgagggagtggtgctgaaggaccttgggccccccatggttgcccgactggttcgcttctacccccgggctgaccgggtcatgagcgtctgtctgcgggtagagctctatggctgcctctggagggatggactcctgtcttacaccgcccctgtggggcagacaatgtatttatctgaggccgtgtacctcaacgactccacctatgacggacataccgtgggcggactgcagtatgggggtctgggccagctggcagatggtgtggtggggctggatgactttaggaagagtcaggagctgcgggtctggcc

SEQ ID NO: 127154 - DNA, 580 bp, Homo sapiens
  Payload ID: 4905
  Gene Symbol: DDR1
  Gene Name: discoidin domain receptor tyrosine kinase 1
  ENST ID: ENST00000413044
  CDS Start-End: 81-580
cctgggcctagattccccagctgctgttctctggagggagatgctgcccccacccccttaggcccgagggatcaggagctatgggaccagaggccctgtcatctttactgctgctgctcttggtggcaagtggagatgctgacatgaagggacattttgatcctgccaagtgccgctatgccctgggcatgcaggaccggaccatcccagacagtgacatctctgcttccagctcctggtcagattccactgccgcccgccacagcaggttggagagcagtgacggggatggggcctggtgccccgcagggtcggtgtttcccaaggaggaggagtacttgcaggtggatctacaacgactgcacctggtggctctggtgggcacccagggacggcatgccgggggcctgggcaaggagttctcccggagctaccggctgcgttactcccgggatggtcgccgctggatgggctggaaggaccgctggggtcaggaggtgatctcaggcaatgaggaccctgagggagtggtgctgaaggaccttgggccccccatggttgcccgactggttcgcttcta

SEQ ID NO: 127155 - DNA, 3971 bp, Homo sapiens; identical to SEQ ID NO: 127134
  Payload ID: 4905
  Gene Symbol: DDR1
  Gene Name: discoidin domain receptor tyrosine kinase 1
  Uniprot ID: Q08345
  ENST ID: ENST00000430933
  CDS Start-End: 370-3111

SEQ ID NO: 127156 - DNA, 485 bp, Homo sapiens; identical to SEQ ID NO: 127141
  Payload ID: 4905
  Gene Symbol: DDR1
  Gene Name: discoidin domain receptor tyrosine kinase 1
  ENST ID: ENST00000434782
  CDS Start-End: 296-485

SEQ ID NO: 127157 - DNA, 1996 bp, Homo sapiens
  Payload ID: 4905
  Gene Symbol: DDR1
  Gene Name: discoidin domain receptor tyrosine kinase 1
  ENST ID: ENST00000452093
  CDS Start-End: 1-1136
cctacagtggggactatatggagcctgagaagccaggcgccccgcttctgcccccacctccccagaacagcgtcccccattatgccgaggctgacattgttaccctgcagggcgtcaccgggggcaacacctatgctgtgcctgcactgcccccaggggcagtcggggatgggccccccagagtggatttccctcgatctcgactccgcttcaaggagaagcttggcgagggccagtttggggaggtgcacctgtgtgaggtcgacagccctcaagatctggtcagtcttgatttcccccttaatgtgcgtaagggacaccctttgctggtagctgtcaagatcttacggccagatgccaccaagaatgccagcttctccttgttctccaggaatgatttcctgaaagaggtgaagatcatgtcgaggctcaaggaccccaacatcattcggctgctgggcgtgtgtgtgcaggacgaccccctctgcatgattactgactacatggagaacggcgacctcaaccagttcctcagtgcccaccagctggaggacaaggcagccgagggggcccctggggacgggcaggctgcgcaggggcccaccatcagctacccaatgctgctgcatgtggcagcccagatcgcctccggcatgcgctatctggccacactcaactttgtacatcgggacctggccacgcggaactgcctagttggggaaaatttcaccatcaaaatcgcagactttggcatgagccggaacctctatgctggggactattaccgtgtgcagggccgggcagtgctgcccatccgctggatggcctgggagtgcatcctcatggggaagttcacgactgcgagtgacgtgtgggcctttggtgtgaccctgtgggaggtgctgatgctctgtagggcccagccctttgggcagctcaccgacgagcaggtcatcgagaacgcgggggagttcttccgggaccagggccggcaggtgtacctgtcccggccgcctgcctgcccgcagggcctatatgagctgatgcttcggtgctggagccgggagtctgagcagcgaccacccttttcccagctgcatcggttcctggcagaggatgcactcaacacggtgtgaatcacacatccagctgcccctccctcagggagtgatccaggggaagccagtgacactaaaacaagaggacacaatggcacctctgcccttcccctcccgacagcccatcacctctaatagaggcagtgagactgcaggtgggctgggcccacccagggagctgatgccccttctccccttcctggacacactctcatgtccccttcctgttcttccttcctagaagcccctgtcgcccacccagctggtcctgtggatgggatcctctccaccctcctctagccatcccttggggaagggtggggagaaatataggatagacactggacatggcccattggagcacctgggccccactggacaacactgattcctggagaggtggctgcgcccccagcttctctctccctgtcacacactggaccccactggctgagaatctgggggtgaggaggacaagaaggagaggaaaatgtttccttgtgcctgctcctgtacttgtcctcagcttgggcttcttcctcctccatcacctgaaacactggacctgggggtagccccgccccagccctcagtcacccccacttcccacctgcagtcttgtagctagaacttctctaagcctatacgtttctgtggagtaaatattgggattggggggaaagagggagcaacggcccatagccttggggttggacatctctagtgtagctgccacattgatttttctataatcacttggggtttgtacatttttggggggagagacacagatttttacactaatatatggacctagcttgaggcaattttaatcccctgcactaggcaggtaataataaaggttgagttttccacaa

SEQ ID NO: 127158 - DNA, 485 bp, Homo sapiens; identical to SEQ ID NO: 127141
  Payload ID: 4905
  Gene Symbol: DDR1
  Gene Name: discoidin domain receptor tyrosine kinase 1
  ENST ID: ENST00000439604
  CDS Start-End: 296-485

SEQ ID NO: 127159 - DNA, 1479 bp, Homo sapiens; identical to SEQ ID NO: 127140
  Payload ID: 4905
  Gene Symbol: DDR1
  Gene Name: discoidin domain receptor tyrosine kinase 1
  ENST ID: ENST00000417521
  CDS Start-End: 1-1479

SEQ ID NO: 127160 - DNA, 1093 bp, Homo sapiens
  Payload ID: 4905
  Gene Symbol: DDR1
  Gene Name: discoidin domain receptor tyrosine kinase 1
  ENST ID: ENST00000433322
  CDS Start-End: 342-1093
ggctttaggaagttatttaactgatctctgccctagtttcttcatgtgttaaatatggatagtaatagtatctaccttatgaagtgactgtgaagataaaattatggattctgtttaagggtttaggccagtgtctggcacaggggaagcattctaaaaatatagctgatgctgttaaacaatgactgttgttgttgttttactgttattatccccaaagcggcccattctgtctgttgctgtcagctatgactcagtcccctgattaacttacgcaccacccattttatcccctgcagagatgctgcccccacccccttaggcccgagggatcaggagctatgggaccagaggccctgtcatctttactgctgctgctcttggtggcaagtggagatgctgacatgaagggacattttgatcctgccaagtgccgctatgccctgggcatgcaggaccggaccatcccagacagtgacatctctgcttccagctcctggtcagattccactgccgcccgccacagcaggttggagagcagtgacggggatggggcctggtgccccgcagggtcggtgtttcccaaggaggaggagtacttgcaggtggatctacaacgactgcacctggtggctctggtgggcacccagggacggcatgccgggggcctgggcaaggagttctcccggagctaccggctgcgttactcccgggatggtcgccgctggatgggctggaaggaccgctggggtcaggaggtgatctcaggcaatgaggaccctgagggagtggtgctgaaggaccttgggccccccatggttgcccgactggttcgcttctacccccgggctgaccgggtcatgagcgtctgtctgcgggtagagctctatggctgcctctggagggatggactcctgtcttacaccgcccctgtggggcagacaatgtatttatctgaggccgtgtacctcaacgactccacctatgacggacataccgtgggcggactgcagtatgggggtctgggccagctggcagatggtgtggtggggctggatgactttaggaagagtcaggagctgcgggtctggcc

SEQ ID NO: 127161 - DNA, 560 bp, Homo sapiens; identical to SEQ ID NO: 127125
  Payload ID: 4905
  Gene Symbol: DDR1
  Gene Name: discoidin domain receptor tyrosine kinase 1
  ENST ID: ENST00000453391
  CDS Start-End: 118-560

SEQ ID NO: 127162 - DNA, 3678 bp, Homo sapiens; identical to SEQ ID NO: 127131
  Payload ID: 4905
  Gene Symbol: DDR1
  Gene Name: discoidin domain receptor tyrosine kinase 1
  Uniprot ID: Q08345
  ENST ID: ENST00000454774
  CDS Start-End: 188-2818

SEQ ID NO: 127163 - DNA, 799 bp, Homo sapiens
  Payload ID: 4905
  Gene Symbol: DDR1
  Gene Name: discoidin domain receptor tyrosine kinase 1
  ENST ID: ENST00000437449
  CDS Start-End: 172-799
ctgccggtgagcgccagcttcagggtcccacccccccatgcctggctcttggctgaacatttcttcccagcgcttccagcagccagaggcaggcgcccaagctcgctggctgttgctgagggcctgtagagatgctgcccccacccccttaggcccgagggatcaggagctatgggaccagaggccctgtcatctttactgctgctgctcttggtggcaagtggagatgctgacatgaagggacattttgatcctgccaagtgccgctatgccctgggcatgcaggaccggaccatcccagacagtgacatctctgcttccagctcctggtcagattccactgccgcccgccacagcaggttggagagcagtgacggggatggggcctggtgccccgcagggtcggtgtttcccaaggaggaggagtacttgcaggtggatctacaacgactgcacctggtggctctggtgggcacccagggacggcatgccgggggcctgggcaaggagttctcccggagctaccggctgcgttactcccgggatggtcgccgctggatgggctggaaggaccgctggggtcaggaggtgatctcaggcaatgaggaccctgagggagtggtgctgaaggaccttgggccccccatggttgcccgactggttcgcttctacccccgggctgaccgggtcatgagcgtctgtctgcgggtagagctctatggctgcctctggagggatggactcctgtcttacaccgcccctgtggggcagacaatgtatttatctgaggccgtgtacc

SEQ ID NO: 127164 - DNA, 580 bp, Homo sapiens; identical to SEQ ID NO: 127154
  Payload ID: 4905
  Gene Symbol: DDR1
  Gene Name: discoidin domain receptor tyrosine kinase 1
  ENST ID: ENST00000448651
  CDS Start-End: 81-580

SEQ ID NO: 127165 - DNA, 3832 bp, Homo sapiens
  Payload ID: 4905
  Gene Symbol: DDR1
  Gene Name: discoidin domain receptor tyrosine kinase 1
  Uniprot ID: Q08345
  ENST ID: ENST00000453510
  CDS Start-End: 342-2972
ggctttaggaagttatttaactgatctctgccctagtttcttcatgtgttaaatatggatagtaatagtatctaccttatgaagtgactgtgaagataaaattatggattctgtttaagggtttaggccagtgtctggcacaggggaagcattctaaaaatatagctgatgctgttaaacaatgactgttgttgttgttttactgttattatccccaaagcggcccattctgtctgttgctgtcagctatgactcagtcccctgattaacttacgcaccacccattttatcccctgcagagatgctgcccccacccccttaggcccgagggatcaggagctatgggaccagaggccctgtcatctttactgctgctgctcttggtggcaagtggagatgctgacatgaagggacattttgatcctgccaagtgccgctatgccctgggcatgcaggaccggaccatcccagacagtgacatctctgcttccagctcctggtcagattccactgccgcccgccacagcaggttggagagcagtgacggggatggggcctggtgccccgcagggtcggtgtttcccaaggaggaggagtacttgcaggtggatctacaacgactccacctggtggctctggtgggcacccagggacggcatgccgggggcctgggcaaggagttctcccggagctaccggctgcgttactcccgggatggtcgccgctggatgggctggaaggaccgctggggtcaggaggtgatctcaggcaatgaggaccctgagggagtggtgctgaaggaccttgggccccccatggttgcccgactggttcgcttctacccccgggctgaccgggtcatgagtgtctgtctgcgggtagagctctatggctgcctctggagggatggactcctgtcttacaccgcccctgtggggcagacaatgtatttatctgaggccgtgtacctcaacgactccacctatgacggacataccgtgggcggactgcagtatgggggtctgggccagctggcagatggtgtggtggggctggatgactttaggaagagtcaggagctgcgggtctggccaggctatgactatgtgggatggagcaaccacagcttctccagtggctatgtggagatggagtttgagtttgaccggctgagggccttccaggctatgcaggtccactgtaacaacatgcacacgctgggagcccgtctgcctggcggggtggaatgtcgcttccggcgtggccctgccatggcctgggagggggagcccatgcgccacaacctagggggcaacctgggggaccccagagcccgggctgtctcagtgccccttggcggccgtgtggctcgctttctgcagtgccgcttcctctttgcggggccctggttactcttcagcgaaatctccttcatctctgatgtggtgaacaattcctctccggcactgggaggcaccttcccgccagccccctggtggccgcctggcccacctcccaccaacttcagcagcttggagctggagcccagaggccagcagcccgtggccaaggccgaggggagcccgaccgccatcctcatcggctgcctggtggccatcatcctgctcctgctgctcatcattgccctcatgctctggcggctgcactggcgcaggctcctcagcaaggctgaacggagggtgttggaagaggagctgacggttcacctctctgtccctggggacactatcctcatcaacaaccgcccaggtcctagagagccacccccgtaccaggagccccggcctcgtgggaatccgccccactccgctccctgtgtccccaatggctctgcctacagtggggactatatggagcctgagaagccaggcgccccgcttctgcccccacctccccagaacagcgtcccccattatgccgaggctgacattgttaccctgcagggcgtcaccgggggcaacacctatgctgtgcctgcactgcccccaggggcagtcggggatgggccccccagagtggatttccctcgatctcgactccgcttcaaggagaagcttggcgagggccagtttggggaggtgcacctgtgtgaggtcgacagccctcaagatctggtcagtcttgatttcccccttaatgtgcgtaagggacaccctttgctggtagctgtcaagatcttacggccagatgccaccaagaatgccaggaatgatttcctgaaagaggtgaagatcatgtcgaggctcaaggaccccaacatcattcggctgctgggcgtgtgtgtgcaggacgaccccctctgcatgattactgactacatggagaacggcgacctcaaccagttcctcagtgcccaccagctggaggacaaggcagccgagggggcccctggggacgggcaggctgcgcaggggcccaccatcagctacccaatgctgctgcatgtggcagcccagatcgcctccggcatgcgctatctggccacactcaactttgtacatcgggacctggccacgcggaactgcctagttggggaaaatttcaccatcaaaatcgcagactttggcatgagccggaacctctatgctggggactattaccgtgtgcagggccgggcagtgctgcccatccgctggatggcctgggagtgcatcctcatggggaagttcacgactgcgagtgacgtgtgggcctttggtgtgaccctgtgggaggtgctgatgctctgtagggcccagccctttgggcagctcaccgacgagcaggtcatcgagaacgcgggggagttcttccgggaccagggccggcaggtgtacctgtcccggccgcctgcctgcccgcagggcctatatgagctgatgcttcggtgctggagccgggagtctgagcagcgaccacccttttcccagctgcatcggttcctggcagaggatgcactcaacacggtgtgaatcacacatccagctgcccctccctcagggagtgatccaggggaagccagtgacactaaaacaagaggacacaatggcacctctgcccttcccctcccgacagcccatcacctctaatagaggcagtgagactgcaggtgggctgggcccacccagggagctgatgccccttctccccttcctggacacactctcatgtccccttcctgttcttccttcctagaagcccctgtcgcccacccagctggtcctgtggatgggatcctctccaccctcctctagccatcccttggggaagggtggggagaaatataggatagacactggacatggcccattggagcacctgggccccactggacaacactgattcctggagaggtggctgcgcccccagcttctctctccctgtcacacactggaccccactggctgagaatctgggggtgaggaggacaagaaggagaggaaaatgtttccttgtgcctgctcctgtacttgtcctcagcttgggcttcttcctcctccatcacctgaaacactggacctgggggtagccccgccccagccctcagtcacccccacttcccacctgcagtcttgtagctagaacttctctaagcctatacgtttctgtggagtaaatattgggattggggggaaagagggagcaacggcccatagccttggggttggacatctctagtgtagctgccacattgatttttctataatcacttggggtttgtacatttttggggggagagacacagatttttacactaatatatggacctagcttgaggcaattttaatcccctgcactaggcaggtaataataaaggttgagttttccacaa

SEQ ID NO: 127166 - DNA, 1118 bp, Homo sapiens
  Payload ID: 4905
  Gene Symbol: DDR1
  Gene Name: discoidin domain receptor tyrosine kinase 1
  ENST ID: ENST00000426303
  CDS Start-End: 367-1118
gaggaactgagaggagaaggagaagagagtgggcccgccttcagggtctggggccttccaggttgggtcgtaggggcgggagcgcacaggctgcgagagaggagcaaaggttggtggagggagaagagcagtctggggcctggctggacaggcccccgacagctgctctcgggagccgcctcccgacacccgagccccgccggcgcctcccgctcccggctcccggctcctggctccctccgcctcccccgcccctcgccccgccgccgaagaggccccgctcccgggtcggacgcctgggtctgccgggaagagcgatgagagagatgctgcccccacccccttaggcccgagggatcaggagctatgggaccagaggccctgtcatctttactgctgctgctcttggtggcaagtggagatgctgacatgaagggacattttgatcctgccaagtgccgctatgccctgggcatgcaggaccggaccatcccagacagtgacatctctgcttccagctcctggtcagattccactgccgcccgccacagcaggttggagagcagtgacggggatggggcctggtgccccgcagggtcggtgtttcccaaggaggaggagtacttgcaggtggatctacaacgactgcacctggtggctctggtgggcacccagggacggcatgccgggggcctgggcaaggagttctcccggagctaccggctgcgttactcccgggatggtcgccgctggatgggctggaaggaccgctggggtcaggaggtgatctcaggcaatgaggaccctgagggagtggtgctgaaggaccttgggccccccatggttgcccgactggttcgcttctacccccgggctgaccgggtcatgagcgtctgtctgcgggtagagctctatggctgcctctggagggatggactcctgtcttacaccgcccctgtggggcagacaatgtatttatctgaggccgtgtacctcaacgactccacctatgacggacataccgtgggcggactgcagtatgggggtctgggccagctggcagatggtgtggtggggctggatgactttaggaagagtcaggagctgcgggtctggcc

SEQ ID NO: 127167 - DNA, 3968 bp, Homo sapiens; identical to SEQ ID NO: 127133
  Payload ID: 4905
  Gene Symbol: DDR1
  Gene Name: discoidin domain receptor tyrosine kinase 1
  Uniprot ID: Q08345
  ENST ID: ENST00000429699
  CDS Start-End: 367-3108

SEQ ID NO: 127168 - DNA, 515 bp, Homo sapiens; identical to SEQ ID NO: 127147
  Payload ID: 4905
  Gene Symbol: DDR1
  Gene Name: discoidin domain receptor tyrosine kinase 1
  ENST ID: ENST00000421499
  CDS Start-End: 99-515

SEQ ID NO: 127169 - DNA, 459 bp, Homo sapiens; identical to SEQ ID NO: 127143
  Payload ID: 4905
  Gene Symbol: DDR1
  Gene Name: discoidin domain receptor tyrosine kinase 1
  ENST ID: ENST00000429955
  CDS Start-End: 43-459

SEQ ID NO: 127170 - DNA, 560 bp, Homo sapiens
  Payload ID: 4905
  Gene Symbol: DDR1
  Gene Name: discoidin domain receptor tyrosine kinase 1
  ENST ID: ENST00000445017
  CDS Start-End: 118-560
cgttggaacgtccttgggcttctgaactagtgcccatgtgtgcctcggcctttcccaagggccagcttcttcctgagatgctgcccccacccccttaggcccgagggatcaggagctatgggaccagaggccctgtcatctttactgctgctgctcttggtggcaagtggagatgctgacatgaagggacattttgatcctgccaagtgccgctatgccctgggcatgcaggaccggaccatcccagacagtgacatctctgcttccagctcctggtcagattccactgccgcccgccacagcaggttggagagcagtgacggggatggggcctggtgccccgcagggtcggtgtttcccaaggaggaggagtacttgcaggtggatctacaacgactccacctggtggctctggtgggcacccagggacggcatgccgggggcctgggcaaggagttctcccggagctaccggctgcgttactcccgggatggtcgccgctggatgggctggaaggaccgctggggtcaggaggtgatctcaggcaatgaggaccctga

SEQ ID NO: 127171 - DNA, 799 bp, Homo sapiens; identical to SEQ ID NO: 127163
  Payload ID: 4905
  Gene Symbol: DDR1
  Gene Name: discoidin domain receptor tyrosine kinase 1
  ENST ID: ENST00000439772
  CDS Start-End: 172-799

SEQ ID NO: 127172 - DNA, 1479 bp, Homo sapiens; identical to SEQ ID NO: 127140
  Payload ID: 4905
  Gene Symbol: DDR1
  Gene Name: discoidin domain receptor tyrosine kinase 1
  ENST ID: ENST00000414378
  CDS Start-End: 1-1479

SEQ ID NO: 127173 - DNA, 1106 bp, Homo sapiens
  Payload ID: 4905
  Gene Symbol: DDR1
  Gene Name: discoidin domain receptor tyrosine kinase 1
  ENST ID: ENST00000421672
  CDS Start-End: 355-1106
gatcccagaagtaggaggggcgtcttcccctcgtgggccctgagcgggactgcagccagccccctggggcgccagctttggaggcccccgacagctgctctcgggagccgcctcccgacacccgagccccgccggcgcctcccgctcccggctcccggctcctggctccctccgcctcccccgcccctcgccccgccgccgaagaggccccgctcccgggtcggacgcctgggtctgccgggaagagcgatgagaggtgtctgaaggtggctattcactgagcgatggggttggacttgaaggaatgccaagagatgctgcccccacccccttaggcccgagggatcaggagctatgggaccagaggccctgtcatctttactgctgctgctcttggtggcaagtggagatgctgacatgaagggacattttgatcctgccaagtgccgctatgccctgggcatgcaggaccggaccatcccagacagtgacatctctgcttccagctcctggtcagattccactgccgcccgccacagcaggttggagagcagtgacggggatggggcctggtgccccgcagggtcggtgtttcccaaggaggaggagtacttgcaggtggatctacaacgactgcacctggtggctctggtgggcacccagggacggcatgccgggggcctgggcaaggagttctcccggagctaccggctgcgttactcccgggatggtcgccgctggatgggctggaaggaccgctggggtcaggaggtgatctcaggcaatgaggaccctgagggagtggtgctgaaggaccttgggccccccatggttgcccgactggttcgcttctacccccgggctgaccgggtcatgagcgtctgtctgcgggtagagctctatggctgcctctggagggatggactcctgtcttacaccgcccctgtggggcagacaatgtatttatctgaggccgtgtacctcaacgactccacctatgacggacataccgtgggcggactgcagtatgggggtctgggccagctggcagatggtgtggtggggctggatgactttaggaagagtcaggagctgcgggtctggcc

SEQ ID NO: 127174 - DNA, 799 bp, Homo sapiens; identical to SEQ ID NO: 127163
  Payload ID: 4905
  Gene Symbol: DDR1
  Gene Name: discoidin domain receptor tyrosine kinase 1
  ENST ID: ENST00000419285
  CDS Start-End: 172-799

SEQ ID NO: 127175 - DNA, 232 bp, Homo sapiens
  Payload ID: 4905
  Gene Symbol: DDR1
  Gene Name: discoidin domain receptor tyrosine kinase 1
  ENST ID: ENST00000430486
  CDS Start-End: 43-232
agatgctgcccccacccccttaggcccgagggatcaggagctatgggaccagaggccctgtcatctttactgctgctgctcttggtggcaagtggagatgctgacatgaagggacattttgatcctgccaagtgccgctatgccctgggcatgcaggaccggaccatcccagacagtgacatctctgcttccagctcctggtcagattccactgccgcccgccacagcaggt

SEQ ID NO: 127176 - DNA, 3857 bp, Homo sapiens
  Payload ID: 4905
  Gene Symbol: DDR1
  Gene Name: discoidin domain receptor tyrosine kinase 1
  Uniprot ID: Q08345
  ENST ID: ENST00000452441
  CDS Start-End: 260-3001
tgctctcgggagccgcctcccgacacccgagccccgccggcgcctcccgctcccggctcccggctcctggctccctccgcctcccccgcccctcgccccgccgccgaagaggccccgctcccgggtcggacgcctgggtctgccgggaagagcgatgagaggtgtctgaaggtggctattcactgagcgatggggttggacttgaaggaatgccaagagatgctgcccccacccccttaggcccgagggatcaggagctatgggaccagaggccctgtcatctttactgctgctgctcttggtggcaagtggagatgctgacatgaagggacattttgatcctgccaagtgccgctatgccctgggcatgcaggaccggaccatcccagacagtgacatctctgcttccagctcctggtcagattccactgccgcccgccacagcaggttggagagcagtgacggggatggggcctggtgccccgcagggtcggtgtttcccaaggaggaggagtacttgcaggtggatctacaacgactgcacctggtggctctggtgggcacccagggacggcatgccgggggcctgggcaaggagttctcccggagctaccggctgcgttactcccgggatggtcgccgctggatgggctggaaggaccgctggggtcaggaggtgatctcaggcaatgaggaccctgagggagtggtgctgaaggaccttgggccccccatggttgcccgactggttcgcttctacccccgggctgaccgggtcatgagcgtctgtctgcgggtagagctctatggctgcctctggagggatggactcctgtcttacaccgcccctgtggggcagacaatgtatttatctgaggccgtgtacctcaacgactccacctatgacggacataccgtgggcggactgcagtatgggggtctgggccagctggcagatggtgtggtggggctggatgactttaggaagagtcaggagctgcgggtctggccaggctatgactatgtgggatggagcaaccacagcttctccagtggctatgtggagatggagtttgagtttgaccggctgagggccttccaggctatgcaggtccactgtaacaacatgcacacgctgggagcccgtctgcctggcggggtggaatgtcgcttccggcgtggccctgccatggcctgggagggggagcccatgcgccacaacctagggggcaacctgggggaccccagagcccgggctgtctcagtgccccttggcggccgtgtggctcgctttctgcagtgccgcttcctctttgcggggccctggttactcttcagcgaaatctccttcatctctgatgtggtgaacaattcctctccggcactgggaggcaccttcccgccagccccctggtggccgcctggcccacctcccaccaacttcagcagcttggagctggagcccagaggccagcagcccgtggccaaggccgaggggagcccgaccgccatcctcatcggctgcctggtggccatcatcctgctcctgctgctcatcattgccctcatgctctggcggctgcactggcgcaggctcctcagcaaggctgaacggagggtgttggaagaggagctgacggttcacctctctgtccctggggacactatcctcatcaacaaccgcccaggtcctagagagccacccccgtaccaggagccccggcctcgtgggaatccgccccactccgctccctgtgtccccaatggctctgcgttgctgctctccaatccagcctaccgcctccttctggccacttacgcccgtccccctcgaggcccgggcccccccacacccgcctgggccaaacccaccaacacccaggcctacagtggggactatatggagcctgagaagccaggcgccccgcttctgcccccacctccccagaacagcgtcccccattatgccgaggctgacattgttaccctgcagggcgtcaccgggggcaacacctatgctgtgcctgcactgcccccaggggcagtcggggatgggccccccagagtggatttccctcgatctcgactccgcttcaaggagaagcttggcgagggccagtttggggaggtgcacctgtgtgaggtcgacagccctcaagatctggttagtcttgatttcccccttaatgtgcgtaagggacaccctttgctggtagctgtcaagatcttacggccagatgccaccaagaatgccaggaatgatttcctgaaagaggtgaagatcatgtcgaggctcaaggacccaaacatcattcggctgctgggcgtgtgtgtgcaggacgaccccctctgcatgattactgactacatggagaacggcgacctcaaccagttcctcagtgcccaccagctggaggacaaggcagccgagggggcccctggggacgggcaggctgcgcaggggcccaccatcagctacccaatgctgctgcatgtggcagcccagatcgcctccggcatgcgctatctggccacactcaactttgtacatcgggacctggccacgcggaactgcctagttggggaaaatttcaccatcaaaatcgcagactttggcatgagccggaacctctatgctggggactattaccgtgtgcagggccgggcagtgctgcccatccgctggatggcctgggagtgcatcctcatggggaagttcacgactgcgagtgacgtgtgggcctttggtgtgaccctgtgggaggtgctgatgctctgtagggcccagccctttgggcagctcaccgacgagcaggtcatcgagaacgcgggggagttcttccgggaccagggccggcaggtgtacctgtcccggccgcctgcctgcccgcagggcctatatgagctgatgcttcggtgctggagccgggagtctgagcagcgaccacccttttcccagctgcatcggttcctggcagaggatgcactcaacacggtgtgaatcacacatccagctgcccctccctcagggagcgatccaggggaagccagtgacactaaaacaagaggacacaatggcacctctgcccttcccctcccgacagcccatcacctctaatagaggcagtgagactgcaggtgggctgggcccacccagggagctgatgccccttctccccttcctggacacactctcatgtccccttcctgttcttccttcctagaagcccctgtcgcccacccagctggtcctgtggatgggatcctctccaccctcctctagccatcccttggggaagggtggggagaaatataggatagacactggacatggcccattggagcacctgggccccactggacaacactgattcctggagaggtggctgcgcccccagcttctctctccctgtcacacactggaccccactggctgagaatctgggggtgaggaggacaagaaggagaggaaaatgtttccttgtgcctgctcctgtacttgtcctcagcttgggcttcttcctcctccatcacctgaaacactggacctgggggtagccccgccccagccctcagtcacccccacttcccacttgcagtcttgtagctagaacttctctaagcctatacgtttctgtggagtaaatattgggattggggggaaagagggagcaacggcccatagccttggggttggacatctctagtgtagctgccacattgatttttctataatcacttggggtttgtacatttttggggggagagacacagatttttacactaatatatggacctagcttgaggcaattttaatcccctgcactaggcaggtaataataaaggttgagttttcc

SEQ ID NO: 127177 - DNA, 1479 bp, Homo sapiens
  Payload ID: 4905
  Gene Symbol: DDR1
  Gene Name: discoidin domain receptor tyrosine kinase 1
  ENST ID: ENST00000433244
  CDS Start-End: 1-1479
tctgaggccgtgtacctcaacgactccacctatgacggacataccgtgggcggactgcagtatgggggtctgggccagctggcagatggtgtggtggggctggatgactttaggaagagtcaggagctgcgggtctggccaggctatgactatgtgggatggagcaaccacagcttctccagtggctatgtggagatggagtttgagtttgaccggctgagggccttccaggctatgcaggtccactgtaacaacatgcacacgctgggagcccgtctgcctggcggggtggaatgtcgcttccggcgtggccctgccatggcctgggagggggagcccatgcgccacaacctagggggcaacctgggggaccccagagcccgggctgtctcagtgccccttggcggccgtgtggctcgctttctgcagtgccgcttcctctttgcggggccctggttactcttcagcgaaatctccttcatctctgatgtggtgaacaattcctctccggcactgggaggcaccttcccgccagccccctggtggccgcctggcccacctcccaccaacttcagcagcttggagctggagcccagaggccagcagcccgtggccaaggccgaggggagcccgaccgccatcctcatcggctgcctggtggccatcatcctgctcctgctgctcatcattgccctcatgctctggcggctgcactggcgcaggctcctcagcaaggtcctagagagccacccccgtaccaggagccccggcctcgtgggaatccgccccactccgctccctgtgtccccaatggctctgcgttgctgctctccaatccagcctaccgcctccttctggccacttacgcccgtccccctcgaggcccgggcccccccacacccgcctgggccaaacccaccaacacccaggggcgtcaccgggggcaacacctatgctgtgcctgcactgcccccaggggcagtcggggatgggccccccagagtggatttccctcgatctcgactccgcttcaaggagaagcttggcgagggccagtttggggaggtgcacctgtgtgaggtcgacagccctcaagatctggtcagtcttgatttcccccttaatgtgcgtaagggacaccctttgctggtagctgtcaagatcttacggccagatgccaccaagaatgccaggaatgatttcctgaaagaggtgaagatcatgtcgaggctcaaggaccccaacatcattcggctgctgggcgtgtgtgtgcaggacgaccccctctgcatgattactgactacatggagaacggcgacctcaaccagttcctcagtgcccaccagctggaggacaaggcagccgagggggcccctggggacgggcaggctgcgcaggggcccaccatcagctacccaatgctgctgcatgtggcagcccagatcgcctccggcatgcgctatctggccacactcaac

SEQ ID NO: 127178 - DNA, 3678 bp, Homo sapiens
  Payload ID: 4905
  Gene Symbol: DDR1
  Gene Name: discoidin domain receptor tyrosine kinase 1
  Uniprot ID: Q08345
  ENST ID: ENST00000415092
  CDS Start-End: 188-2818
ctcccgacacccgagccccgccggcgcctcccgctcccggctcccggctcctggctccctccgcctcccccgcccctcgccccgccgccgaagaggccccgctcccgggtcggacgcctgggtctgccgggaagagcgatgagagagatgctgcccccacccccttaggcccgagggatcaggagctatgggaccagaggccctgtcatctttactgctgctgctcttggtggcaagtggagatgctgacatgaagggacattttgatcctgccaagtgccgctatgccctgggcatgcaggaccggaccatcccagacagtgacatctctgcttccagctcctggtcagattccactgccgcccgccacagcaggttggagagcagtgacggggatggggcctggtgccccgcagggtcggtgtttcccaaggaggaggagtacttgcaggtggatctacaacgactccacctggtggctctggtgggcacccagggacggcatgccgggggcctgggcaaggagttctcccggagctaccggctgcgttactcccgggatggtcgccgctggatgggctggaaggaccgctggggtcaggaggtgatctcaggcaatgaggaccctgagggagtggtgctgaaggaccttgggccccccatggttgcccgactggttcgcttctacccccgggctgaccgggtcatgagtgtctgtctgcgggtagagctctatggctgcctctggagggatggactcctgtcttacaccgcccctgtggggcagacaatgtatttatctgaggccgtgtacctcaacgactccacctatgacggacataccgtgggcggactgcagtatgggggtctgggccagctggcagatggtgtggtggggctggatgactttaggaagagtcaggagctgcgggtctggccaggctatgactatgtgggatggagcaaccacagcttctccagtggctatgtggagatggagtttgagtttgaccggctgagggccttccaggctatgcaggtccactgtaacaacatgcacacgctgggagcccgtctgcctggcggggtggaatgtcgcttccggcgtggccctgccatggcctgggagggggagcccatgcgccacaacctagggggcaacctgggggaccccagagcccgggctgtctcagtgccccttggcggccgtgtggctcgctttctgcagtgccgcttcctctttgcggggccctggttactcttcagcgaaatctccttcatctctgatgtggtgaacaattcctctccggcactgggaggcaccttcccgccagccccctggtggccgcctggcccacctcccaccaacttcagcagcttggagctggagcccagaggccagcagcccgtggccaaggccgaggggagcccgaccgccatcctcatcggctgcctggtggccatcatcctgctcctgctgctcatcattgccctcatgctctggcggctgcactggcgcaggctcctcagcaaggctgaacggagggtgttggaagaggagctgacggttcacctctctgtccctggggacactatcctcatcaacaaccgcccaggtcctagagagccacccccgtaccaggagccccggcctcgtgggaatccgccccactccgctccctgtgtccccaatggctctgcctacagtggggactatatggagcctgagaagccaggcgccccgcttctgcccccacctccccagaacagcgtcccccattatgccgaggctgacattgttaccctgcagggcgtcaccgggggcaacacctatgctgtgcctgcactgcccccaggggcagtcggggatgggccccccagagtggatttccctcgatctcgactccgcttcaaggagaagcttggcgagggccagtttggggaggtgcacctgtgtgaggtcgacagccctcaagatctggtcagtcttgatttcccccttaatgtgcgtaagggacaccctttgctggtagctgtcaagatcttacggccagatgccaccaagaatgccaggaatgatttcctgaaagaggtgaagatcatgtcgaggctcaaggaccccaacatcattcggctgctgggcgtgtgtgtgcaggacgaccccctctgcatgattactgactacatggagaacggcgacctcaaccagttcctcagtgcccaccagctggaggacaaggcagccgagggggcccctggggacgggcaggctgcgcaggggcccaccatcagctacccaatgctgctgcatgtggcagcccagatcgcctccggcatgcgctatctggccacactcaactttgtacatcgggacctggccacgcggaactgcctagttggggaaaatttcaccatcaaaatcgcagactttggcatgagccggaacctctatgctggggactattaccgtgtgcagggccgggcagtgctgcccatccgctggatggcctgggagtgcatcctcatggggaagttcacgactgcgagtgacgtgtgggcctttggtgtgaccctgtgggaggtgctgatgctctgtagggcccagccctttgggcagctcaccgacgagcaggtcatcgagaacgcgggggagttcttccgggaccagggccggcaggtgtacctgtcccggccgcctgcctgcccgcagggcctatatgagctgatgcttcggtgctggagccgggagtctgagcagcgaccacccttttcccagctgcatcggttcctggcagaggatgcactcaacacggtgtgaatcacacatccagctgcccctccctcagggagtgatccaggggaagccagtgacactaaaacaagaggacacaatggcacctctgcccttcccctcccgacagcccatcacctctaatagaggcagtgagactgcaggtgggctgggcccacccagggagctgatgccccttctccccttcctggacacactctcatgtccccttcctgttcttccttcctagaagcccctgtcgcccacccagctggtcctgtggatgggatcctctccaccctcctctagccatcccttggggaagggtggggagaaatataggatagacactggacatggcccattggagcacctgggccccactggacaacactgattcctggagaggtggctgcgcccccagcttctctctccctgtcacacactggaccccactggctgagaatctgggggtgaggaggacaagaaggagaggaaaatgtttccttgtgcctgctcctgtacttgtcctcagcttgggcttcttcctcctccatcacctgaaacactggacctgggggtagccccgccccagccctcagtcacccccacttcccacctgcagtcttgtagctagaacttctctaagcctatacgtttctgtggagtaaatattgggattggggggaaagagggagcaacggcccatagccttggggttggacatctctagtgtagctgccacattgatttttctataatcacttggggtttgtacatttttggggggagagacacagatttttacactaatatatggacctagcttgaggcaattttaatcccctgcactaggcaggtaataataaaggttgagttttccacaa

SEQ ID NO: 127179 - DNA, 1996 bp, Homo sapiens; identical to SEQ ID NO: 127152
  Payload ID: 4905
  Gene Symbol: DDR1
  Gene Name: discoidin domain receptor tyrosine kinase 1
  ENST ID: ENST00000446697
  CDS Start-End: 1-1136

SEQ ID NO: 127180 - DNA, 3202 bp, Homo sapiens
  Payload ID: 4905
  Gene Symbol: DDR1
  Gene Name: discoidin domain receptor tyrosine kinase 1
  ENST ID: ENST00000446312
  CDS Start-End: 43-2346
agatgctgcccccacccccttaggcccgagggatcaggagctatgggaccagaggccctgtcatctttactgctgctgctcttggtggcaagtggagatgctgacatgaagggacattttgatcctgccaagtgccgctatgccctgggcatgcaggaccggaccatcccagacagtgacatctctgcttccagctcctggtcagattccactgccgcccgccacagcaggttggagagcagtgacggggatggggcctggtgccccgcagggtcggtgtttcccaaggaggaggagtacttgcaggtggatctacaacgactgcacctggtggctctggtgggcacccagggacggcatgccgggggcctgggcaaggagttctcccggagctaccggctgcgttactcccgggatggtcgccgctggatgggctggaaggaccgctggggtcaggaggtgatctcaggcaatgaggaccctgagggagtggtgctgaaggaccttgggccccccatggttgcccgactggttcgcttctacccccgggctgaccgggtcatgagcgtctgtctgcgggtagagctctatggctgcctctggagggatggactcctgtcttacaccgcccctgtggggcagacaatgtatttatctgaggccgtgtacctcaacgactccacctatgacggacataccgtgggcggactgcagtatgggggtctgggccagctggcagatggtgtggtggggctggatgactttaggaagagtcaggagctgcgggtctggccaggctatgactatgtgggatggagcaaccacagcttctccagtggctatgtggagatggagtttgagtttgaccggctgagggccttccaggctatgcaggtccactgtaacaacatgcacacgctgggagcccgtctgcctggcggggtggaatgtcgcttccggcgtggccctgccatggcctgggagggggagcccatgcgccacaacctagggggcaacctgggggaccccagagcccgggctgtctcagtgccccttggcggccgtgtggctcgctttctgcagtgccgcttcctctttgcggggccctggttactcttcagcgaaatctccttcatctctgatgtggtgaacaattcctctccggcactgggaggcaccttcccgccagccccctggtggccgcctggcccacctcccaccaacttcagcagcttggagctggagcccagaggccagcagcccgtggccaaggccgaggggagcccgaccgccatcctcatcggctgcctggtggccatcatcctgctcctgctgctcatcattgccctcatgctctggcggctgcactggcgcaggctcctcagcaaggtcctagagagccacccccgtaccaggagccccggcctcgtgggaatccgccccactccgctccctgtgtccccaatggctctggtgcacctgtgtgaggtcgacagccctcaagatctggttagtcttgatttcccccttaatgtgcgtaagggacaccctttgctggtagctgtcaagatcttacggccagatgccaccaagaatgccaggaatgatttcctgaaagaggtgaagatcatgtcgaggctcaaggacccaaacatcattcggctgctgggcgtgtgtgtgcaggacgaccccctctgcatgattactgactacatggagaacggcgacctcaaccagttcctcagtgcccaccagctggaggacaaggcagccgagggggcccctggggacgggcaggctgcgcaggggcccaccatcagctacccaatgctgctgcatgtggcagcccagatcgcctccggcatgcgctatctggccacactcaactttgtacatcgggacctggccacgcggaactgcctagttggggaaaatttcaccatcaaaatcgcagactttggcatgagccggaacctctatgctggggactattaccgtgtgcagggccgggcagtgctgcccatccgctggatggcctgggagtgcatcctcatggggaagttcacgactgcgagtgacgtgtgggcctttggtgtgaccctgtgggaggtgctgatgctctgtagggcccagccctttgggcagctcaccgacgagcaggtcatcgagaacgcgggggagttcttccgggaccagggccggcaggtgtacctgtcccggccgcctgcctgcccgcagggcctatatgagctgatgcttcggtgctggagccgggagtctgagcagcgaccacccttttcccagctgcatcggttcctggcagaggatgcactcaacacggtgtgaatcacacatccagctgcccctccctcagggagcgatccaggggaagccagtgacactaaaacaagaggacacaatggcacctctgcccttcccctcccgacagcccatcacctctaatagaggcagtgagactgcaggtgggctgggcccacccagggagctgatgccccttctccccttcctggacacactctcatgtccccttcctgttcttccttcctagaagcccctgtcgcccacccagctggtcctgtggatgggatcctctccaccctcctctagccatcccttggggaagggtggggagaaatataggatagacactggacatggcccattggagcacctgggccccactggacaacactgattcctggagaggtggctgcgcccccagcttctctctccctgtcacacactggaccccactggctgagaatctgggggtgaggaggacaagaaggagaggaaaatgtttccttgtgcctgctcctgtacttgtcctcagcttgggcttcttcctcctccatcacctgaaacactggacctgggggtagccccgccccagccctcagtcacccccacttcccacttgcagtcttgtagctagaacttctctaagcctatacgtttctgtggagtaaatattgggattggggggaaagagggagcaacggcccatagccttggggttggacatctctagtgtagctgccacattgatttttctataatcacttggggtttgtacatttttggggggagagacacagatttttacactaatatatggacctagcttgaggcaattttaatcccctgcactaggcaggtaataataaaggttgagttttcc

SEQ ID NO: 127181 - DNA, 485 bp, Homo sapiens; identical to SEQ ID NO: 127141
  Payload ID: 4905
  Gene Symbol: DDR1
  Gene Name: discoidin domain receptor tyrosine kinase 1
  ENST ID: ENST00000431334
  CDS Start-End: 296-485

SEQ ID NO: 127182 - DNA, 3942 bp, Homo sapiens
  Payload ID: 4905
  Gene Symbol: DDR1
  Gene Name: discoidin domain receptor tyrosine kinase 1
  Uniprot ID: Q08345
  ENST ID: ENST00000454612
  CDS Start-End: 452-3082
agattccccagctgctgttctctggaggggttcctggggcggagatgtgcagtggagcgagaacttcctgtgaccgtgacattgtctaggtggaaccgatcccagaagtaggaggggcgtcttcccctcgtgggccctgagcgggactgcagccagccccctggggcgccagctttggaggcccccgacagctgctctcgggagccgcctcccgacacccgagccccgccggcgcctcccgctcccggctcccggctcctggctccctccgcctcccccgcccctcgccccgccgccgaagaggccccgctcccgggtcggacgcctgggtctgccgggaagagcgatgagaggtgtctgaaggtggctattcactgagcgatggggttggacttgaaggaatgccaagagatgctgcccccacccccttaggcccgagggatcaggagctatgggaccagaggccctgtcatctttactgctgctgctcttggtggcaagtggagatgctgacatgaagggacattttgatcctgccaagtgccgctatgccctgggcatgcaggaccggaccatcccagacagtgacatctctgcttccagctcctggtcagattccactgccgcccgccacagcaggttggagagcagtgacggggatggggcctggtgccccgcagggtcggtgtttcccaaggaggaggagtacttgcaggtggatctacaacgactgcacctggtggctctggtgggcacccagggacggcatgccgggggcctgggcaaggagttctcccggagctaccggctgcgttactcccgggatggtcgccgctggatgggctggaaggaccgctggggtcaggaggtgatctcaggcaatgaggaccctgagggagtggtgctgaaggaccttgggccccccatggttgcccgactggttcgcttctacccccgggctgaccgggtcatgagcgtctgtctgcgggtagagctctatggctgcctctggagggatggactcctgtcttacaccgcccctgtggggcagacaatgtatttatctgaggccgtgtacctcaacgactccacctatgacggacataccgtgggcggactgcagtatgggggtctgggccagctggcagatggtgtggtggggctggatgactttaggaagagtcaggagctgcgggtctggccaggctatgactatgtgggatggagcaaccacagcttctccagtggctatgtggagatggagtttgagtttgaccggctgagggccttccaggctatgcaggtccactgtaacaacatgcacacgctgggagcccgtctgcctggcggggtggaatgtcgcttccggcgtggccctgccatggcctgggagggggagcccatgcgccacaacctagggggcaacctgggggaccccagagcccgggctgtctcagtgccccttggcggccgtgtggctcgctttctgcagtgccgcttcctctttgcggggccctggttactcttcagcgaaatctccttcatctctgatgtggtgaacaattcctctccggcactgggaggcaccttcccgccagccccctggtggccgcctggcccacctcccaccaacttcagcagcttggagctggagcccagaggccagcagcccgtggccaaggccgaggggagcccgaccgccatcctcatcggctgcctggtggccatcatcctgctcctgctgctcatcattgccctcatgctctggcggctgcactggcgcaggctcctcagcaaggctgaacggagggtgttggaagaggagctgacggttcacctctctgtccctggggacactatcctcatcaacaaccgcccaggtcctagagagccacccccgtaccaggagccccggcctcgtgggaatccgccccactccgctccctgtgtccccaatggctctgcctacagtggggactatatggagcctgagaagccaggcgccccgcttctgcccccacctccccagaacagcgtcccccattatgccgaggctgacattgttaccctgcagggcgtcaccgggggcaacacctatgctgtgcctgcactgcccccaggggcagtcggggatgggccccccagagtggatttccctcgatctcgactccgcttcaaggagaagcttggcgagggccagtttggggaggtgcacctgtgtgaggtcgacagccctcaagatctggttagtcttgatttcccccttaatgtgcgtaagggacaccctttgctggtagctgtcaagatcttacggccagatgccaccaagaatgccaggaatgatttcctgaaagaggtgaagatcatgtcgaggctcaaggacccaaacatcattcggctgctgggcgtgtgtgtgcaggacgaccccctctgcatgattactgactacatggagaacggcgacctcaaccagttcctcagtgcccaccagctggaggacaaggcagccgagggggcccctggggacgggcaggctgcgcaggggcccaccatcagctacccaatgctgctgcatgtggcagcccagatcgcctccggcatgcgctatctggccacactcaactttgtacatcgggacctggccacgcggaactgcctagttggggaaaatttcaccatcaaaatcgcagactttggcatgagccggaacctctatgctggggactattaccgtgtgcagggccgggcagtgctgcccatccgctggatggcctgggagtgcatcctcatggggaagttcacgactgcgagtgacgtgtgggcctttggtgtgaccctgtgggaggtgctgatgctctgtagggcccagccctttgggcagctcaccgacgagcaggtcatcgagaacgcgggggagttcttccgggaccagggccggcaggtgtacctgtcccggccgcctgcctgcccgcagggcctatatgagctgatgcttcggtgctggagccgggagtctgagcagcgaccacccttttcccagctgcatcggttcctggcagaggatgcactcaacacggtgtgaatcacacatccagctgcccctccctcagggagcgatccaggggaagccagtgacactaaaacaagaggacacaatggcacctctgcccttcccctcccgacagcccatcacctctaatagaggcagtgagactgcaggtgggctgggcccacccagggagctgatgccccttctccccttcctggacacactctcatgtccccttcctgttcttccttcctagaagcccctgtcgcccacccagctggtcctgtggatgggatcctctccaccctcctctagccatcccttggggaagggtggggagaaatataggatagacactggacatggcccattggagcacctgggccccactggacaacactgattcctggagaggtggctgcgcccccagcttctctctccctgtcacacactggaccccactggctgagaatctgggggtgaggaggacaagaaggagaggaaaatgtttccttgtgcctgctcctgtacttgtcctcagcttgggcttcttcctcctccatcacctgaaacactggacctgggggtagccccgccccagccctcagtcacccccacttcccacttgcagtcttgtagctagaacttctctaagcctatacgtttctgtggagtaaatattgggattggggggaaagagggagcaacggcccatagccttggggttggacatctctagtgtagctgccacattgatttttctataatcacttggggtttgtacatttttggggggagagacacagatttttacactaatatatggacctagcttgaggcaattttaatcccctgcactaggcaggtaataataaaggttgagttttccacaa

SEQ ID NO: 127183 - DNA, 485 bp, Homo sapiens; identical to SEQ ID NO: 127141
  Payload ID: 4905
  Gene Symbol: DDR1
  Gene Name: discoidin domain receptor tyrosine kinase 1
  ENST ID: ENST00000448263
  CDS Start-End: 296-485

SEQ ID NO: 127184 - DNA, 459 bp, Homo sapiens; identical to SEQ ID NO: 127143
  Payload ID: 4905
  Gene Symbol: DDR1
  Gene Name: discoidin domain receptor tyrosine kinase 1
  ENST ID: ENST00000458576
  CDS Start-End: 43-459

SEQ ID NO: 127185 - DNA, 560 bp, Homo sapiens; identical to SEQ ID NO: 127125
  Payload ID: 4905
  Gene Symbol: DDR1
  Gene Name: discoidin domain receptor tyrosine kinase 1
  ENST ID: ENST00000454377
  CDS Start-End: 118-560

SEQ ID NO: 127186 - DNA, 580 bp, Homo sapiens; identical to SEQ ID NO: 127154
  Payload ID: 4905
  Gene Symbol: DDR1
  Gene Name: discoidin domain receptor tyrosine kinase 1
  ENST ID: ENST00000435818
  CDS Start-End: 81-580

SEQ ID NO: 127187 - DNA, 3588 bp, Homo sapiens
  Payload ID: 4905
  Gene Symbol: DDR1
  Gene Name: discoidin domain receptor tyrosine kinase 1
  Uniprot ID: Q08345
  ENST ID: ENST00000418800
  CDS Start-End: 414-3044
agcctagagctggggcgaggtgggcatcaccactaggaatttctcctgaggcagtgagaagaggggacaaaggtttcaggactctctagctccttctgctctccccagtggacccctctgtctggcactgccatgccacttagctggggtcagcgtgggcctggggtgtggaatgtcccaccagggtatgacgggctgtagcttgcctggcaggcctgttggggctttcccagagcacagctcctggaaggaggggctgtgggctgccaggtgaggtgacttgggaagccttggccccacccccaggctggccccacccccagtccagcgtctcctgggcctagattccccagctgctgttctctggagggagatgctgcccccacccccttaggcccgagggatcaggagctatgggaccagaggccctgtcatctttactgctgctgctcttggtggcaagtggagatgctgacatgaagggacattttgatcctgccaagtgccgctatgccctgggcatgcaggaccggaccatcccagacagtgacatctctgcttccagctcctggtcagattccactgccgcccgccacagcaggttggagagcagtgacggggatggggcctggtgccccgcagggtcggtgtttcccaaggaggaggagtacttgcaggtggatctacaacgactgcacctggtggctctggtgggcacccagggacggcatgccgggggcctgggcaaggagttctcccggagctaccggctgcgttactcccgggatggtcgccgctggatgggctggaaggaccgctggggtcaggaggtgatctcaggcaatgaggaccctgagggagtggtgctgaaggaccttgggccccccatggttgcccgactggttcgcttctacccccgggctgaccgggtcatgagcgtctgtctgcgggtagagctctatggctgcctctggagggatggactcctgtcttacaccgcccctgtggggcagacaatgtatttatctgaggccgtgtacctcaacgactccacctatgacggacataccgtgggcggactgcagtatgggggtctgggccagctggcagatggtgtggtggggctggatgactttaggaagagtcaggagctgcgggtctggccaggctatgactatgtgggatggagcaaccacagcttctccagtggctatgtggagatggagtttgagtttgaccggctgagggccttccaggctatgcaggtccactgtaacaacatgcacacgctgggagcccgtctgcctggcggggtggaatgtcgcttccggcgtggccctgccatggcctgggagggggagcccatgcgccacaacctagggggcaacctgggggaccccagagcccgggctgtctcagtgccccttggcggccgtgtggctcgctttctgcagtgccgcttcctctttgcggggccctggttactcttcagcgaaatctccttcatctctgatgtggtgaacaattcctctccggcactgggaggcaccttcccgccagccccctggtggccgcctggcccacctcccaccaacttcagcagcttggagctggagcccagaggccagcagcccgtggccaaggccgaggggagcccgaccgccatcctcatcggctgcctggtggccatcatcctgctcctgctgctcatcattgccctcatgctctggcggctgcactggcgcaggctcctcagcaaggctgaacggagggtgttggaagaggagctgacggttcacctctctgtccctggggacactatcctcatcaacaaccgcccaggtcctagagagccacccccgtaccaggagccccggcctcgtgggaatccgccccactccgctccctgtgtccccaatggctctgcctacagtggggactatatggagcctgagaagccaggcgccccgcttctgcccccacctccccagaacagcgtcccccattatgccgaggctgacattgttaccctgcagggcgtcaccgggggcaacacctatgctgtgcctgcactgcccccaggggcagtcggggatgggccccccagagtggatttccctcgatctcgactccgcttcaaggagaagcttggcgagggccagtttggggaggtgcacctgtgtgaggtcgacagccctcaagatctggttagtcttgatttcccccttaatgtgcgtaagggacaccctttgctggtagctgtcaagatcttacggccagatgccaccaagaatgccaggaatgatttcctgaaagaggtgaagatcatgtcgaggctcaaggacccaaacatcattcggctgctgggcgtgtgtgtgcaggacgaccccctctgcatgattactgactacatggagaacggcgacctcaaccagttcctcagtgcccaccagctggaggacaaggcagccgagggggcccctggggacgggcaggctgcgcaggggcccaccatcagctacccaatgctgctgcatgtggcagcccagatcgcctccggcatgcgctatctggccacactcaactttgtacatcgggacctggccacgcggaactgcctagttggggaaaatttcaccatcaaaatcgcagactttggcatgagccggaacctctatgctggggactattaccgtgtgcagggccgggcagtgctgcccatccgctggatggcctgggagtgcatcctcatggggaagttcacgactgcgagtgacgtgtgggcctttggtgtgaccctgtgggaggtgctgatgctctgtagggcccagccctttgggcagctcaccgacgagcaggtcatcgagaacgcgggggagttcttccgggaccagggccggcaggtgtacctgtcccggccgcctgcctgcccgcagggcctatatgagctgatgcttcggtgctggagccgggagtctgagcagcgaccacccttttcccagctgcatcggttcctggcagaggatgcactcaacacggtgtgaatcacacatccagctgcccctccctcagggagcgatccaggggaagccagtgacactaaaacaagaggacacaatggcacctctgcccttcccctcccgacagcccatcacctctaatagaggcagtgagactgcaggtgggctgggcccacccagggagctgatgccccttctccccttcctggacacactctcatgtccccttcctgttcttccttcctagaagcccctgtcgcccacccagctggtcctgtggatgggatcctctccaccctcctctagccatcccttggggaagggtggggagaaatataggatagacactggacatggcccattggagcacctgggccccactggacaacactgattcctggagaggtggctgcgcccccagcttctctctccctgtcacacactggaccccactggctgagaatctgggggtgaggaggacaagaaggagaggaaaatgtttccttgtgcctgctcctgtacttgtcctcagcttgggcttcttcctcctccatcacctgaaacactg

SEQ ID NO: 127188 - DNA, 1996 bp, Homo sapiens
  Payload ID: 4905
  Gene Symbol: DDR1
  Gene Name: discoidin domain receptor tyrosine kinase 1
  ENST ID: ENST00000416487
  CDS Start-End: 1-1136
cctacagtggggactatatggagcctgagaagccaggcgccccgcttctgcccccacctccccagaacagcgtcccccattatgccgaggctgacattgttaccctgcagggcgtcaccgggggcaacacctatgctgtgcctgcactgcccccaggggcagtcggggatgggccccccagagtggatttccctcgatctcgactccgcttcaaggagaagcttggcgagggccagtttggggaggtgcacctgtgtgaggtcgacagccctcaagatctggtcagtcttgatttcccccttaatgtgcgtaagggacaccctttgctggtagctgtcaagatcttacggccagatgccaccaagaatgccagcttctccttgttctccaggaatgatttcctgaaagaggtgaagatcatgtcgaggctcaaggacccaaacatcattcggctgctgggcgtgtgtgtgcaggacgaccccctctgcatgattactgactacatggagaacggcgacctcaaccagttcctcagtgcccaccagctggaggacaaggcagccgagggggcccctggggacgggcaggctgcgcaggggcccaccatcagctacccaatgctgctgcatgtggcagcccagatcgcctccggcatgcgctatctggccacactcaactttgtacatcgggacctggccacgcggaactgcctagttggggaaaatttcaccatcaaaatcgcagactttggcatgagccggaacctctatgctggggactattaccgtgtgcagggccgggcagtgctgcccatccgctggatggcctgggagtgcatcctcatggggaagttcacgactgcgagtgacgtgtgggcctttggtgtgaccctgtgggaggtgctgatgctctgtagggcccagccctttgggcagctcaccgacgagcaggtcatcgagaacgcgggggagttcttccgggaccagggccggcaggtgtacctgtcccggccgcctgcctgcccgcagggcctatatgagctgatgcttcggtgctggagccgggagtctgagcagcgaccacccttttcccagctgcatcggttcctggcagaggatgcactcaacacggtgtgaatcacacatccagctgcccctccctcagggagcgatccaggggaagccagtgacactaaaacaagaggacacaatggcacctctgcccttcccctcccgacagcccatcacctctaatagaggcagtgagactgcaggtgggctgggcccacccagggagctgatgccccttctccccttcctggacacactctcatgtccccttcctgttcttccttcctagaagcccctgtcgcccacccagctggtcctgtggatgggatcctctccaccctcctctagccatcccttggggaagggtggggagaaatataggatagacactggacatggcccattggagcacctgggccccactggacaacactgattcctggagaggtggctgcgcccccagcttctctctccctgtcacacactggaccccactggctgagaatctgggggtgaggaagacaagaaggagaggaaaatgtttccttgtgcctgctcctgtacttgtcctcagcttgggcttcttcctcctccatcacctgaaacactggacctgggggtagccccgccccagccctcagtcacccccacttcccacttgcagtcttgtagctagaacttctctaagcctatacgtttctgtggagtaaatattgggattggggggaaagagggagcaacggcccatagccttggggttggacatctctagtgtagctgccacattgatttttctataatcacttggggtttgtacatttttggggggagagacacagatttttacactaatatatggacctagcttgaggcaattttaatcccctgcactaggcaggtaataataaaggttgagttttccacaa

SEQ ID NO: 127189 - DNA, 580 bp, Homo sapiens; identical to SEQ ID NO: 127154
  Payload ID: 4905
  Gene Symbol: DDR1
  Gene Name: discoidin domain receptor tyrosine kinase 1
  ENST ID: ENST00000438728
  CDS Start-End: 81-580

SEQ ID NO: 127190 - DNA, 587 bp, Homo sapiens
  Payload ID: 4905
  Gene Symbol: DDR1
  Gene Name: discoidin domain receptor tyrosine kinase 1
  ENST ID: ENST00000424544
  CDS Start-End: 1-587
atctttactgctgctgctcttggtggcaagtggagatgctgacatgaagggacattttgatcctgccaagtgccgctatgccctgggcatgcaggaccggaccatcccagacagtgacatctctgcttccagctcctggttggagagcagtgacggggatggggcctggtgccccgcagggtcggtgtttcccaaggaggaggagtacttgcaggtggatctacaacgactgcacctggtggctctggtgggcacccagggacggcatgccgggggcctgggcaaggagttctcccggagctaccggctgcgttactcccgggatggtcgccgctggatgggctggaaggaccgctggggtcaggaggtgatctcaggcaatgaggaccctgagggagtggtgctgaaggaccttgggccccccatggttgcccgactggttcgcttctacccccgggctgaccgggtcatgagcgtctgtctgcgggtagagctctatggctgcctctggagggatggactcctgtcttacaccgcccctgtggggcagacaatgtatttatctgaggccgtgtacctcaacgact

SEQ ID NO: 127191 - DNA, 800 bp, Homo sapiens
  Payload ID: 4905
  Gene Symbol: DDR1
  Gene Name: discoidin domain receptor tyrosine kinase 1
  ENST ID: ENST00000421124
  CDS Start-End: 173-800
actgccggtgagcgccagcttcagggtcccacccccccatgcctggctcttggctgaacatttcttcccagcgcttccagcagccagaggcaggcgcccaagctcgctggctgttgctgagggcctgtagagatgctgcccccacccccttaggcccgagggatcaggagctatgggaccagaggccctgtcatctttactgctgctgctcttggtggcaagtggagatgctgacatgaagggacattttgatcctgccaagtgccgctatgccctgggcatgcaggaccggaccatcccagacagtgacatctctgcttccagctcctggtcagattccactgccgcccgccacagcaggttggagagcagtgacggggatggggcctggtgccccgcagggtcggtgtttcccaaggaggaggagtacttgcaggtggatctacaacgactgcacctggtggctctggtgggcacccagggacggcatgccgggggcctgggcaaggagttctcccggagctaccggctgcgttactcccgggatggtcgccgctggatgggctggaaggaccgctggggtcaggaggtgatctcaggcaatgaggaccctgagggagtggtgctgaaggaccttgggccccccatggttgcccgactggttcgcttctacccccgggctgaccgggtcatgagcgtctgtctgcgggtagagctctatggctgcctctggagggatggactcctgtcttacaccgcccctgtggggcagacaatgtatttatctgaggccgtgtacc

SEQ ID NO: 127192 - DNA, 140 bp, Homo sapiens
  Payload ID: 4905
  Gene Symbol: DDR1
  Gene Name: discoidin domain receptor tyrosine kinase 1
  ENST ID: ENST00000448537
  CDS Start-End: 1-140
tctgaggccgtgtacctcaacgactccacctatgacggacataccgtgggcggactgcagtatgggggtctgggccagctggcagatggtgtggtggggctggatgactttaggaagagtcaggagctgcgggtctggcc

SEQ ID NO: 127193 - DNA, 3968 bp, Homo sapiens
  Payload ID: 4905
  Gene Symbol: DDR1
  Gene Name: discoidin domain receptor tyrosine kinase 1
  Uniprot ID: Q08345
  ENST ID: ENST00000449518
  CDS Start-End: 367-3108
gaggaactgagaggagaaggagaagagagtgggcccgccttcagggtctggggccttccaggttgggtcgtaggggcgggagcgcacaggctgcgagagaggagcaaaggttggtggagggagaagagcagtctggggcctggctggacaggcccccgacagctgctctcgggagccgcctcccgacacccgagccccgccggcgcctcccgctcccggctcccggctcctggctccctccgcctcccccgcccctcgccccgccgccgaagaggccccgctcccgggtcggacgcctgggtctgccgggaagagcgatgagagagatgctgcccccacccccttaggcccgagggatcaggagctatgggaccagaggccctgtcatctttactgctgctgctcttggtggcaagtggagatgctgacatgaagggacattttgatcctgccaagtgccgctatgccctgggcatgcaggaccggaccatcccagacagtgacatctctgcttccagctcctggtcagattccactgccgcccgccacagcaggttggagagcagtgacggggatggggcctggtgccccgcagggtcggtgtttcccaaggaggaggagtacttgcaggtggatctacaacgactccacctggtggctctggtgggcacccagggacggcatgccgggggcctgggcaaggagttctcccggagctaccggctgcgttactcccgggatggtcgccgctggatgggctggaaggaccgctggggtcaggaggtgatctcaggcaatgaggaccctgagggagtggtgctgaaggaccttgggccccccatggttgcccgactggttcgcttctacccccgggctgaccgggtcatgagtgtctgtctgcgggtagagctctatggctgcctctggagggatggactcctgtcttacaccgcccctgtggggcagacaatgtatttatctgaggccgtgtacctcaacgactccacctatgacggacataccgtgggcggactgcagtatgggggtctgggccagctggcagatggtgtggtggggctggatgactttaggaagagtcaggagctgcgggtctggccaggctatgactatgtgggatggagcaaccacagcttctccagtggctatgtggagatggagtttgagtttgaccggctgagggccttccaggctatgcaggtccactgtaacaacatgcacacgctgggagcccgtctgcctggcggggtggaatgtcgcttccggcgtggccctgccatggcctgggagggggagcccatgcgccacaacctagggggcaacctgggggaccccagagcccgggctgtctcagtgccccttggcggccgtgtggctcgctttctgcagtgccgcttcctctttgcggggccctggttactcttcagcgaaatctccttcatctctgatgtggtgaacaattcctctccggcactgggaggcaccttcccgccagccccctggtggccgcctggcccacctcccaccaacttcagcagcttggagctggagcccagaggccagcagcccgtggccaaggccgaggggagcccgaccgccatcctcatcggctgcctggtggccatcatcctgctcctgctgctcatcattgccctcatgctctggcggctgcactggcgcaggctcctcagcaaggctgaacggagggtgttggaagaggagctgacggttcacctctctgtccctggggacactatcctcatcaacaaccgcccaggtcctagagagccacccccgtaccaggagccccggcctcgtgggaatccgccccactccgctccctgtgtccccaatggctctgcgttgctgctctccaatccagcctaccgcctccttctggccacttacgcccgtccccctcgaggcccgggcccccccacacccgcctgggccaaacccaccaacacccaggcctacagtggggactatatggagcctgagaagccaggcgccccgcttctgcccccacctccccagaacagcgtcccccattatgccgaggctgacattgttaccctgcagggcgtcaccgggggcaacacctatgctgtgcctgcactgcccccaggggcagtcggggatgggccccccagagtggatttccctcgatctcgactccgcttcaaggagaagcttggcgagggccagtttggggaggtgcacctgtgtgaggtcgacagccctcaagatctggtcagtcttgatttcccccttaatgtgcgtaagggacaccctttgctggtagctgtcaagatcttacggccagatgccaccaagaatgccaggaatgatttcctgaaagaggtgaagatcatgtcgaggctcaaggaccccaacatcattcggctgctgggcgtgtgtgtgcaggacgaccccctctgcatgattactgactacatggagaacggcgacctcaaccagttcctcagtgcccaccagctggaggacaaggcagccgagggggcccctggggacgggcaggctgcgcaggggcccaccatcagctacccaatgctgctgcatgtggcagcccagatcgcctccggcatgcgctatctggccacactcaactttgtacatcgggacctggccacgcggaactgcctagttggggaaaatttcaccatcaaaatcgcagactttggcatgagccggaacctctatgctggggactattaccgtgtgcagggccgggcagtgctgcccatccgctggatggcctgggagtgcatcctcatggggaagttcacgactgcgagtgacgtgtgggcctttggtgtgaccctgtgggaggtgctgatgctctgtagggcccagccctttgggcagctcaccgacgagcaggtcatcgagaacgcgggggagttcttccgggaccagggccggcaggtgtacctgtcccggccgcctgcctgcccgcagggcctatatgagctgatgcttcggtgctggagccgggagtctgagcagcgaccacccttttcccagctgcatcggttcctggcagaggatgcactcaacacggtgtgaatcacacatccagctgcccctccctcagggagtgatccaggggaagccagtgacactaaaacaagaggacacaatggcacctctgcccttcccctcccgacagcccatcacctctaatagaggcagtgagactgcaggtgggctgggcccacccagggagctgatgccccttctccccttcctggacacactctcatgtccccttcctgttcttccttcctagaagcccctgtcgcccacccagctggtcctgtggatgggatcctctccaccctcctctagccatcccttggggaagggtggggagaaatataggatagacactggacatggcccattggagcacctgggccccactggacaacactgattcctggagaggtggctgcgcccccagcttctctctccctgtcacacactggaccccactggctgagaatctgggggtgaggaggacaagaaggagaggaaaatgtttccttgtgcctgctcctgtacttgtcctcagcttgggcttcttcctcctccatcacctgaaacactggacctgggggtagccccgccccagccctcagtcacccccacttcccacctgcagtcttgtagctagaacttctctaagcctatacgtttctgtggagtaaatattgggattggggggaaagagggagcaacggcccatagccttggggttggacatctctagtgtagctgccacattgatttttctataatcacttggggtttgtacatttttggggggagagacacagatttttacactaatatatggacctagcttgaggcaattttaatcccctgcactaggcaggtaataataaaggttgagttttccacaa

SEQ ID NO: 127194 - DNA, 459 bp, Homo sapiens; identical to SEQ ID NO: 127143
  Payload ID: 4905
  Gene Symbol: DDR1
  Gene Name: discoidin domain receptor tyrosine kinase 1
  ENST ID: ENST00000413115
  CDS Start-End: 43-459

SEQ ID NO: 127195 - DNA, 873 bp, Homo sapiens; identical to SEQ ID NO: 127137
  Payload ID: 4905
  Gene Symbol: DDR1
  Gene Name: discoidin domain receptor tyrosine kinase 1
  ENST ID: ENST00000440427
  CDS Start-End: 457-873

SEQ ID NO: 127196 - DNA, 3845 bp, Homo sapiens; identical to SEQ ID NO: 127132
  Payload ID: 4905
  Gene Symbol: DDR1
  Gene Name: discoidin domain receptor tyrosine kinase 1
  Uniprot ID: Q08345
  ENST ID: ENST00000421229
  CDS Start-End: 355-2985

SEQ ID NO: 127197 - DNA, 799 bp, Homo sapiens; identical to SEQ ID NO: 127163
  Payload ID: 4905
  Gene Symbol: DDR1
  Gene Name: discoidin domain receptor tyrosine kinase 1
  ENST ID: ENST00000434134
  CDS Start-End: 172-799

SEQ ID NO: 127198 - DNA, 799 bp, Homo sapiens
  Payload ID: 4905
  Gene Symbol: DDR1
  Gene Name: discoidin domain receptor tyrosine kinase 1
  ENST ID: ENST00000420929
  CDS Start-End: 172-799
ctgccggtgagcgccagcttcagggtcccacccccccatgcctggctcttggctgaacatttcttcccagcgcttccagcagccagaggcaggcgcccaagctcgctggctgttgctgagggcctgtagagatgctgcccccacccccttaggcccgagggatcaggagctatgggaccagaggccctgtcatctttactgctgctgctcttggtggcaagtggagatgctgacatgaagggacattttgatcctgccaagtgccgctatgccctgggcatgcaggaccggaccatcccagacagtgacatctctgcttccagctcctggtcagattccactgccgcccgccacagcaggttggagagcagtgacggggatggggcctggtgccccgcagggtcggtgtttcccaaggaggaggagtacttgcaggtggatctacaacgactccacctggtggctctggtgggcacccagggacggcatgccgggggcctgggcaaggagttctcccggagctaccggctgcgttactcccgggatggtcgccgctggatgggctggaaggaccgctggggtcaggaggtgatctcaggcaatgaggaccctgagggagtggtgctgaaggaccttgggccccccatggttgcccgactggttcgcttctacccccgggctgaccgggtcatgagtgtctgtctgcgggtagagctctatggctgcctctggagggatggactcctgtcttacaccgcccctgtggggcagacaatgtatttatctgaggccgtgtacc

SEQ ID NO: 127199 - DNA, 3845 bp, Homo sapiens
  Payload ID: 4905
  Gene Symbol: DDR1
  Gene Name: discoidin domain receptor tyrosine kinase 1
  Uniprot ID: Q08345
  ENST ID: ENST00000427053
  CDS Start-End: 355-2985
gatcccagaagtaggaggggcgtcttcccctcgtgggccctgagcgggactgcagccagccccctggggcgccagctttggaggcccccgacagctgctctcgggagccgcctcccgacacccgagccccgccggcgcctcccgctcccggctcccggctcctggctccctccgcctcccccgcccctcgccccgccgccgaagaggccccgctcccgggtcggacgcctgggtctgccgggaagagcgatgagaggtgtctgaaggtggctattcactgagcgatggggttggacttgaaggaatgccaagagatgctgcccccacccccttaggcccgagggatcaggagctatgggaccagaggccctgtcatctttactgctgctgctcttggtggcaagtggagatgctgacatgaagggacattttgatcctgccaagtgccgctatgccctgggcatgcaggaccggaccatcccagacagtgacatctctgcttccagctcctggtcagattccactgccgcccgccacagcaggttggagagcagtgacggggatggggcctggtgccccgcagggtcggtgtttcccaaggaggaggagtacttgcaggtggatctacaacgactccacctggtggctctggtgggcacccagggacggcatgccgggggcctgggcaaggagttctcccggagctaccggctgcgttactcccgggatggtcgccgctggatgggctggaaggaccgctggggtcaggaggtgatctcaggcaatgaggaccctgagggagtggtgctgaaggaccttgggccccccatggttgcccgactggttcgcttctacccccgggctgaccgggtcatgagtgtctgtctgcgggtagagctctatggctgcctctggagggatggactcctgtcttacaccgcccctgtggggcagacaatgtatttatctgaggccgtgtacctcaacgactccacctatgacggacataccgtgggcggactgcagtatgggggtctgggccagctggcagatggtgtggtggggctggatgactttaggaagagtcaggagctgcgggtctggccaggctatgactatgtgggatggagcaaccacagcttctccagtggctatgtggagatggagtttgagtttgaccggctgagggccttccaggctatgcaggtccactgtaacaacatgcacacgctgggagcccgtctgcctggcggggtggaatgtcgcttccggcgtggccctgccatggcctgggagggggagcccatgcgccacaacctagggggcaacctgggggaccccagagcccgggctgtctcagtgccccttggcggccgtgtggctcgctttctgcagtgccgcttcctctttgcggggccctggttactcttcagcgaaatctccttcatctctgatgtggtgaacaattcctctccggcactgggaggcaccttcccgccagccccctggtggccgcctggcccacctcccaccaacttcagcagcttggagctggagcccagaggccagcagcccgtggccaaggccgaggggagcccgaccgccatcctcatcggctgcctggtggccatcatcctgctcctgctgctcatcattgccctcatgctctggcggctgcactggcgcaggctcctcagcaaggctgaacggagggtgttggaagaggagctgacggttcacctctctgtccctggggacactatcctcatcaacaaccgcccaggtcctagagagccacccccgtaccaggagccccggcctcgtgggaatccgccccactccgctccctgtgtccccaatggctctgcctacagtggggactatatggagcctgagaagccaggcgccccgcttctgcccccacctccccagaacagcgtcccccattatgccgaggctgacattgttaccctgcagggcgtcaccgggggcaacacctatgctgtgcctgcactgcccccaggggcagtcggggatgggccccccagagtggatttccctcgatctcgactccgcttcaaggagaagcttggcgagggccagtttggggaggtgcacctgtgtgaggtcgacagccctcaagatctggtcagtcttgatttcccccttaatgtgcgtaagggacaccctttgctggtagctgtcaagatcttacggccagatgccaccaagaatgccaggaatgatttcctgaaagaggtgaagatcatgtcgaggctcaaggaccccaacatcattcggctgctgggcgtgtgtgtgcaggacgaccccctctgcatgattactgactacatggagaacggcgacctcaaccagttcctcagtgcccaccagctggaggacaaggcagccgagggggcccctggggacgggcaggctgcgcaggggcccaccatcagctacccaatgctgctgcatgtggcagcccagatcgcctccggcatgcgctatctggccacactcaactttgtacatcgggacctggccacgcggaactgcctagttggggaaaatttcaccatcaaaatcgcagactttggcatgagccggaacctctatgctggggactattaccgtgtgcagggccgggcagtgctgcccatccgctggatggcctgggagtgcatcctcatggggaagttcacgactgcgagtgacgtgtgggcctttggtgtgaccctgtgggaggtgctgatgctctgtagggcccagccctttgggcagctcaccgacgagcaggtcatcgagaacgcgggggagttcttccgggaccagggccggcaggtgtacctgtcccggccgcctgcctgcccgcagggcctatatgagctgatgcttcggtgctggagccgggagtctgagcagcgaccacccttttcccagctgcatcggttcctggcagaggatgcactcaacacggtgtgaatcacacatccagctgcccctccctcagggagtgatccaggggaagccagtgacactaaaacaagaggacacaatggcacctctgcccttcccctcccgacagcccatcacctctaatagaggcagtgagactgcaggtgggctgggcccacccagggagctgatgccccttctccccttcctggacacactctcatgtccccttcctgttcttccttcctagaagcccctgtcgcccacccagctggtcctgtggatgggatcctctccaccctcctctagccatcccttggggaagggtggggagaaatataggatagacactggacatggcccattggagcacctgggccccactggacaacactgattcctggagaggtggctgcgcccccagcttctctctccctgtcacacactggaccccactggctgagaatctgggggtgaggaggacaagaaggagaggaaaatgtttccttgtgcctgctcctgtacttgtcctcagcttgggcttcttcctcctccatcacctgaaacactggacctgggggtagccccgccccagccctcagtcacccccacttcccacctgcagtcttgtagctagaacttctctaagcctatacgtttctgtggagtaaatattgggattggggggaaagagggagcaacggcccatagccttggggttggacatctctagtgtagctgccacattgatttttctataatcacttggggtttgtacatttttggggggagagacacagatttttacactaatatatggacctagcttgaggcaattttaatcccctgcactaggcaggtaataataaaggttgagttttccacaa

SEQ ID NO: 127200 - DNA, 3832 bp, Homo sapiens; identical to SEQ ID NO: 127118
  Payload ID: 4905
  Gene Symbol: DDR1
  Gene Name: discoidin domain receptor tyrosine kinase 1
  Uniprot ID: Q08345
  ENST ID: ENST00000419412
  CDS Start-End: 342-2972

SEQ ID NO: 127201 - DNA, 673 bp, Homo sapiens
  Payload ID: 4905
  Gene Symbol: DDR1
  Gene Name: discoidin domain receptor tyrosine kinase 1
  ENST ID: ENST00000505534
  CDS Start-End: 372-673
acattgaagccagccgcagctggcccgggcagctgctcctcctgggcccggggccccggacgctcggacaaagccaggcagcgttggcagccccagacccgaccccaaaggcctgagactggggtgactgggacctaagagaatcctgagctggaggcccccgacagctgctctcgggagccgcctcccgacacccgagccccgccggcgcctcccgctcccggctcccggctcctggctccctccgcctcccccgcccctcgccccgccgccgaagaggccccgctcccgggtcggacgcctgggtctgccgggaagagcgatgagagagatgctgcccccacccccttaggcccgagggatcaggagctatgggaccagaggccctgtcatctttactgctgctgctcttggtggcaagtggagatgctgacatgaagggacattttgatcctgccaagtgccgctatgccctgggcatgcaggaccggaccatcccagacagtgacatctctgcttccagctcctggtcagattccactgccgcccgccacagcaggttggagagcagtgacggggatggggcctggtgccccgcagggtcggtgtttcccaaggaggaggagtacttgcaggtggatctacaacgactgcacctggtggctctggtggg

SEQ ID NO: 127202 - DNA, 481 bp, Homo sapiens
  Payload ID: 4905
  Gene Symbol: DDR1
  Gene Name: discoidin domain receptor tyrosine kinase 1
  ENST ID: ENST00000515219
  CDS Start-End: 274-481
gctctcgggagccgcctcccgacacccgagccccgccggcgcctcccgctcccggctcccggctcctggctccctccgcctcccccgcccctcgccccgccgccgaagaggccccgctcccgggtcggacgcctgggtctgccgggaagagcgatgagaggtgtctgaaggtggctattcactgagcgatggggttggacttgaaggaatgccaaggtgatctcaggcaatgaggaccctgagggagtggtgctgaaggaccttgggccccccatggttgcccgactggttcgcttctacccccgggctgaccgggtcatgagcgtctgtctgcgggtagagctctatggctgcctctggagggatggactcctgtcttacaccgcccctgtggggcagacaatgtatttatctgaggccgtgtacctcaacgactccacctatgacggacataccgtgggcggactgcagtatgggggtc

SEQ ID NO: 127203 - DNA, 556 bp, Homo sapiens
  Payload ID: 4905
  Gene Symbol: DDR1
  Gene Name: discoidin domain receptor tyrosine kinase 1
  ENST ID: ENST00000505066
  CDS Start-End: 159-556
agttagacatggaacttaatagttttcacaggtattcacgagtcctcaggagtccagagacctcagtttgagaacactatcctagcactgaccttgacttccagggtgaccttgagagatgctgcccccacccccttaggcccgagggatcaggagctatgggaccagaggccctgtcatctttactgctgctgctcttggtggcaagtggagatgctgacatgaagggacattttgatcctgccaagtgccgctatgccctgggcatgcaggaccggaccatcccagacagtgacatctctgcttccagctcctggtcagattccactgccgcccgccacagcaggttggagagcagtgacggggatggggcctggtgccccgcagggtcggtgtttcccaaggaggaggagtacttgcaggtggatctacaacgactgcacctggtggctctggtgggcacccagggacggcatgccgggggcctgggcaaggagttctcccggagctaccggctgcgttactcccgggatggtcgccgctggatgggctggaa

SEQ ID NO: 127204 - DNA, 572 bp, Homo sapiens
  Payload ID: 4905
  Gene Symbol: DDR1
  Gene Name: discoidin domain receptor tyrosine kinase 1
  ENST ID: ENST00000512336
  CDS Start-End: 237-572
agtgcggaggaactgagccccgggaggaggtgctcctgtgcagccccactgagtcagctcatctatcgcctgccctccacctggccagtccctgcgggcatctaactgctaagcctccgctcagccaacacccagttggtgtctgaaggtggctattcactgagcgatggggttggacttgaaggaatgccaagagatgctgcccccacccccttaggcccgagggatcaggagctatgggaccagaggccctgtcatctttactgctgctgctcttggtggcaagtggagatgctgacatgaagggacattttgatcctgccaagtgccgctatgccctgggcatgcaggaccggaccatcccagacagtgacatctctgcttccagctcctggtcagattccactgccgcccgccacagcaggttggagagcagtgacggggatggggcctggtgccccgcagggtcggtgtttcccaaggaggaggagtacttgcaggtggatctacaacgactgcacctggtggctctggtgggcacccagggacggcatgccgggggcctgggcaag

SEQ ID NO: 127205 - DNA, 584 bp, Homo sapiens
  Payload ID: 4905
  Gene Symbol: DDR1
  Gene Name: discoidin domain receptor tyrosine kinase 1
  ENST ID: ENST00000513749
  CDS Start-End: 182-289
agctggcccgggcagctgctcctcctgggcccggggccccggacgctcggacaaagccaggcagcgttggcagccccagacccgaccccaaaggcctgagactggggtgactgggacctaagagaatcctgagctggagagatgctgcccccacccccttaggcccgagggatcaggagctatgggaccagaggccctgtcatctttactgctgctgctcttggtggcaagtggagatgctgacatgaagggacattttgatcctggaccggaccatcccagacagtgacatctctgcttccagctcctggtcagattccactgccgcccgccacagcaggttggagagcagtgacggggatggggcctggtgccccgcagggtcggtgtttcccaaggaggaggagtacttgcaggtggatctacaacgactgcacctggtggctctggtgggcacccagggacggcatgccgggggcctgggcaaggagttctcccggagctaccggctgcgttactcccgggatggtcgccgctggatgggctggaaggaccgctggggtcaggaggtgatctcaggcaat

SEQ ID NO: 127206 - DNA, 2673 bp, Homo sapiens
  Payload ID: 4905
  Gene Symbol: DDR1
  Gene Name: discoidin domain receptor tyrosine kinase 1
  Uniprot ID: Q08345
  ENST ID: ENST00000482873
  CDS Start-End: 198-929
cgggagccgcctcccgacacccgagccccgccggcgcctcccgctcccggctcccggctcctggctccctccgcctcccccgcccctcgccccgccgccgaagaggccccgctcccgggtcggacgcctgggtctgccgggaagagcgatgagagagatgctgcccccacccccttaggcccgagggatcaggagctatgggaccagaggccctgtcatctttactgctgctgctcttggtggcaagtggagatgctgacatgaagggacattttgatcctgccaagtgccgctatgccctgggcatgcaggaccggaccatcccagacagtgacatctctgcttccagctcctggtcagattccactgccgcccgccacagcaggttggagagcagtgacggggatggggcctggtgccccgcagggtcggtgtttcccaaggaggaggagtacttgcaggtggatctacaacgactgcacctggtggctctggtgggcacccagggacggcatgccgggggcctgggcaaggagttctcccggagctaccggctgcgttactcccgggatggtcgccgctggatgggctggaaggaccgctggggtcaggaggtgatctcaggcaatgaggaccctgagggagtggtgctgaaggaccttgggccccccatggttgcccgactggttcgcttctacccccgggctgaccgggtcatgagcgtctgtctgcgggtagagctctatggctgcctctggagggactgcagtatgggggtctgggccagctggcagatggtgtggtggggctggatgactttaggaagagtcaggagctgcgggtctggccaggctatgactatgtgggatggagcaaccacagcttctccagtggctatgtggagatggagtttgagtttgaccggctgagggccttccaggctatgcaggtccactgtaacaacatgcacacgctgggagcccgtctgcctggcggggtggaatgtcgcttccggcgtggccctgccatggcctgggagggggagcccatgcgccacaacctagggggcaacctgggggaccccagagcccgggctgtctcagtgccccttggcggccgtgtggctcgctttctgcagtgccgcttcctctttgcggggccctggttactcttcagcgaaatctccttcatctctgatgtggtgaacaattcctctccggcactgggaggcaccttcccgccagccccctggtggccgcctggcccacctcccaccaacttcagcagcttggagctggagcccagaggccagcagcccgtggccaaggccgaggggagcccgaccgccatcctcatcggctgcctggtggccatcatcctgctcctgctgctcatcattgccctcatgctctggcggctgcactggcgcaggctcctcagcaaggctgaacggagggtgttggaagaggagctgacggttcacctctctgtccctggggacactatcctcatcaacaaccgcccaggtcctagagagccacccccgtaccaggagccccggcctcgtgggaatccgccccactccgctccctgtgtccccaatggctctgcctacagtggggactatatggagcctgagaagccaggcgccccgcttctgcccccacctccccagaacagcgtcccccattatgccgaggctgacattgttaccctgcagggcgtcaccgggggcaacacctatgctgtgcctgcactgcccccaggggcagtcggggatgggccccccagagtggatttccctcgatctcgactccgcttcaaggagaagcttggcgagggccagtttggggaggtgcacctgtgtgaggtcgacagccctcaagatctggttagtcttgatttcccccttaatgtgcgtaagggacaccctttgctggtagctgtcaagatcttacggccagatgccaccaagaatgccaggaatgatttcctgaaagaggtgaagatcatgtcgaggctcaaggacccaaacatcattcggctgctgggcgtgtgtgtgcaggacgaccccctctgcatgattactgactacatggagaacggcgacctcaaccagttcctcagtgcccaccagctggaggacaaggcagccgagggggcccctggggacgggcaggctgcgcaggggcccaccatcagctacccaatgctgctgcatgtggcagcccagatcgcctccggcatgcgctatctggccacactcaactttgtacatcgggacctggccacgcggaactgcctagttggggaaaatttcaccatcaaaatcgcagactttggcatgagccggaacctctatgctggggactattaccgtgtgcagggccgggcagtgctgcccatccgctggatggcctgggagtgcatcctcatggggaagttcacgactgcgagtgacgtgtgggcctttggtgtgaccctgtgggaggtgctgatgctctgtagggcccagccctttgggcagctcaccgacgagcaggtcatcgagaacgcgggggagttcttccgggaccagggccggcaggtgtacctgtcccggccgcctgcctgcccgcagggcctatatgagctgatgcttcggtgctggagccgggagtctgagcagcgacc

SEQ ID NO: 127207 - DNA, 539 bp, Homo sapiens
  Payload ID: 4905
  Gene Symbol: DDR1
  Gene Name: discoidin domain receptor tyrosine kinase 1
  ENST ID: ENST00000512725
  CDS Start-End: 124-539
ccagaggcaggcgcccaagctcgctggctgttgctgagggcctgtaggtgtgtccaggactgagtggtgtggtggagacagagatgctgcccccacccccttaggcccgagggatcaggagctatgggaccagaggccctgtcatctttactgctgctgctcttggtggcaagtggagatgctgacatgaagggacattttgatcctgccaagtgccgctatgccctgggcatgcaggaccggaccatcccagacagtgacatctctgcttccagctcctggtcagattccactgccgcccgccacagcaggttggagagcagtgacggggatggggcctggtgccccgcagggtcggtgtttcccaaggaggaggagtacttgcaggtggatctacaacgactgcacctggtggctctggtgggcacccagggacggcatgccgggggcctgggcaaggagttctcccggagctaccggctgcgttactcccgggatggtcgccgctggatgggctggaaggaccgctggggtcagga

SEQ ID NO: 127208 - DNA, 615 bp, Homo sapiens
  Payload ID: 4905
  Gene Symbol: DDR1
  Gene Name: discoidin domain receptor tyrosine kinase 1
  ENST ID: ENST00000509639
  CDS Start-End: 272-615
acccccagtccagcgtctcctgggcctagattccccagctgctgttctctggaggggcccccgacagctgctctcgggagccgcctcccgacacccgagccccgccggcgcctcccgctcccggctcccggctcctggctccctccgcctcccccgcccctcgccccgccgccgaagaggccccgctcccgggtcggacgcctgggtctgccgggaagagcgatgagagagatgctgcccccacccccttaggcccgagggatcaggagctatgggaccagaggccctgtcatctttactgctgctgctcttggtggcaagtggagatgctgacatgaagggacattttgatcctgccaagtgccgctatgccctgggcatgcaggaccggaccatcccagacagtgacatctctgcttccagctcctggtcagattccactgccgcccgccacagcaggttggagagcagtgacggggatggggcctggtgccccgcagggtcggtgtttcccaaggaggaggagtacttgcaggtggatctacaacgactgcacctggtggctctggtgggcacccagggacggcatgccgggggcctgggcaaggagttctc

SEQ ID NO: 127209 - DNA, 3073 bp, Homo sapiens
  Payload ID: 4905
  Gene Symbol: DDR1
  Gene Name: discoidin domain receptor tyrosine kinase 1
  Uniprot ID: Q08345
  ENST ID: ENST00000508312
  CDS Start-End: 253-2937
cccctctcactcagtgcggaggaactgagccccgggaggaggtgctcctgtgcagccccactgagtcagctcatctatcgcctgccctccacctggccagtccctgcgggcatctaactgctaagcctccgctcagccaacacccagttggtcagtctggtcacagtccagcaaaaagagggactgccactctaacccaccagtgacaccactcttcccggctggatggtcaattagctctggcatgagagaatgtcactgccgagatgctgcccccacccccttaggcccgagggatcaggagctatgggaccagaggccctgtcatctttactgctgctgctcttggtggcaagtggagatgctgacatgaagggacattttgatcctgccaagtgccgctatgccctgggcatgcaggaccggaccatcccagacagtgacatctctgcttccagctcctggtcagattccactgccgcccgccacagcaggttggagagcagtgacggggatggggcctggtgccccgcagggtcggtgtttcccaaggaggaggagtacttgcaggtggatctacaacgactgcacctggtggctctggtgggcacccagggacggcatgccgggggcctgggcaaggagttctcccggagctaccggctgcgttactcccgggatggtcgccgctggatgggctggaaggaccgctggggtcaggaggtgatctcaggcaatgaggaccctgagggagtggtgctgaaggaccttgggccccccatggttgcccgactggttcgcttctacccccgggctgaccgggtcatgagcgtctgtctgcgggtagagctctatggctgcctctggagggatggactcctgtcttacaccgcccctgtggggcagacaatgtatttatctgaggccgtgtacctcaacgactccacctatgacggacataccgtgggcggactgcagtatgggggtctgggccagctggcagatggtgtggtggggctggatgactttaggaagagtcaggagctgcgggtctggccaggctatgactatgtgggatggagcaaccacagcttctccagtggctatgtggagatggagtttgagtttgaccggctgagggccttccaggctatgcaggtccactgtaacaacatgcacacgctgggagcccgtctgcctggcggggtggaatgtcgcttccggcgtggccctgccatggcctgggagggggagcccatgcgccacaacctagggggcaacctgggggaccccagagcccgggctgtctcagtgccccttggcggccgtgtggctcgctttctgcagtgccgcttcctctttgcggggccctggttactcttcagcgaaatctccttcatctctgatgtggtgaacaattcctctccggcactgggaggcaccttcccgccagccccctggtggccgcctggcccacctcccaccaacttcagcagcttggagctggagcccagaggccagcagcccgtggccaaggccgaggggagcccgaccgccatcctcatcggctgcctggtggccatcatcctgctcctgctgctcatcattgccctcatgctctggcggctgcactggcgcaggctcctcagcaaggctgaacggagggtgttggaagaggagctgacggttcacctctctgtccctggggacactatcctcatcaacaaccgcccaggtcctagagagccacccccgtaccaggagccccggcctcgtgggaatccgccccactccgctccctgtgtccccaatggctctgcctacagtggggactatatggagcctgagaagccaggcgccccgcttctgcccccacctccccagaacagcgtcccccattatgccgaggctgacattgttaccctgcagggcgtcaccgggggcaacacctatgctgtgcctgcactgcccccaggggcagtcggggatgggccccccagagtggatttccctcgatctcgactccgcttcaaggagaagcttggcgagggccagtttggggaggtgcacctgtgtgaggtcgacagccctcaagatctggttagtcttgatttcccccttaatgtgcgtaagggacaccctttgctggtagctgtcaagatcttacggccagatgccaccaagaatgccaggaatgatttcctgaaagaggtgaagatcatgtcgaggctcaaggacccaaacatcattcggctgctgggcgtgtgtgtgcaggacgaccccctctgcatgattactgactacatggagaacggcgacctcaaccagttcctcagtgcccaccagctggaggacaaggcagccgagggggcccctggggacgggcaggctgcgcaggggcccaccatcagctacccaatgctgctgcatgtggcagcccagatcgcctccggcatgcgctatctggccacactcaactttgtacatcgggacctggccacgcggaactgcctagttggggaaaatttcaccatcaaaatcgcagactttggcatgagccggaacctctatgctggggactattaccgtgtgcagggccgggcagtgctgcccatccgctggatggcctgggagtgcatcctcatggggaagttcacgactgcgagtgacgtgtgggcctttggtgtgaccctgtgggaggtgctgatgctctgtagggcccagccctttgggcagctcaccgacgagcaggtcatcgagaacgcgggggagttcttccgggaccagggccggcaggtgtacctgtcccggccgcctgcctgcccgcagggcctatatgagctgatgcttcggtgctggagccgggagtctgagcagcgaccacccttttcccagctgcatcggttcctggcagaggatgcactcaacacggtgtgaatcacacatccagctgcccctccctcagggagcgatccaggggaagccagtgacactaaaacaagaggacacaatggcacctctgcccttcccctcccgacagcccatcacctctaatagaggcagtgagactgca

SEQ ID NO: 127210 - DNA, 580 bp, Homo sapiens
  Payload ID: 4905
  Gene Symbol: DDR1
  Gene Name: discoidin domain receptor tyrosine kinase 1
  ENST ID: ENST00000515233
  CDS Start-End: 166-580
gtgtttctttcttgggattgttgtctgggactgcaagcagggtatgtttttatctactgtgaggttcctggggcggagatgtgcagtggagcgagaacttcctgtgaccgtgacattgtctagagatgctgcccccacccccttaggcccgagggatcaggagctatgggaccagaggccctgtcatctttactgctgctgctcttggtggcaagtggagatgctgacatgaagggacattttgatcctgccaagtgccgctatgccctgggcatgcaggaccggaccatcccagacagtgacatctctgcttccagctcctggtcagattccactgccgcccgccacagcaggttggagagcagtgacggggatggggcctggtgccccgcagggtcggtgtttcccaaggaggaggagtacttgcaggtggatctacaacgactgcacctggtggctctggtgggcacccagggacggcatgccgggggcctgggcaaggagttctcccggagctaccggctgcgttactcccgggatggtcgccgctggatgggctggaaggaccgctggggtcagg

SEQ ID NO: 127211 - DNA, 572 bp, Homo sapiens
  Payload ID: 4905
  Gene Symbol: DDR1
  Gene Name: discoidin domain receptor tyrosine kinase 1
  ENST ID: ENST00000503670
  CDS Start-End: 448-572
agaggcagccaccttctggaagtgggaactggggggactggatgtctgggtctcaggaaggcagagcagggataactgggcccaagatgccctgaacctgataagaggtggcagtcgagtccctcaggactccagggcctggagacttcagtacagggctctgagaccagtacaggttaggatagcttttcctgcagcaggggaggggagagtagttacttgggtttgtaaggagatgccatttagaatagttttatgtggggtaagcttcctgggcctgaggaacagagtagggattttcaaactttaatgggcacaggtcacctgggaattgtgttaaaaggcagattttgattgagcaggtcaagggtgagcctgagattctgatttcttccatgcttccagagatgctgcccccacccccttaggcccgagggatcaggagctatgggaccagaggccctgtcatctttactgctgctgctcttggtggcaagtggagatgctgacatgaagggacattttgatcctgccaagtgccgctatgccctgggcatgcaggaccggaccat

SEQ ID NO: 127212 - DNA, 956 bp, Homo sapiens
  Payload ID: 4905
  Gene Symbol: DDR1
  Gene Name: discoidin domain receptor tyrosine kinase 1
  ENST ID: ENST00000515881
  CDS Start-End: 701-956
cagttgctttgcctactcagtctcactgtttcatcttccctgggtctcttggtccccttccttttgactgtgtgtgattttcagtgtgcctccatccttctcctgctcctcttcttcctcctcccgaccactcaactttgtcctggcctcatttttggcctcttctggccagtgatcagaccctctggcccactacggccagagctggctgggcctgagggaggcttgccctgaggactcctgagtccccctcccactccactccgttgggagcccaggggaatcagggcctgggcgtctggacccccgggtcccttagaacgcccttcagagagaggaactgagaggagaaggagaagagagtgggcccgccttcagggtctggggccttccaggttgggtcgtaggggcgggagcgcacaggctgcgagagaggagcaaaggttggtggagggagaagagcagtctggggcctggctggacaggcccccgacagctgctctcgggagccgcctcccgacacccgagccccgccggcgcctcccgctcccggctcccggctcctggctccctccgcctcccccgcccctcgccccgccgccgaagaggccccgctcccgggtcggacgcctgggtctgccgggaagagcgatgagagagatgctgcccccacccccttaggcccgagggatcaggagctatgggaccagaggccctgtcatctttactgctgctgctcttggtggcaagtggagatgctgacatgaagggacattttgatcctgccaagtgccgctatgccctgggcatgcaggaccggaccatcccagacagtgacatctctgcttccagctcctggtcagattccactgccgcccgccacagcaggttggagagcagtgacggggatggggcctggtgccccgcagggtcggtgtttcccaaggaggaggagt

SEQ ID NO: 127213 - DNA, 636 bp, Homo sapiens
  Payload ID: 4905
  Gene Symbol: DDR1
  Gene Name: discoidin domain receptor tyrosine kinase 1
  ENST ID: ENST00000503495
  CDS Start-End: 48-636
agaaactctgtgagggttgtcagggacactgagaggtgggtgtgtgcatgccacatttagcctcgctgtttacagccagttcaagatgctgcccccacccccttaggcccgagggatcaggagctatgggaccagaggccctgtcatctttactgctgctgctcttggtggcaagtggagatgctgacatgaagggacattttgatcctgccaagtgccgctatgccctgggcatgcaggaccggaccatcccagacagtgacatctctgcttccagctcctggtcagattccactgccgcccgccacagcaggttggagagcagtgacggggatggggcctggtgccccgcagggtcggtgtttcccaaggaggaggagtacttgcaggtggatctacaacgactgcacctggtggctctggtgggcacccagggacggcatgccgggggcctgggcaaggagttctcccggagctaccggctgcgttactcccgggatggtcgccgctggatgggctggaaggaccgctggggtcaggaggtgatctcaggcaatgaggaccctgagggagtggtgctgaaggaccttgggccccccatggttgcccgactggttcgcttctacccccgggctg

SEQ ID NO: 127214 - DNA, 460 bp, Homo sapiens
  Payload ID: 4905
  Gene Symbol: DDR1
  Gene Name: discoidin domain receptor tyrosine kinase 1
  ENST ID: ENST00000504679
  CDS Start-End: 94-460
gtgtttgctctgtctcagaaactctgtgagggttgtcagggacactgagagagatgctgcccccacccccttaggcccgagggatcaggagctatgggaccagaggccctgtcatctttactgctgctgctcttggtggcaagtggagatgctgacatgaagggacattttgatcctgccaagtgccgctatgccctgggcatgcaggaccggaccatcccagacagtgacatctctgcttccagctcctggtcagattccactgccgcccgccacagcaggttggagagcagtgacggggatggggcctggtgccccgcagggtcggtgtttcccaaggaggaggagtacttgcaggtggatctacaacgactgcacctggtggctctggtgggcacccagggacggcatgccgggggcctgggcaaggagttctcccggagctaccggctgcgttact

SEQ ID NO: 127215 - DNA, 604 bp, Homo sapiens
  Payload ID: 4905
  Gene Symbol: DDR1
  Gene Name: discoidin domain receptor tyrosine kinase 1
  ENST ID: ENST00000513043
  CDS Start-End: 451-604
cgttgggagcccaggggaatcagggcctgggcgtctggacccccgggtcccttagaacgcccttcagagagaggaactgagaggagaaggagaagagagtgggcccgccttcagggtctggggccttccaggttgggtcgtaggggcgggagcgcacaggctgcgagagaggagcaaaggcccccgacagctgctctcgggagccgcctcccgacacccgagccccgccggcgcctcccgctcccggctcccggctcctggctccctccgcctcccccgcccctcgccccgccgccgaagaggccccgctcccgggtcggacgcctgggtctgccgggaagagcgatgagaggtgtctgaaggtggctattcactgagcgatggggttggacttgaaggaatgccaagagatgctgcccccacccccttaggcccgagggatcaggagctatgggaccagaggccctgtcatctttactgctgctgctcttggtggcaagtggagatgctgacatgaagggacattttgatcctgccaagtgccgctatgccctgggcatgcaggaccggaccatcccagacagtgacatctctgcttccagct

SEQ ID NO: 127216 - DNA, 1038 bp, Homo sapiens
  Payload ID: 4905
  Gene Symbol: DDR1
  Gene Name: discoidin domain receptor tyrosine kinase 1
  ENST ID: ENST00000484556
  CDS Start-End: 1-833
tgcgtaagggacaccctttgctggtagctgtcaagatcttacggccagatgccaccaagaatgccaggaatgatttcctgaaagaggtgaagatcatgtcgaggctcaaggacccaaacatcattcggctgctgggcgtgtgtgtgcaggacgaccccctctgcatgattactgactacatggagaacggcgacctcaaccagttcctcagtgcccaccagctggaggacaaggcagccgagggggcccctggggacgggcaggctgcgcaggggcccaccatcagctacccaatgctgctgcatgtggcagcccagatcgcctccggcatgcgctatctggccacactcaactttgtacatcgggacctggccacgcggaactgcctagttggggaaaatttcaccatcaaaatcgcagactttggcatgagccggaacctctatgctggggactattaccgtgtgcagggccgggcagtgctgcccatccgctggatggcctgggagtgcatcctcatggggaagttcacgactgcgagtgacgtgtgggcctttggtgtgaccctgtgggaggtgctgatgctctgtagggcccagccctttgggcagctcaccgacgagcaggtcatcgagaacgcgggggagttcttccgggaccagggccggcaggtcagagtggaggagagggaagatgggtccgaggcgggggacagaaggggcagagttgtcatcttggagactaaagaatatttgttccctgactctcatccacactgccacaatgcaggtgtacctgtcccggccgcctgcctgcccgcagggcctatatgagctgatgcttcggtgctggagccgggagtctgagcagcgaccacccttttcccagctgcatcggttcctggcagaggatgcactcaacacggtgtgaatcacacatccagctgcccctccctcagggagcgatccaggggaagccagtgacactaaaacaagaggacacaatggcacctctgcccttcccctcccgacagcccat

SEQ ID NO: 127217 - DNA, 574 bp, Homo sapiens
  Payload ID: 4905
  Gene Symbol: DDR1
  Gene Name: discoidin domain receptor tyrosine kinase 1
  ENST ID: ENST00000502955
  CDS Start-End: 410-574
acttttcaaatgctactaaggaaagttagacatggaacttaatagttttcacaggtattcacgagtcctcaggagtccagagacctcagtttgagaacactatcctagcactgaccttgacttccagggtgaccttgagccaggctgctcagtccctctctgcgggggcctagaggctcggtgaggggagcgggacttggttgccatggtcacattgaagccagccgcagctggcccgggcagctgctcctcctgggcccggggccccggacgctcggacaaagccaggcagcgttggcagccccagacccgaccccaaaggcctgagactggggtgactgggacctaagagaatcctgagctggagagatgctgcccccacccccttaggcccgagggatcaggagctatgggaccagaggccctgtcatctttactgctgctgctcttggtggcaagtggagatgctgacatgaagggacattttgatcctgccaagtgccgctatgccctgggcatgcaggaccggaccatcccagacagtgacatctctgcttccagctcctggtcagat

SEQ ID NO: 127218 - DNA, 527 bp, Homo sapiens
  Payload ID: 4905
  Gene Symbol: DDR1
  Gene Name: discoidin domain receptor tyrosine kinase 1
  ENST ID: ENST00000503180
  CDS Start-End: 374-527
ggacaaagccaggcagcgttggcagccccagacccgaccccaaaggcctgagactggggtgactgggacctaagagaatcctgagctggagagctacgtcatctcaatctcctccttcgctccctggcctcagtttccagtttattcagtggcatcaggcccccgacagctgctctcgggagccgcctcccgacacccgagccccgccggcgcctcccgctcccggctcccggctcctggctccctccgcctcccccgcccctcgccccgccgccgaagaggccccgctcccgggtcggacgcctgggtctgccgggaagagcgatgagagagatgctgcccccacccccttaggcccgagggatcaggagctatgggaccagaggccctgtcatctttactgctgctgctcttggtggcaagtggagatgctgacatgaagggacattttgatcctgccaagtgccgctatgccctgggcatgcaggaccggaccatcccagacagtgacatctctgcttccagct

SEQ ID NO: 127219 - DNA, 562 bp, Homo sapiens
  Payload ID: 4905
  Gene Symbol: DDR1
  Gene Name: discoidin domain receptor tyrosine kinase 1
  ENST ID: ENST00000507901
  CDS Start-End: 329-562
agtccagcgtctcctgggcctagattccccagctgctgttctctggaggggttcctggggcggagatgtgcagtggagcgagaacttcctgtgaccgtgacattgtctaggtggcccccgacagctgctctcgggagccgcctcccgacacccgagccccgccggcgcctcccgctcccggctcccggctcctggctccctccgcctcccccgcccctcgccccgccgccgaagaggccccgctcccgggtcggacgcctgggtctgccgggaagagcgatgagagagatgctgcccccacccccttaggcccgagggatcaggagctatgggaccagaggccctgtcatctttactgctgctgctcttggtggcaagtggagatgctgacatgaagggacattttgatcctgccaagtgccgctatgccctgggcatgcaggaccggaccatcccagacagtgacatctctgcttccagctcctggtcagattccactgccgcccgccacagcaggttggagagcagtgacggggatggggcctggtgccccgcagggtcg

SEQ ID NO: 127220 - DNA, 571 bp, Homo sapiens
  Payload ID: 4905
  Gene Symbol: DDR1
  Gene Name: discoidin domain receptor tyrosine kinase 1
  ENST ID: ENST00000504651
  CDS Start-End: 353-571
ctcagccgttggaacgtccttgggcttctgaactagtgcccatgtgtgcctcggcctttcccaagggccagcttcttcctggcccccgacagctgctctcgggagccgcctcccgacacccgagccccgccggcgcctcccgctcccggctcccggctcctggctccctccgcctcccccgcccctcgccccgccgccgaagaggccccgctcccgggtcggacgcctgggtctgccgggaagagcgatgagaggtgtctgaaggtggctattcactgagcgatggggttggacttgaaggaatgccaagagatgctgcccccacccccttaggcccgagggatcaggagctatgggaccagaggccctgtcatctttactgctgctgctcttggtggcaagtggagatgctgacatgaagggacattttgatcctgccaagtgccgctatgccctgggcatgcaggaccggaccatcccagacagtgacatctctgcttccagctcctggtcagattccactgccgcccgccacagcaggttggagagcagtgacggggatggggcctgg

SEQ ID NO: 127221 - DNA, 547 bp, Homo sapiens
  Payload ID: 4905
  Gene Symbol: DDR1
  Gene Name: discoidin domain receptor tyrosine kinase 1
  ENST ID: ENST00000511510
  CDS Start-End: 120-547
agaagtaggaggggcgtcttcccctcgtgggccctgagcgggactgcagccagccccctggggcgccagctttggagagatgctgcccccacccccttaggcccgagggatcaggagctatgggaccagaggccctgtcatctttactgctgctgctcttggtggcaagtggagatgctgacatgaagggacattttgatcctgccaagtgccgctatgccctgggcatgcaggaccggaccatcccagacagtgacatctctgcttccagctcctggtcagattccactgccgcccgccacagcaggttggagagcagtgacggggatggggcctggtgccccgcagggtcggtgtttcccaaggaggaggagtacttgcaggtggatctacaacgactgcacctggtggctctggtgggcacccagggacggcatgccgggggcctgggcaaggagttctcccggagctaccggctgcgttactcccgggatggtcgccgctggatgggctggaaggaccgctggggtcaggaggtgatctcagg

SEQ ID NO: 127222 - DNA, 573 bp, Homo sapiens
  Payload ID: 4905
  Gene Symbol: DDR1
  Gene Name: discoidin domain receptor tyrosine kinase 1
  ENST ID: ENST00000507046
  CDS Start-End: 364-573
agattccccagctgctgttctctggaggggttcctggggcggagatgtgcagtggagcgagaacttcctgtgaccgtgacattgtctaggtggcccccgacagctgctctcgggagccgcctcccgacacccgagccccgccggcgcctcccgctcccggctcccggctcctggctccctccgcctcccccgcccctcgccccgccgccgaagaggccccgctcccgggtcggacgcctgggtctgccgggaagagcgatgagaggtgtctgaaggtggctattcactgagcgatggggttggacttgaaggaatgccaagagatgctgcccccacccccttaggcccgagggatcaggagctatgggaccagaggccctgtcatctttactgctgctgctcttggtggcaagtggagatgctgacatgaagggacattttgatcctgccaagtgccgctatgccctgggcatgcaggaccggaccatcccagacagtgacatctctgcttccagctcctggtcagattccactgccgcccgccacagcaggttggagagcagtgacggggat

SEQ ID NO: 127223 - DNA, 623 bp, Homo sapiens
  Payload ID: 4905
  Gene Symbol: DDR1
  Gene Name: discoidin domain receptor tyrosine kinase 1
  ENST ID: ENST00000512694
  CDS Start-End: 114-623
gcttttgtgtacttgtctggttgggacttcgtgtttctttcttgggattgttgtctgggactgcaagcaggagatgctgcccccacccccttaggcccgagggatcaggagctatgggaccagaggccctgtcatctttactgctgctgctcttggtggcaagtggagatgctgacatgaagggacattttgatcctgccaagtgccgctatgccctgggcatgcaggaccggaccatcccagacagtgacatctctgcttccagctcctggtcagattccactgccgcccgccacagcaggttggagagcagtgacggggatggggcctggtgccccgcagggtcggtgtttcccaaggaggaggagtacttgcaggtggatctacaacgactgcacctggtggctctggtgggcacccagggacggcatgccgggggcctgggcaaggagttctcccggagctaccggctgcgttactcccgggatggtcgccgctggatgggctggaaggaccgctggggtcaggaggtgatctcaggcaatgaggaccctgagggagtggtgctgaaggaccttgggccccccatggttgcccgactggttcgcttctacccccgggct

SEQ ID NO: 127224 - DNA, 1248 bp, Homo sapiens
  Payload ID: 4905
  Gene Symbol: DDR1
  Gene Name: discoidin domain receptor tyrosine kinase 1
  ENST ID: ENST00000460944
  CDS Start-End: 389-1248
aatgccgctttctgtttcctctgcctcccttcatctccttttgtctggggtttctttgtctggggtctccctttggttctgtttcacagttctcagcctcccctccctttctccacagccaggctgctcagtccctctctgcgggggcctagaggctcggtgaggggagcgggacttggttgccatggtcacattgaagccagccgcagctggcccgggcagctgctcctcctgggcccggggccccggacgctcggacaaagccaggcagcgttggcagccccagacccgaccccaaaggcctgagactggggtgactgggacctaagagaatcctgagctggagagatgctgcccccacccccttaggcccgagggatcaggagctatgggaccagaggccctgtcatctttactgctgctgctcttggtggcaagtggagatgctgacatgaagggacattttgatcctgccaagtgccgctatgccctgggcatgcaggaccggaccatcccagacagtgacatctctgcttccagctcctggtcagattccactgccgcccgccacagcaggttggagagcagtgacggggatggggcctggtgccccgcagggtcggtgtttcccaaggaggaggagtacttgcaggtggatctacaacgactgcacctggtggctctggtgggcacccagggacggcatgccgggggcctgggcaaggagttctcccggagctaccggctgcgttactcccgggatggtcgccgctggatgggctggaaggaccgctggggtcaggaggtgatctcaggcaatgaggaccctgagggagtggtgctgaaggaccttgggccccccatggttgcccgactggttcgcttctacccccgggctgaccgggtcatgagcgtctgtctgcgggtagagctctatggctgcctctggagggatggactcctgtcttacaccgcccctgtggggcagacaatgtatttatctgaggccgtgtacctcaacgactccacctatgacggacataccgtgggcggactgcagtatgggggtctgggccagctggcagatggtgtggtggggctggatgactttaggaagagtcaggagctgcgggtctggccaggctatgactatgtgggatggagcaaccacagcttctccagtggctatgtggagatggagtttgagtttgaccggctgagggccttccaggctatgcaggtccactg

SEQ ID NO: 127225 - DNA, 570 bp, Homo sapiens
  Payload ID: 4905
  Gene Symbol: DDR1
  Gene Name: discoidin domain receptor tyrosine kinase 1
  ENST ID: ENST00000503628
  CDS Start-End: 104-211
acttgtctggttgggacttcgtgtttctttcttgggattgttgtctgggactgcaagcaggagatgctgcccccacccccttaggcccgagggatcaggagctatgggaccagaggccctgtcatctttactgctgctgctcttggtggcaagtggagatgctgacatgaagggacattttgatcctggaccggaccatcccagacagtgacatctctgcttccagctcctggtcagattccactgccgcccgccacagcaggttggagagcagtgacggggatggggcctggtgccccgcagggtcggtgtttcccaaggaggaggagtacttgcaggtggatctacaacgactgcacctggtggctctggtgggcacccagggacggcatgccgggggcctgggcaaggagttctcccggagctaccggctgcgttactcccgggatggtcgccgctggatgggctggaaggaccgctggggtcaggaggtgatctcaggcaatgaggaccctgagggagtggtgctgaaggaccttgggccccccatggttgcccgactggttcgct

SEQ ID NO: 127226 - DNA, 514 bp, Homo sapiens
  Payload ID: 4905
  Gene Symbol: DDR1
  Gene Name: discoidin domain receptor tyrosine kinase 1
  ENST ID: ENST00000514434
  CDS Start-End: 1-514
caacaaccgcccaggtcctagagagccacccccgtaccaggagccccggcctcgtgggaatccgccccactccgctccctgtgtccccaatggctctgcctacagtggggactatatggagcctgagaagccaggcgccccgcttctgcccccacctccccagaacagcgtcccccattatgccgaggctgacattgttaccctgcagggcgtcaccgggggcaacacctatgctgtgcctgcactgcccccaggggcagtcggggatgggccccccagagtggatttccctcgatctcgactccgcttcaaggagaagcttggcgagggccagtttggggaggtgcacctgtgtgaggtcgacagccctcaagatctggttagtcttgatttcccccttaatgtgcgtaagggacaccctttgctggtagctgtcaagatcttacggccagatgccaccaagaatgccagcttctccttgttctccaggaatgatttcctgaaagaggtgaag

SEQ ID NO: 127227 - DNA, 538 bp, Homo sapiens
  Payload ID: 4905
  Gene Symbol: DDR1
  Gene Name: discoidin domain receptor tyrosine kinase 1
  ENST ID: ENST00000508317
  CDS Start-End: 159-538
acccgaccccaaaggcctgagactggggtgactgggacctaagagaatcctgagctggaggtgtctgaaggtggctattcactgagcgatggggttggacttgaaggaatgccaagagatgctgcccccacccccttaggcccgagggatcaggagctatgggaccagaggccctgtcatctttactgctgctgctcttggtggcaagtggagatgctgacatgaagggacattttgatcctgccaagtgccgctatgccctgggcatgcaggaccggaccatcccagacagtgacatctctgcttccagctcctggtcagattccactgccgcccgccacagcaggttggagagcagtgacggggatggggcctggtgccccgcagggtcggtgtttcccaaggaggaggagtacttgcaggtggatctacaacgactgcacctggtggctctggtgggcacccagggacggcatgccgggggcctgggcaaggagttctcccggagctaccggctgcgttactcccgggatggtcg

SEQ ID NO: 127228 - DNA, 2882 bp, Homo sapiens
  Payload ID: 4905
  Gene Symbol: DDR1
  Gene Name: discoidin domain receptor tyrosine kinase 1
  Uniprot ID: Q08345
  ENST ID: ENST00000513240
  CDS Start-End: 1-2760
atgggaccagaggccctgtcatctttactgctgctgctcttggtggcaagtggagatgctgacatgaagggacattttgatcctgccaagtgccgctatgccctgggcatgcaggaccggaccatcccagacagtgacatctctgcttccagctcctggtcagattccactgccgcccgccacagcaggttggagagcagtgacggggatggggcctggtgccccgcagggtcggtgtttcccaaggaggaggagtacttgcaggtggatctacaacgactgcacctggtggctctggtgggcacccagggacggcatgccgggggcctgggcaaggagttctcccggagctaccggctgcgttactcccgggatggtcgccgctggatgggctggaaggaccgctggggtcaggaggtgatctcaggcaatgaggaccctgagggagtggtgctgaaggaccttgggccccccatggttgcccgactggttcgcttctacccccgggctgaccgggtcatgagcgtctgtctgcgggtagagctctatggctgcctctggagggatggactcctgtcttacaccgcccctgtggggcagacaatgtatttatctgaggccgtgtacctcaacgactccacctatgacggacataccgtgggcggactgcagtatgggggtctgggccagctggcagatggtgtggtggggctggatgactttaggaagagtcaggagctgcgggtctggccaggctatgactatgtgggatggagcaaccacagcttctccagtggctatgtggagatggagtttgagtttgaccggctgagggccttccaggctatgcaggtccactgtaacaacatgcacacgctgggagcccgtctgcctggcggggtggaatgtcgcttccggcgtggccctgccatggcctgggagggggagcccatgcgccacaacctagggggcaacctgggggaccccagagcccgggctgtctcagtgccccttggcggccgtgtggctcgctttctgcagtgccgcttcctctttgcggggccctggttactcttcagcgaaatctccttcatctctgatgtggtgaacaattcctctccggcactgggaggcaccttcccgccagccccctggtggccgcctggcccacctcccaccaacttcagcagcttggagctggagcccagaggccagcagcccgtggccaaggccgaggggagcccgaccgccatcctcatcggctgcctggtggccatcatcctgctcctgctgctcatcattgccctcatgctctggcggctgcactggcgcaggctcctcagcaaggctgaacggagggtgttggaagaggagctgacggttcacctctctgtccctggggacactatcctcatcaacaaccgcccaggtcctagagagccacccccgtaccaggagccccggcctcgtgggaatccgccccactccgctccctgtgtccccaatggctctgcgttgctgctctccaatccagcctaccgcctccttctggccacttacgcccgtccccctcgaggcccgggcccccccacacccgcctgggccaaacccaccaacacccaggcctacagtggggactatatggagcctgagaagccaggcgccccgcttctgcccccacctccccagaacagcgtcccccattatgccgaggctgacattgttaccctgcagggcgtcaccgggggcaacacctatgctgtgcctgcactgcccccaggggcagtcggggatgggccccccagagtggatttccctcgatctcgactccgcttcaaggagaagcttggcgagggccagtttggggaggtgcacctgtgtgaggtcgacagccctcaagatctggttagtcttgatttcccccttaatgtgcgtaagggacaccctttgctggtagctgtcaagatcttacggccagatgccaccaagaatgccagcttctccttgttctccaggaatgatttcctgaaagaggtgaagatcatgtcgaggctcaaggacccaaacatcattcggctgctgggcgtgtgtgtgcaggacgaccccctctgcatgattactgactacatggagaacggcgacctcaaccagttcctcagtgcccaccagctggaggacaaggcagccgagggggcccctggggacgggcaggctgcgcaggggcccaccatcagctacccaatgctgctgcatgtggcagcccagatcgcctccggcatgcgctatctggccacactcaactttgtacatcgggacctggccacgcggaactgcctagttggggaaaatttcaccatcaaaatcgcagactttggcatgagccggaacctctatgctggggactattaccgtgtgcagggccgggcagtgctgcccatccgctggatggcctgggagtgcatcctcatggggaagttcacgactgcgagtgacgtgtgggcctttggtgtgaccctgtgggaggtgctgatgctctgtagggcccagccctttgggcagctcaccgacgagcaggtcatcgagaacgcgggggagttcttccgggaccagggccggcaggtgtacctgtcccggccgcctgcctgcccgcagggcctatatgagctgatgcttcggtgctggagccgggagtctgagcagcgaccacccttttcccagctgcatcggttcctggcagaggatgcactcaacacggtgtgaatcacacatccagctgcccctccctcagggagcgatccaggggaagccagtgacactaaaacaagaggacacaatggcacctctgcccttcccctcccgacagcccatcacctctaatagag

SEQ ID NO: 127229 - DNA, 542 bp, Homo sapiens
  Payload ID: 4905
  Gene Symbol: DDR1
  Gene Name: discoidin domain receptor tyrosine kinase 1
  ENST ID: ENST00000504927
  CDS Start-End: 62-542
gagcgggactgcagccagccccctggggcgccagctttggaggcccgagggatcaggagctatgggaccagaggccctgtcatctttactgctgctgctcttggtggcaagtggagatgctgacatgaagggacattttgatcctgccaagtgccgctatgccctgggcatgcaggaccggaccatcccagacagtgacatctctgcttccagctcctggtcagattccactgccgcccgccacagcaggttggagagcagtgacggggatggggcctggtgccccgcagggtcggtgtttcccaaggaggaggagtacttgcaggtggatctacaacgactgcacctggtggctctggtgggcacccagggacggcatgccgggggcctgggcaaggagttctcccggagctaccggctgcgttactcccgggatggtcgccgctggatgggctggaaggaccgctggggtcaggaggtgatctcaggcaatgaggaccctgagggagtggtgctgaaggaccttgggccccccatggttg

SEQ ID NO: 127230 - DNA, 3202 bp, Homo sapiens; identical to SEQ ID NO: 127180
  Payload ID: 4905
  Gene Symbol: DDR1
  Gene Name: discoidin domain receptor tyrosine kinase 1
  ENST ID: ENST00000548693
  CDS Start-End: 43-2346

SEQ ID NO: 127231 - DNA, 3781 bp, Homo sapiens
  Payload ID: 4905
  Gene Symbol: DDR1
  Gene Name: discoidin domain receptor tyrosine kinase 1
  Uniprot ID: Q08345
  ENST ID: ENST00000550384
  CDS Start-End: 241-2925
agtgcggaggaactgagccccgggaggaggtgctcctgtgcagccccactgagtcagctcatctatcgcctgccctccacctggccagtccctgcgggcatctaactgctaagcctccgctcagccaacacccagttggtcagtctggtcacagtccagcaaaaagagggactgccactctaacccaccagtgacaccactcttcccggctggatggtcaattagctctggcatgagagaatgtcactgccgagatgctgcccccacccccttaggcccgagggatcaggagctatgggaccagaggccctgtcatctttactgctgctgctcttggtggcaagtggagatgctgacatgaagggacattttgatcctgccaagtgccgctatgccctgggcatgcaggaccggaccatcccagacagtgacatctctgcttccagctcctggtcagattccactgccgcccgccacagcaggttggagagcagtgacggggatggggcctggtgccccgcagggtcggtgtttcccaaggaggaggagtacttgcaggtggatctacaacgactgcacctggtggctctggtgggcacccagggacggcatgccgggggcctgggcaaggagttctcccggagctaccggctgcgttactcccgggatggtcgccgctggatgggctggaaggaccgctggggtcaggaggtgatctcaggcaatgaggaccctgagggagtggtgctgaaggaccttgggccccccatggttgcccgactggttcgcttctacccccgggctgaccgggtcatgagcgtctgtctgcgggtagagctctatggctgcctctggagggatggactcctgtcttacaccgcccctgtggggcagacaatgtatttatctgaggccgtgtacctcaacgactccacctatgacggacataccgtgggcggactgcagtatgggggtctgggccagctggcagatggtgtggtggggctggatgactttaggaagagtcaggagctgcgggtctggccaggctatgactatgtgggatggagcaaccacagcttctccagtggctatgtggagatggagtttgagtttgaccggctgagggccttccaggctatgcaggtccactgtaacaacatgcacacgctgggagcccgtctgcctggcggggtggaatgtcgcttccggcgtggccctgccatggcctgggagggggagcccatgcgccacaacctagggggcaacctgggggaccccagagcccgggctgtctcagtgccccttggcggccgtgtggctcgctttctgcagtgccgcttcctctttgcggggccctggttactcttcagcgaaatctccttcatctctgatgtggtgaacaattcctctccggcactgggaggcaccttcccgccagccccctggtggccgcctggcccacctcccaccaacttcagcagcttggagctggagcccagaggccagcagcccgtggccaaggccgaggggagcccgaccgccatcctcatcggctgcctggtggccatcatcctgctcctgctgctcatcattgccctcatgctctggcggctgcactggcgcaggctcctcagcaaggctgaacggagggtgttggaagaggagctgacggttcacctctctgtccctggggacactatcctcatcaacaaccgcccaggtcctagagagccacccccgtaccaggagccccggcctcgtgggaatccgccccactccgctccctgtgtccccaatggctctgcctacagtggggactatatggagcctgagaagccaggcgccccgcttctgcccccacctccccagaacagcgtcccccattatgccgaggctgacattgttaccctgcagggcgtcaccgggggcaacacctatgctgtgcctgcactgcccccaggggcagtcggggatgggccccccagagtggatttccctcgatctcgactccgcttcaaggagaagcttggcgagggccagtttggggaggtgcacctgtgtgaggtcgacagccctcaagatctggttagtcttgatttcccccttaatgtgcgtaagggacaccctttgctggtagctgtcaagatcttacggccagatgccaccaagaatgccaggaatgatttcctgaaagaggtgaagatcatgtcgaggctcaaggacccaaacatcattcggctgctgggcgtgtgtgtgcaggacgaccccctctgcatgattactgactacatggagaacggcgacctcaaccagttcctcagtgcccaccagctggaggacaaggcagccgagggggcccctggggacgggcaggctgcgcaggggcccaccatcagctacccaatgctgctgcatgtggcagcccagatcgcctccggcatgcgctatctggccacactcaactttgtacatcgggacctggccacgcggaactgcctagttggggaaaatttcaccatcaaaatcgcagactttggcatgagccggaacctctatgctggggactattaccgtgtgcagggccgggcagtgctgcccatccgctggatggcctgggagtgcatcctcatggggaagttcacgactgcgagtgacgtgtgggcctttggtgtgaccctgtgggaggtgctgatgctctgtagggcccagccctttgggcagctcaccgacgagcaggtcatcgagaacgcgggggagttcttccgggaccagggccggcaggtgtacctgtcccggccgcctgcctgcccgcagggcctatatgagctgatgcttcggtgctggagccgggagtctgagcagcgaccacccttttcccagctgcatcggttcctggcagaggatgcactcaacacggtgtgaatcacacatccagctgcccctccctcagggagcgatccaggggaagccagtgacactaaaacaagaggacacaatggcacctctgcccttcccctcccgacagcccatcacctctaatagaggcagtgagactgcaggtgggctgggcccacccagggagctgatgccccttctccccttcctggacacactctcatgtccccttcctgttcttccttcctagaagcccctgtcgcccacccagctggtcctgtggatgggatcctctccaccctcctctagccatcccttggggaagggtggggagaaatataggatagacactggacatggcccattggagcacctgggccccactggacaacactgattcctggagaggtggctgcgcccccagcttctctctccctgtcacacactggaccccactggctgagaatctgggggtgaggaggacaagaaggagaggaaaatgtttccttgtgcctgctcctgtacttgtcctcagcttgggcttcttcctcctccatcacctgaaacactggacctgggggtagccccgccccagccctcagtcacccccacttcccacttgcagtcttgtagctagaacttctctaagcctatacgtttctgtggagtaaatattgggattggggggaaagagggagcaacggcccatagccttggggttggacatctctagtgtagctgccacattgatttttctataatcacttggggtttgtacatttttggggggagagacacagatttttacactaatatatggacctagcttgaggcaattttaatcccctgcactaggcaggtaataataaaggttgagttttcc

SEQ ID NO: 127232 - DNA, 3781 bp, Homo sapiens
  Payload ID: 4905
  Gene Symbol: DDR1
  Gene Name: discoidin domain receptor tyrosine kinase 1
  Uniprot ID: Q08345
  ENST ID: ENST00000548962
  CDS Start-End: 241-2925
agtgcggaggaactgagccccgggaggaggtgctcctgtgcagccccactgagtcagctcatctatcgcctgccctccacctggccagtccctgcgggcatctaactgctaagcctccgctcagccaacacccagttggtcagtctggtcacagtccagcaaaaagagggactgccactctaacccaccagtgacaccactcttcccggctggatggtcaattagctctggcatgagagaatgtcactgccgagatgctgcccccacccccttaggcccgagggatcaggagctatgggaccagaggccctgtcatctttactgctgctgctcttggtggcaagtggagatgctgacatgaagggacattttgatcctgccaagtgccgctatgccctgggcatgcaggaccggaccatcccagacagtgacatctctgcttccagctcctggtcagattccactgccgcccgccacagcaggttggagagcagtgacggggatggggcctggtgccccgcagggtcggtgtttcccaaggaggaggagtacttgcaggtggatctacaacgactccacctggtggctctggtgggcacccagggacggcatgccgggggcctgggcaaggagttctcccggagctaccggctgcgttactcccgggatggtcgccgctggatgggctggaaggaccgctggggtcaggaggtgatctcaggcaatgaggaccctgagggagtggtgctgaaggaccttgggccccccatggttgcccgactggttcgcttctacccccgggctgaccgggtcatgagtgtctgtctgcgggtagagctctatggctgcctctggagggatggactcctgtcttacaccgcccctgtggggcagacaatgtatttatctgaggccgtgtacctcaacgactccacctatgacggacataccgtgggcggactgcagtatgggggtctgggccagctggcagatggtgtggtggggctggatgactttaggaagagtcaggagctgcgggtctggccaggctatgactatgtgggatggagcaaccacagcttctccagtggctatgtggagatggagtttgagtttgaccggctgagggccttccaggctatgcaggtccactgtaacaacatgcacacgctgggagcccgtctgcctggcggggtggaatgtcgcttccggcgtggccctgccatggcctgggagggggagcccatgcgccacaacctagggggcaacctgggggaccccagagcccgggctgtctcagtgccccttggcggccgtgtggctcgctttctgcagtgccgcttcctctttgcggggccctggttactcttcagcgaaatctccttcatctctgatgtggtgaacaattcctctccggcactgggaggcaccttcccgccagccccctggtggccgcctggcccacctcccaccaacttcagcagcttggagctggagcccagaggccagcagcccgtggccaaggccgaggggagcccgaccgccatcctcatcggctgcctggtggccatcatcctgctcctgctgctcatcattgccctcatgctctggcggctgcactggcgcaggctcctcagcaaggctgaacggagggtgttggaagaggagctgacggttcacctctctgtccctggggacactatcctcatcaacaaccgcccaggtcctagagagccacccccgtaccaggagccccggcctcgtgggaatccgccccactccgctccctgtgtccccaatggctctgcctacagtggggactatatggagcctgagaagccaggcgccccgcttctgcccccacctccccagaacagcgtcccccattatgccgaggctgacattgttaccctgcagggcgtcaccgggggcaacacctatgctgtgcctgcactgcccccaggggcagtcggggatgggccccccagagtggatttccctcgatctcgactccgcttcaaggagaagcttggcgagggccagtttggggaggtgcacctgtgtgaggtcgacagccctcaagatctggtcagtcttgatttcccccttaatgtgcgtaagggacaccctttgctggtagctgtcaagatcttacggccagatgccaccaagaatgccaggaatgatttcctgaaagaggtgaagatcatgtcgaggctcaaggaccccaacatcattcggctgctgggcgtgtgtgtgcaggacgaccccctctgcatgattactgactacatggagaacggcgacctcaaccagttcctcagtgcccaccagctggaggacaaggcagccgagggggcccctggggacgggcaggctgcgcaggggcccaccatcagctacccaatgctgctgcatgtggcagcccagatcgcctccggcatgcgctatctggccacactcaactttgtacatcgggacctggccacgcggaactgcctagttggggaaaatttcaccatcaaaatcgcagactttggcatgagccggaacctctatgctggggactattaccgtgtgcagggccgggcagtgctgcccatccgctggatggcctgggagtgcatcctcatggggaagttcacgactgcgagtgacgtgtgggcctttggtgtgaccctgtgggaggtgctgatgctctgtagggcccagccctttgggcagctcaccgacgagcaggtcatcgagaacgcgggggagttcttccgggaccagggccggcaggtgtacctgtcccggccgcctgcctgcccgcagggcctatatgagctgatgcttcggtgctggagccgggagtctgagcagcgaccacccttttcccagctgcatcggttcctggcagaggatgcactcaacacggtgtgaatcacacatccagctgcccctccctcagggagtgatccaggggaagccagtgacactaaaacaagaggacacaatggcacctctgcccttcccctcccgacagcccatcacctctaatagaggcagtgagactgcaggtgggctgggcccacccagggagctgatgccccttctccccttcctggacacactctcatgtccccttcctgttcttccttcctagaagcccctgtcgcccacccagctggtcctgtggatgggatcctctccaccctcctctagccatcccttggggaagggtggggagaaatataggatagacactggacatggcccattggagcacctgggccccactggacaacactgattcctggagaggtggctgcgcccccagcttctctctccctgtcacacactggaccccactggctgagaatctgggggtgaggaggacaagaaggagaggaaaatgtttccttgtgcctgctcctgtacttgtcctcagcttgggcttcttcctcctccatcacctgaaacactggacctgggggtagccccgccccagccctcagtcacccccacttcccacctgcagtcttgtagctagaacttctctaagcctatacgtttctgtggagtaaatattgggattggggggaaagagggagcaacggcccatagccttggggttggacatctctagtgtagctgccacattgatttttctataatcacttggggtttgtacatttttggggggagagacacagatttttacactaatatatggacctagcttgaggcaattttaatcccctgcactaggcaggtaataataaaggttgagttttcc

SEQ ID NO: 127233 - DNA, 3857 bp, Homo sapiens
  Payload ID: 4905
  Gene Symbol: DDR1
  Gene Name: discoidin domain receptor tyrosine kinase 1
  Uniprot ID: Q08345
  ENST ID: ENST00000553015
  CDS Start-End: 260-3001
tgctctcgggagccgcctcccgacacccgagccccgccggcgcctcccgctcccggctcccggctcctggctccctccgcctcccccgcccctcgccccgccgccgaagaggccccgctcccgggtcggacgcctgggtctgccgggaagagcgatgagaggtgtctgaaggtggctattcactgagcgatggggttggacttgaaggaatgccaagagatgctgcccccacccccttaggcccgagggatcaggagctatgggaccagaggccctgtcatctttactgctgctgctcttggtggcaagtggagatgctgacatgaagggacattttgatcctgccaagtgccgctatgccctgggcatgcaggaccggaccatcccagacagtgacatctctgcttccagctcctggtcagattccactgccgcccgccacagcaggttggagagcagtgacggggatggggcctggtgccccgcagggtcggtgtttcccaaggaggaggagtacttgcaggtggatctacaacgactgcacctggtggctctggtgggcacccagggacggcatgccgggggcctgggcaaggagttctcccggagctaccggctgcgttactcccgggatggtcgccgctggatgggctggaaggaccgctggggtcaggaggtgatctcaggcaatgaggaccctgagggagtggtgctgaaggaccttgggccccccatggttgcccgactggttcgcttctacccccgggctgaccgggtcatgagcgtctgtctgcgggtagagctctatggctgcctctggagggatggactcctgtcttacaccgcccctgtggggcagacaatgtatttatctgaggccgtgtacctcaacgactccacctatgacggacataccgtgggcggactgcagtatgggggtctgggccagctggcagatggtgtggtggggctggatgactttaggaagagtcaggagctgcgggtctggccaggctatgactatgtgggatggagcaaccacagcttctccagtggctatgtggagatggagtttgagtttgaccggctgagggccttccaggctatgcaggtccactgtaacaacatgcacacgctgggagcccgtctgcctggcggggtggaatgtcgcttccggcgtggccctgccatggcctgggagggggagcccatgcgccacaacctagggggcaacctgggggaccccagagcccgggctgtctcagtgccccttggcggccgtgtggctcgctttctgcagtgccgcttcctctttgcggggccctggttactcttcagcgaaatctccttcatctctgatgtggtgaacaattcctctccggcactgggaggcaccttcccgccagccccctggtggccgcctggcccacctcccaccaacttcagcagcttggagctggagcccagaggccagcagcccgtggccaaggccgaggggagcccgaccgccatcctcatcggctgcctggtggccatcatcctgctcctgctgctcatcattgccctcatgctctggcggctgcactggcgcaggctcctcagcaaggctgaacggagggtgttggaagaggagctgacggttcacctctctgtccctggggacactatcctcatcaacaaccgcccaggtcctagagagccacccccgtaccaggagccccggcctcgtgggaatccgccccactctgctccctgtgtccccaatggctctgcgttgctgctctccaatccagcctaccgcctccttctggccacttacgcccgtccccctcgaggcccgggcccccccacacccgcctgggccaaacccaccaacacccaggcctacagtggggactatatggagcctgagaagccaggcgccccgcttctgcccccacctccccagaacagcgtcccccattatgccgaggctgacattgttaccctgcagggcgtcaccgggggcaacacctatgctgtgcctgcactgcccccaggggcagtcggggatgggccccccagagtggatttccctcgatctcgactccgcttcaaggagaagcttggcgagggccagtttggggaggtgcacctgtgtgaggtcgacagccctcaagatctggtcagtcttgatttcccccttaatgtgcgtaagggacaccctttgctggtagctgtcaagatcttacggccagatgccaccaagaatgccaggaatgatttcctgaaagaggtgaagatcatgtcgaggctcaaggacccaaacatcattcggctgctgggcgtgtgtgtgcaggacgaccccctctgcatgattactgactacatggagaacggcgacctcaaccagttcctcagtgcccaccagctggaggacaaggcagccgagggggcccctggggacgggcaggctgcgcaggggcccaccatcagctacccaatgctgctgcatgtggcagcccagatcgcctccggcatgcgctatctggccacactcaactttgtacatcgggacctggccacgcggaactgcctagttggggaaaatttcaccatcaaaatcgcagactttggcatgagccggaacctctatgctggggactattaccgtgtgcagggccgggcagtgctgcccatccgctggatggcctgggagtgcatcctcatggggaagttcacgactgcgagtgacgtgtgggcctttggtgtgaccctgtgggaggtgctgatgctctgtagggcccagccctttgggcagctcaccgacgagcaggtcatcgagaacgcgggggagttcttccgggaccagggccggcaggtgtacctgtcccggccgcctgcctgcccgcagggcctatatgagctgatgcttcggtgctggagccgggagtctgagcagcgaccacccttttcccagctgcatcggttcctggcagaggatgcactcaacacggtgtgaatcacacatccagctgcccctccctcagggagcgatccaggggaagccagtgacactaaaacaagaggacacaatggcacctctgcccttcccctcccgacagcccatcacctctaatagaggcagtgagactgcaggtgggctgggcccacccagggagctgatgccccttctccccttcctggacacactctcatgtccccttcctgttcttccttcctagaagcccctgtcgcccacccagctggtcctgtggatgggatcctctccaccctcctctagccatcccttggggaagggtggggagaaatataggatagacactggacatggcccattggagcacctgggccccactggacaacactgattcctggagaggtggctgcgcccccagcttctctctccctgtcacacactggaccccactggctgagaatctgggggtgaggaagacaagaaggagaggaaaatgtttccttgtgcctgctcctgtacttgtcctcagcttgggcttcttcctcctccatcacctgaaacactggacctgggggtagccccgccccagccctcagtcacccccacttcccacttgcagtcttgtagctagaacttctctaagcctatacgtttctgtggagtaaatattgggattggggggaaagagggagcaacggcccatagccttggggttggacatctctagtgtagctgccacattgatttttctataatcacttggggtttgtacatttttggggggagagacacagatttttacactaatatatggacctagcttgaggcaattttaatcccctgcactaggcaggtaataataaaggttgagttttcc

SEQ ID NO: 127234 - DNA, 3202 bp, Homo sapiens
  Payload ID: 4905
  Gene Symbol: DDR1
  Gene Name: discoidin domain receptor tyrosine kinase 1
  ENST ID: ENST00000550666
  CDS Start-End: 43-2346
agatgctgcccccacccccttaggcccgagggatcaggagctatgggaccagaggccctgtcatctttactgctgctgctcttggtggcaagtggagatgctgacatgaagggacattttgatcctgccaagtgccgctatgccctgggcatgcaggaccggaccatcccagacagtgacatctctgcttccagctcctggtcagattccactgccgcccgccacagcaggttggagagcagtgacggggatggggcctggtgccccgcagggtcggtgtttcccaaggaggaggagtacttgcaggtggatctacaacgactccacctggtggctctggtgggcacccagggacggcatgccgggggcctgggcaaggagttctcccggagctaccggctgcgttactcccgggatggtcgccgctggatgggctggaaggaccgctggggtcaggaggtgatctcaggcaatgaggaccctgagggagtggtgctgaaggaccttgggccccccatggttgcccgactggttcgcttctacccccgggctgaccgggtcatgagtgtctgtctgcgggtagagctctatggctgcctctggagggatggactcctgtcttacaccgcccctgtggggcagacaatgtatttatctgaggccgtgtacctcaacgactccacctatgacggacataccgtgggcggactgcagtatgggggtctgggccagctggcagatggtgtggtggggctggatgactttaggaagagtcaggagctgcgggtctggccaggctatgactatgtgggatggagcaaccacagcttctccagtggctatgtggagatggagtttgagtttgaccggctgagggccttccaggctatgcaggtccactgtaacaacatgcacacgctgggagcccgtctgcctggcggggtggaatgtcgcttccggcgtggccctgccatggcctgggagggggagcccatgcgccacaacctagggggcaacctgggggaccccagagcccgggctgtctcagtgccccttggcggccgtgtggctcgctttctgcagtgccgcttcctctttgcggggccctggttactcttcagcgaaatctccttcatctctgatgtggtgaacaattcctctccggcactgggaggcaccttcccgccagccccctggtggccgcctggcccacctcccaccaacttcagcagcttggagctggagcccagaggccagcagcccgtggccaaggccgaggggagcccgaccgccatcctcatcggctgcctggtggccatcatcctgctcctgctgctcatcattgccctcatgctctggcggctgcactggcgcaggctcctcagcaaggtcctagagagccacccccgtaccaggagccccggcctcgtgggaatccgccccactccgctccctgtgtccccaatggctctggtgcacctgtgtgaggtcgacagccctcaagatctggtcagtcttgatttcccccttaatgtgcgtaagggacaccctttgctggtagctgtcaagatcttacggccagatgccaccaagaatgccaggaatgatttcctgaaagaggtgaagatcatgtcgaggctcaaggaccccaacatcattcggctgctgggcgtgtgtgtgcaggacgaccccctctgcatgattactgactacatggagaacggcgacctcaaccagttcctcagtgcccaccagctggaggacaaggcagccgagggggcccctggggacgggcaggctgcgcaggggcccaccatcagctacccaatgctgctgcatgtggcagcccagatcgcctccggcatgcgctatctggccacactcaactttgtacatcgggacctggccacgcggaactgcctagttggggaaaatttcaccatcaaaatcgcagactttggcatgagccggaacctctatgctggggactattaccgtgtgcagggccgggcagtgctgcccatccgctggatggcctgggagtgcatcctcatggggaagttcacgactgcgagtgacgtgtgggcctttggtgtgaccctgtgggaggtgctgatgctctgtagggcccagccctttgggcagctcaccgacgagcaggtcatcgagaacgcgggggagttcttccgggaccagggccggcaggtgtacctgtcccggccgcctgcctgcccgcagggcctatatgagctgatgcttcggtgctggagccgggagtctgagcagcgaccacccttttcccagctgcatcggttcctggcagaggatgcactcaacacggtgtgaatcacacatccagctgcccctccctcagggagtgatccaggggaagccagtgacactaaaacaagaggacacaatggcacctctgcccttcccctcccgacagcccatcacctctaatagaggcagtgagactgcaggtgggctgggcccacccagggagctgatgccccttctccccttcctggacacactctcatgtccccttcctgttcttccttcctagaagcccctgtcgcccacccagctggtcctgtggatgggatcctctccaccctcctctagccatcccttggggaagggtggggagaaatataggatagacactggacatggcccattggagcacctgggccccactggacaacactgattcctggagaggtggctgcgcccccagcttctctctccctgtcacacactggaccccactggctgagaatctgggggtgaggaggacaagaaggagaggaaaatgtttccttgtgcctgctcctgtacttgtcctcagcttgggcttcttcctcctccatcacctgaaacactggacctgggggtagccccgccccagccctcagtcacccccacttcccacctgcagtcttgtagctagaacttctctaagcctatacgtttctgtggagtaaatattgggattggggggaaagagggagcaacggcccatagccttggggttggacatctctagtgtagctgccacattgatttttctataatcacttggggtttgtacatttttggggggagagacacagatttttacactaatatatggacctagcttgaggcaattttaatcccctgcactaggcaggtaataataaaggttgagttttcc

SEQ ID NO: 127235 - DNA, 3202 bp, Homo sapiens; identical to SEQ ID NO: 127180
  Payload ID: 4905
  Gene Symbol: DDR1
  Gene Name: discoidin domain receptor tyrosine kinase 1
  ENST ID: ENST00000552434
  CDS Start-End: 43-2346

SEQ ID NO: 127236 - DNA, 3857 bp, Homo sapiens; identical to SEQ ID NO: 127176
  Payload ID: 4905
  Gene Symbol: DDR1
  Gene Name: discoidin domain receptor tyrosine kinase 1
  Uniprot ID: Q08345
  ENST ID: ENST00000552068
  CDS Start-End: 260-3001

SEQ ID NO: 127237 - DNA, 3781 bp, Homo sapiens; identical to SEQ ID NO: 127231
  Payload ID: 4905
  Gene Symbol: DDR1
  Gene Name: discoidin domain receptor tyrosine kinase 1
  Uniprot ID: Q08345
  ENST ID: ENST00000549026
  CDS Start-End: 241-2925

SEQ ID NO: 127238 - DNA, 3857 bp, Homo sapiens; identical to SEQ ID NO: 127176
  Payload ID: 4905
  Gene Symbol: DDR1
  Gene Name: discoidin domain receptor tyrosine kinase 1
  Uniprot ID: Q08345
  ENST ID: ENST00000550395
  CDS Start-End: 260-3001

SEQ ID NO: 127239 - DNA, 3781 bp, Homo sapiens
  Payload ID: 4905
  Gene Symbol: DDR1
  Gene Name: discoidin domain receptor tyrosine kinase 1
  Uniprot ID: Q08345
  ENST ID: ENST00000552721
  CDS Start-End: 241-2925
agtgcggaggaactgagccccgggaggaggtgctcctgtgcagccccactgagtcagctcatctatcgcctgccctccacctggccagtccctgcgggcatctaactgctaagcctccgctcagccaacacccagttggtcagtctggtcacagtccagcaaaaagagggactgccactctaacccaccagtgacaccactcttcccggctggatggtcaattagctctggcatgagagaatgtcactgccgagatgctgcccccacccccttaggcccgagggatcaggagctatgggaccagaggccctgtcatctttactgctgctgctcttggtggcaagtggagatgctgacatgaagggacattttgatcctgccaagtgccgctatgccctgggcatgcaggaccggaccatcccagacagtgacatctctgcttccagctcctggtcagattccactgccgcccgccacagcaggttggagagcagtgacggggatggggcctggtgccccgcagggtcggtgtttcccaaggaggaggagtacttgcaggtggatctacaacgactgcacctggtggctctggtgggcacccagggacggcatgccgggggcctgggcaaggagttctcccggagctaccggctgcgttactcccgggatggtcgccgctggatgggctggaaggaccgctggggtcaggaggtgatctcaggcaatgaggaccctgagggagtggtgctgaaggaccttgggccccccatggttgcccgactggttcgcttctacccccgggctgaccgggtcatgagcgtctgtctgcgggtagagctctatggctgcctctggagggatggactcctgtcttacaccgcccctgtggggcagacaatgtatttatctgaggccgtgtacctcaacgactccacctatgacggacataccgtgggcggactgcagtatgggggtctgggccagctggcagatggtgtggtggggctggatgactttaggaagagtcaggagctgcgggtctggccaggctatgactatgtgggatggagcaaccacagcttctccagtggctatgtggagatggagtttgagtttgaccggctgagggccttccaggctatgcaggtccactgtaacaacatgcacacgctgggagcccgtctgcctggcggggtggaatgtcgcttccggcgtggccctgccatggcctgggagggggagcccatgcgccacaacctagggggcaacctgggggaccccagagcccgggctgtctcagtgccccttggcggccgtgtggctcgctttctgcagtgccgcttcctctttgcggggccctggttactcttcagcgaaatctccttcatctctgatgtggtgaacaattcctctccggcactgggaggcaccttcccgccagccccctggtggccgcctggcccacctcccaccaacttcagcagcttggagctggagcccagaggccagcagcccgtggccaaggccgaggggagcccgaccgccatcctcatcggctgcctggtggccatcatcctgctcctgctgctcatcattgccctcatgctctggcggctgcactggcgcaggctcctcagcaaggctgaacggagggtgttggaagaggagctgacggttcacctctctgtccctggggacactatcctcatcaacaaccgcccaggtcctagagagccacccccgtaccaggagccccggcctcgtgggaatccgccccactctgctccctgtgtccccaatggctctgcctacagtggggactatatggagcctgagaagccaggcgccccgcttctgcccccacctccccagaacagcgtcccccattatgccgaggctgacattgttaccctgcagggcgtcaccgggggcaacacctatgctgtgcctgcactgcccccaggggcagtcggggatgggccccccagagtggatttccctcgatctcgactccgcttcaaggagaagcttggcgagggccagtttggggaggtgcacctgtgtgaggtcgacagccctcaagatctggtcagtcttgatttcccccttaatgtgcgtaagggacaccctttgctggtagctgtcaagatcttacggccagatgccaccaagaatgccaggaatgatttcctgaaagaggtgaagatcatgtcgaggctcaaggacccaaacatcattcggctgctgggcgtgtgtgtgcaggacgaccccctctgcatgattactgactacatggagaacggcgacctcaaccagttcctcagtgcccaccagctggaggacaaggcagccgagggggcccctggggacgggcaggctgcgcaggggcccaccatcagctacccaatgctgctgcatgtggcagcccagatcgcctccggcatgcgctatctggccacactcaactttgtacatcgggacctggccacgcggaactgcctagttggggaaaatttcaccatcaaaatcgcagactttggcatgagccggaacctctatgctggggactattaccgtgtgcagggccgggcagtgctgcccatccgctggatggcctgggagtgcatcctcatggggaagttcacgactgcgagtgacgtgtgggcctttggtgtgaccctgtgggaggtgctgatgctctgtagggcccagccctttgggcagctcaccgacgagcaggtcatcgagaacgcgggggagttcttccgggaccagggccggcaggtgtacctgtcccggccgcctgcctgcccgcagggcctatatgagctgatgcttcggtgctggagccgggagtctgagcagcgaccacccttttcccagctgcatcggttcctggcagaggatgcactcaacacggtgtgaatcacacatccagctgcccctccctcagggagcgatccaggggaagccagtgacactaaaacaagaggacacaatggcacctctgcccttcccctcccgacagcccatcacctctaatagaggcagtgagactgcaggtgggctgggcccacccagggagctgatgccccttctccccttcctggacacactctcatgtccccttcctgttcttccttcctagaagcccctgtcgcccacccagctggtcctgtggatgggatcctctccaccctcctctagccatcccttggggaagggtggggagaaatataggatagacactggacatggcccattggagcacctgggccccactggacaacactgattcctggagaggtggctgcgcccccagcttctctctccctgtcacacactggaccccactggctgagaatctgggggtgaggaagacaagaaggagaggaaaatgtttccttgtgcctgctcctgtacttgtcctcagcttgggcttcttcctcctccatcacctgaaacactggacctgggggtagccccgccccagccctcagtcacccccacttcccacttgcagtcttgtagctagaacttctctaagcctatacgtttctgtggagtaaatattgggattggggggaaagagggagcaacggcccatagccttggggttggacatctctagtgtagctgccacattgatttttctataatcacttggggtttgtacatttttggggggagagacacagatttttacactaatatatggacctagcttgaggcaattttaatcccctgcactaggcaggtaataataaaggttgagttttcc

SEQ ID NO: 127240 - DNA, 3857 bp, Homo sapiens
  Payload ID: 4905
  Gene Symbol: DDR1
  Gene Name: discoidin domain receptor tyrosine kinase 1
  Uniprot ID: Q08345
  ENST ID: ENST00000548133
  CDS Start-End: 260-3001
tgctctcgggagccgcctcccgacacccgagccccgccggcgcctcccgctcccggctcccggctcctggctccctccgcctcccccgcccctcgccccgccgccgaagaggccccgctcccgggtcggacgcctgggtctgccgggaagagcgatgagaggtgtctgaaggtggctattcactgagcgatggggttggacttgaaggaatgccaagagatgctgcccccacccccttaggcccgagggatcaggagctatgggaccagaggccctgtcatctttactgctgctgctcttggtggcaagtggagatgctgacatgaagggacattttgatcctgccaagtgccgctatgccctgggcatgcaggaccggaccatcccagacagtgacatctctgcttccagctcctggtcagattccactgccgcccgccacagcaggttggagagcagtgacggggatggggcctggtgccccgcagggtcggtgtttcccaaggaggaggagtacttgcaggtggatctacaacgactccacctggtggctctggtgggcacccagggacggcatgccgggggcctgggcaaggagttctcccggagctaccggctgcgttactcccgggatggtcgccgctggatgggctggaaggaccgctggggtcaggaggtgatctcaggcaatgaggaccctgagggagtggtgctgaaggaccttgggccccccatggttgcccgactggttcgcttctacccccgggctgaccgggtcatgagtgtctgtctgcgggtagagctctatggctgcctctggagggatggactcctgtcttacaccgcccctgtggggcagacaatgtatttatctgaggccgtgtacctcaacgactccacctatgacggacataccgtgggcggactgcagtatgggggtctgggccagctggcagatggtgtggtggggctggatgactttaggaagagtcaggagctgcgggtctggccaggctatgactatgtgggatggagcaaccacagcttctccagtggctatgtggagatggagtttgagtttgaccggctgagggccttccaggctatgcaggtccactgtaacaacatgcacacgctgggagcccgtctgcctggcggggtggaatgtcgcttccggcgtggccctgccatggcctgggagggggagcccatgcgccacaacctagggggcaacctgggggaccccagagcccgggctgtctcagtgccccttggcggccgtgtggctcgctttctgcagtgccgcttcctctttgcggggccctggttactcttcagcgaaatctccttcatctctgatgtggtgaacaattcctctccggcactgggaggcaccttcccgccagccccctggtggccgcctggcccacctcccaccaacttcagcagcttggagctggagcccagaggccagcagcccgtggccaaggccgaggggagcccgaccgccatcctcatcggctgcctggtggccatcatcctgctcctgctgctcatcattgccctcatgctctggcggctgcactggcgcaggctcctcagcaaggctgaacggagggtgttggaagaggagctgacggttcacctctctgtccctggggacactatcctcatcaacaaccgcccaggtcctagagagccacccccgtaccaggagccccggcctcgtgggaatccgccccactccgctccctgtgtccccaatggctctgcgttgctgctctccaatccagcctaccgcctccttctggccacttacgcccgtccccctcgaggcccgggcccccccacacccgcctgggccaaacccaccaacacccaggcctacagtggggactatatggagcctgagaagccaggcgccccgcttctgcccccacctccccagaacagcgtcccccattatgccgaggctgacattgttaccctgcagggcgtcaccgggggcaacacctatgctgtgcctgcactgcccccaggggcagtcggggatgggccccccagagtggatttccctcgatctcgactccgcttcaaggagaagcttggcgagggccagtttggggaggtgcacctgtgtgaggtcgacagccctcaagatctggtcagtcttgatttcccccttaatgtgcgtaagggacaccctttgctggtagctgtcaagatcttacggccagatgccaccaagaatgccaggaatgatttcctgaaagaggtgaagatcatgtcgaggctcaaggaccccaacatcattcggctgctgggcgtgtgtgtgcaggacgaccccctctgcatgattactgactacatggagaacggcgacctcaaccagttcctcagtgcccaccagctggaggacaaggcagccgagggggcccctggggacgggcaggctgcgcaggggcccaccatcagctacccaatgctgctgcatgtggcagcccagatcgcctccggcatgcgctatctggccacactcaactttgtacatcgggacctggccacgcggaactgcctagttggggaaaatttcaccatcaaaatcgcagactttggcatgagccggaacctctatgctggggactattaccgtgtgcagggccgggcagtgctgcccatccgctggatggcctgggagtgcatcctcatggggaagttcacgactgcgagtgacgtgtgggcctttggtgtgaccctgtgggaggtgctgatgctctgtagggcccagccctttgggcagctcaccgacgagcaggtcatcgagaacgcgggggagttcttccgggaccagggccggcaggtgtacctgtcccggccgcctgcctgcccgcagggcctatatgagctgatgcttcggtgctggagccgggagtctgagcagcgaccacccttttcccagctgcatcggttcctggcagaggatgcactcaacacggtgtgaatcacacatccagctgcccctccctcagggagtgatccaggggaagccagtgacactaaaacaagaggacacaatggcacctctgcccttcccctcccgacagcccatcacctctaatagaggcagtgagactgcaggtgggctgggcccacccagggagctgatgccccttctccccttcctggacacactctcatgtccccttcctgttcttccttcctagaagcccctgtcgcccacccagctggtcctgtggatgggatcctctccaccctcctctagccatcccttggggaagggtggggagaaatataggatagacactggacatggcccattggagcacctgggccccactggacaacactgattcctggagaggtggctgcgcccccagcttctctctccctgtcacacactggaccccactggctgagaatctgggggtgaggaggacaagaaggagaggaaaatgtttccttgtgcctgctcctgtacttgtcctcagcttgggcttcttcctcctccatcacctgaaacactggacctgggggtagccccgccccagccctcagtcacccccacttcccacctgcagtcttgtagctagaacttctctaagcctatacgtttctgtggagtaaatattgggattggggggaaagagggagcaacggcccatagccttggggttggacatctctagtgtagctgccacattgatttttctataatcacttggggtttgtacatttttggggggagagacacagatttttacactaatatatggacctagcttgaggcaattttaatcccctgcactaggcaggtaataataaaggttgagttttcc

SEQ ID NO: 127241 - DNA, 732 bp, Homo sapiens; identical to SEQ ID NO: 127122
  Payload ID: 4905
  Gene Symbol: DDR1
  Gene Name: discoidin domain receptor tyrosine kinase 1
  Uniprot ID: Q08345
  ENST ID: ENST00000617572
  CDS Start-End: 1-732

SEQ ID NO: 127242 - DNA, 732 bp, Homo sapiens; identical to SEQ ID NO: 127122
  Payload ID: 4905
  Gene Symbol: DDR1
  Gene Name: discoidin domain receptor tyrosine kinase 1
  Uniprot ID: Q08345
  ENST ID: ENST00000618059
  CDS Start-End: 1-732

SEQ ID NO: 127243 - DNA, 3202 bp, Homo sapiens
  Payload ID: 4905
  Gene Symbol: DDR1
  Gene Name: discoidin domain receptor tyrosine kinase 1
  ENST ID: ENST00000616404
  CDS Start-End: 43-2346
agatgctgcccccacccccttaggcccgagggatcaggagctatgggaccagaggccctgtcatctttactgctgctgctcttggtggcaagtggagatgctgacatgaagggacattttgatcctgccaagtgccgctatgccctgggcatgcaggaccggaccatcccagacagtgacatctctgcttccagctcctggtcagattccactgccgcccgccacagcaggttggagagcagtgacggggatggggcctggtgccccgcagggtcggtgtttcccaaggaggaggagtacttgcaggtggatctacaacgactgcacctggtggctctggtgggcacccagggacggcatgccgggggcctgggcaaggagttctcccggagctaccggctgcgttactcccgggatggtcgccgctggatgggctggaaggaccgctggggtcaggaggtgatctcaggcaatgaggaccctgagggagtggtgctgaaggaccttgggccccccatggttgcccgactggttcgcttctacccccgggctgaccgggtcatgagcgtctgtctgcgggtagagctctatggctgcctctggagggatggactcctgtcttacaccgcccctgtggggcagacaatgtatttatctgaggccgtgtacctcaacgactccacctatgacggacataccgtgggcggactgcagtatgggggtctgggccagctggcagatggtgtggtggggctggatgactttaggaagagtcaggagctgcgggtctggccaggctatgactatgtgggatggagcaaccacagcttctccagtggctatgtggagatggagtttgagtttgaccggctgagggccttccaggctatgcaggtccactgtaacaacatgcacacgctgggagcccgtctgcctggcggggtggaatgtcgcttccggcgtggccctgccatggcctgggagggggagcccatgcgccacaacctagggggcaacctgggggaccccagagcccgggctgtctcagtgccccttggcggccgtgtggctcgctttctgcagtgccgcttcctctttgcggggccctggttactcttcagcgaaatctccttcatctctgatgtggtgaacaattcctctccggcactgggaggcaccttcccgccagccccctggtggccgcctggcccacctcccaccaacttcagcagcttggagctggagcccagaggccagcagcccgtggccaaggccgaggggagcccgaccgccatcctcatcggctgcctggtggccatcatcctgctcctgctgctcatcattgccctcatgctctggcggctgcactggcgcaggctcctcagcaaggtcctagagagccacccccgtaccaggagccccggcctcgtgggaatccgccccactctgctccctgtgtccccaatggctctggtgcacctgtgtgaggtcgacagccctcaagatctggtcagtcttgatttcccccttaatgtgcgtaagggacaccctttgctggtagctgtcaagatcttacggccagatgccaccaagaatgccaggaatgatttcctgaaagaggtgaagatcatgtcgaggctcaaggacccaaacatcattcggctgctgggcgtgtgtgtgcaggacgaccccctctgcatgattactgactacatggagaacggcgacctcaaccagttcctcagtgcccaccagctggaggacaaggcagccgagggggcccctggggacgggcaggctgcgcaggggcccaccatcagctacccaatgctgctgcatgtggcagcccagatcgcctccggcatgcgctatctggccacactcaactttgtacatcgggacctggccacgcggaactgcctagttggggaaaatttcaccatcaaaatcgcagactttggcatgagccggaacctctatgctggggactattaccgtgtgcagggccgggcagtgctgcccatccgctggatggcctgggagtgcatcctcatggggaagttcacgactgcgagtgacgtgtgggcctttggtgtgaccctgtgggaggtgctgatgctctgtagggcccagccctttgggcagctcaccgacgagcaggtcatcgagaacgcgggggagttcttccgggaccagggccggcaggtgtacctgtcccggccgcctgcctgcccgcagggcctatatgagctgatgcttcggtgctggagccgggagtctgagcagcgaccacccttttcccagctgcatcggttcctggcagaggatgcactcaacacggtgtgaatcacacatccagctgcccctccctcagggagcgatccaggggaagccagtgacactaaaacaagaggacacaatggcacctctgcccttcccctcccgacagcccatcacctctaatagaggcagtgagactgcaggtgggctgggcccacccagggagctgatgccccttctccccttcctggacacactctcatgtccccttcctgttcttccttcctagaagcccctgtcgcccacccagctggtcctgtggatgggatcctctccaccctcctctagccatcccttggggaagggtggggagaaatataggatagacactggacatggcccattggagcacctgggccccactggacaacactgattcctggagaggtggctgcgcccccagcttctctctccctgtcacacactggaccccactggctgagaatctgggggtgaggaagacaagaaggagaggaaaatgtttccttgtgcctgctcctgtacttgtcctcagcttgggcttcttcctcctccatcacctgaaacactggacctgggggtagccccgccccagccctcagtcacccccacttcccacttgcagtcttgtagctagaacttctctaagcctatacgtttctgtggagtaaatattgggattggggggaaagagggagcaacggcccatagccttggggttggacatctctagtgtagctgccacattgatttttctataatcacttggggtttgtacatttttggggggagagacacagatttttacactaatatatggacctagcttgaggcaattttaatcccctgcactaggcaggtaataataaaggttgagttttcc

SEQ ID NO: 127244 - DNA, 732 bp, Homo sapiens
  Payload ID: 4905
  Gene Symbol: DDR1
  Gene Name: discoidin domain receptor tyrosine kinase 1
  Uniprot ID: Q08345
  ENST ID: ENST00000621544
  CDS Start-End: 1-732
atgggaccagaggccctgtcatctttactgctgctgctcttggtggcaagtggagatgctgacatgaagggacattttgatcctgccaagtgccgctatgccctgggcatgcaggaccggaccatcccagacagtgacatctctgcttccagctcctggtcagattccactgccgcccgccacagcaggttggagagcagtgacggggatggggcctggtgccccgcagggtcggtgtttcccaaggaggaggagtacttgcaggtggatctacaacgactccacctggtggctctggtgggcacccagggacggcatgccgggggcctgggcaaggagttctcccggagctaccggctgcgttactcccgggatggtcgccgctggatgggctggaaggaccgctggggtcaggaggtgatctcaggcaatgaggaccctgagggagtggtgctgaaggaccttgggccccccatggttgcccgactggttcgcttctacccccgggctgaccgggtcatgagtgtctgtctgcgggtagagctctatggctgcctctggagggactgcagtatgggggtctgggccagctggcagatggtgtggtggggctggatgactttaggaagagtcaggagctgcgggtctggccaggctatgactatgtgggatggagcaaccacagcttctccagtggctatgtggagatggagtttgagtttgaccggctga

SEQ ID NO: 127245 - DNA, 732 bp, Homo sapiens; identical to SEQ ID NO: 127122
  Payload ID: 4905
  Gene Symbol: DDR1
  Gene Name: discoidin domain receptor tyrosine kinase 1
  Uniprot ID: Q08345
  ENST ID: ENST00000620318
  CDS Start-End: 1-732

SEQ ID NO: 127246 - DNA, 3096 bp, Homo sapiens
  Payload ID: 4906
  Gene Symbol: DDR2
  Gene Name: discoidin domain receptor tyrosine kinase 2
  Uniprot ID: Q16832
  ENST ID: ENST00000367921
  CDS Start-End: 354-2921
catcttgcatcagcctgtggatgtatgcctaccaccgggctccttcaccagcaaagtggaaaaagaagcgtttcacaacaaattcttctttttgggttggggaaacgcagtggattatagctctgttttcttctttccaaaactgtgcacccctggatgaaacctccatcaagggagacctgcaagttgcctggggttcagtgctctagaaagttccaaggtttgtggcttgaattattctaaagaagctgaaataattgaagagaagcagaggccagctgtttttgaggatcctgctccacagagaatgctctgcacccgttgatactccagttccaacaccatcttctgagatgatcctgattcccagaatgctcttggtgctgttcctgctgctgcctatcttgagttctgcaaaagctcaggttaatccagctatatgccgctatcctctgggcatgtcaggaggccagattccagatgaggacatcacagcttccagtcagtggtcagagtccacagctgccaaatatggaaggctggactcagaagaaggggatggagcctggtgccctgagattccagtggaacctgatgacctgaaggagtttctgcagattgacttgcacaccctccattttatcactctggtggggacccaggggcgccatgcaggaggtcatggcatcgagtttgcccccatgtacaagatcaattacagtcgggatggcactcgctggatctcttggcggaaccgtcatgggaaacaggtgctggatggaaatagtaacccctatgacattttcctaaaggacttggagccgcccattgtagccagatttgtccggttcattccagtcaccgaccactccatgaatgtgtgtatgagagtggagctttacggctgtgtctggctagatggcttggtgtcttacaatgctccagctgggcagcagtttgtactccctggaggttccatcatttatctgaatgattctgtctatgatggagctgttggatacagcatgacagaagggctaggccaattgaccgatggtgtgtctggcctggacgatttcacccagacccatgaataccacgtgtggcccggctatgactatgtgggctggcggaacgagagtgccaccaatggctacattgagatcatgtttgaatttgaccgcatcaggaatttcactaccatgaaggtccactgcaacaacatgtttgctaaaggtgtgaagatctttaaggaggtacagtgctacttccgctctgaagccagtgagtgggaacctaatgccatttccttcccccttgtcctggatgacgtcaaccccagtgctcggtttgtcacggtgcctctccaccaccgaatggccagtgccatcaagtgtcaataccattttgcagatacctggatgatgttcagtgagatcaccttccaatcagatgctgcaatgtacaacaactctgaagccctgcccacctctcctatggcacccacaacctatgatccaatgcttaaagttgatgacagcaacactcggatcctgattggctgcttggtggccatcatctttatcctcctggccatcattgtcatcatcctctggaggcagttctggcagaaaatgctggagaaggcttctcggaggatgctggatgatgaaatgacagtcagcctttccctgccaagtgattctagcatgttcaacaataaccgctcctcatcacctagtgaacaagggtccaactcgacttacgatcgcatctttccccttcgccctgactaccaggagccatccaggctgatacgaaaactcccagaatttgctccaggggaggaggagtcaggctgcagcggtgttgtgaagccagtccagcccagtggccctgagggggtgccccactatgcagaggctgacatagtgaacctccaaggagtgacaggaggcaacacatactcagtgcctgccgtcaccatggacctgctctcaggaaaagatgtggctgtggaggagttccccaggaaactcctaactttcaaagagaagctgggagaaggacagtttggggaggttcatctctgtgaagtggagggaatggaaaaattcaaagacaaagattttgccctagatgtcagtgccaaccagcctgtcctggtggctgtgaaaatgctccgagcagatgccaacaagaatgccaggaatgattttcttaaggagataaagatcatgtctcggctcaaggacccaaacatcatccatctattagctgtgtgtatcactgatgaccctctctgtatgatcactgaatacatggagaatggagatctcaatcagtttctttcccgccacgagccccctaattcttcctccagcgatgtacgcactgtcagttacaccaatctgaagtttatggctacccaaattgcctctggcatgaagtacctttcctctcttaattttgttcaccgagatctggccacacgaaactgtttagtgggtaagaactacacaatcaagatagctgactttggaatgagcaggaacctgtacagtggtgactattaccggatccagggccgggcagtgctccctatccgctggatgtcttgggagagtatcttgctgggcaagttcactacagcaagtgatgtgtgggcctttggggttactttgtgggagactttcaccttttgtcaagaacagccctattcccagctgtcagatgaacaggttattgagaatactggagagttcttccgagaccaagggaggcagacttacctccctcaaccagccatttgtcctgactctgtgtataagctgatgctcagctgctggagaagagatacgaagaaccgtccctcattccaagaaatccaccttctgctccttcaacaaggcgacgagtgatgctgtcagtgcctggccatgttcctacggctcaggtcctccctacaagacctaccactcacccatgcctatgccactccatctggacatttaatgaaactgagagacagaggcttgtttgctttgccctcttttcctggtcacccccactccctacccctgactcatatacact

SEQ ID NO: 127247 - DNA, 10160 bp, Homo sapiens
  Payload ID: 4906
  Gene Symbol: DDR2
  Gene Name: discoidin domain receptor tyrosine kinase 2
  Uniprot ID: Q16832
  ENST ID: ENST00000367922
  CDS Start-End: 439-3006
aaaggcatcttgcatcagcctgtggatgtatgcctaccaccgggctccttcaccagcaaagtggaaaaagaagcgtttcacaacaaattcttctttttgggttggggaaacgcagtggattatagctctgttttcttctttccaaaactgtgcacccctggatgaaacctccatcaagggagacctgcaagttgcctggggttcagtgctctagaaagttccaaggtttgtggcttgaattattctaaagaagctgaaataattgaagagaagcagaggccagctgtttttgaggatcctgctccacagagaatgctctgcacccgttgatatgcctcccaggacccagagggagactgtagcctcatttctgtggagacctttggctggactctcctggctctcccagagactccagttccaacaccatcttctgagatgatcctgattcccagaatgctcttggtgctgttcctgctgctgcctatcttgagttctgcaaaagctcaggttaatccagctatatgccgctatcctctgggcatgtcaggaggccagattccagatgaggacatcacagcttccagtcagtggtcagagtccacagctgccaaatatggaaggctggactcagaagaaggggatggagcctggtgccctgagattccagtggaacctgatgacctgaaggagtttctgcagattgacttgcacaccctccattttatcactctggtggggacccaggggcgccatgcaggaggtcatggcatcgagtttgcccccatgtacaagatcaattacagtcgggatggcactcgctggatctcttggcggaaccgtcatgggaaacaggtgctggatggaaatagtaacccctatgacattttcctaaaggacttggagccgcccattgtagccagatttgtccggttcattccagtcaccgaccactccatgaatgtgtgtatgagagtggagctttacggctgtgtctggctagatggcttggtgtcttacaatgctccagctgggcagcagtttgtactccctggaggttccatcatttatctgaatgattctgtctatgatggagctgttggatacagcatgacagaagggctaggccaattgaccgatggtgtgtctggcctggacgatttcacccagacccatgaataccacgtgtggcccggctatgactatgtgggctggcggaacgagagtgccaccaatggctacattgagatcatgtttgaatttgaccgcatcaggaatttcactaccatgaaggtccactgcaacaacatgtttgctaaaggtgtgaagatctttaaggaggtacagtgctacttccgctctgaagccagtgagtgggaacctaatgccatttccttcccccttgtcctggatgacgtcaaccccagtgctcggtttgtcacggtgcctctccaccaccgaatggccagtgccatcaagtgtcaataccattttgcagatacctggatgatgttcagtgagatcaccttccaatcagatgctgcaatgtacaacaactctgaagccctgcccacctctcctatggcacccacaacctatgatccaatgcttaaagttgatgacagcaacactcggatcctgattggctgcttggtggccatcatctttatcctcctggccatcattgtcatcatcctctggaggcagttctggcagaaaatgctggagaaggcttctcggaggatgctggatgatgaaatgacagtcagcctttccctgccaagtgattctagcatgttcaacaataaccgctcctcatcacctagtgaacaagggtccaactcgacttacgatcgcatctttccccttcgccctgactaccaggagccatccaggctgatacgaaaactcccagaatttgctccaggggaggaggagtcaggctgcagcggtgttgtgaagccagtccagcccagtggccctgagggggtgccccactatgcagaggctgacatagtgaacctccaaggagtgacaggaggcaacacatactcagtgcctgccgtcaccatggacctgctctcaggaaaagatgtggctgtggaggagttccccaggaaactcctaactttcaaagagaagctgggagaaggacagtttggggaggttcatctctgtgaagtggagggaatggaaaaattcaaagacaaagattttgccctagatgtcagtgccaaccagcctgtcctggtggctgtgaaaatgctccgagcagatgccaacaagaatgccaggaatgattttcttaaggagataaagatcatgtctcggctcaaggacccaaacatcatccatctattagctgtgtgtatcactgatgaccctctctgtatgatcactgaatacatggagaatggagatctcaatcagtttctttcccgccacgagccccctaattcttcctccagcgatgtacgcactgtcagttacaccaatctgaagtttatggctacccaaattgcctctggcatgaagtacctttcctctcttaattttgttcaccgagatctggccacacgaaactgtttagtgggtaagaactacacaatcaagatagctgactttggaatgagcaggaacctgtacagtggtgactattaccggatccagggccgggcagtgctccctatccgctggatgtcttgggagagtatcttgctgggcaagttcactacagcaagtgatgtgtgggcctttggggttactttgtgggagactttcaccttttgtcaagaacagccctattcccagctgtcagatgaacaggttattgagaatactggagagttcttccgagaccaagggaggcagacttacctccctcaaccagccatttgtcctgactctgtgtataagctgatgctcagctgctggagaagagatacgaagaaccgtccctcattccaagaaatccaccttctgctccttcaacaaggcgacgagtgatgctgtcagtgcctggccatgttcctacggctcaggtcctccctacaagacctaccactcacccatgcctatgccactccatctggacatttaatgaaactgagagacagaggcttgtttgctttgccctcttttcctggtcacccccactccctacccctgactcatatacacttttttttttttttacattaaagaactaaaaaaggaaaaaaaaaagcctagggcagatacaatctagtaaaagaaaatctttgatataccaaagtgttggataacaaaggctagaaaattcagataatttataaaggttaactatacttgtgcttataaatgtgcagattctacaatatttttccatgtcattctaaaagaatcttcagaaagaaaaacttgaagaatactaatgtcttgggaaacatgagattaagtttagggaaaacacttgatagatgtggagaatctgaggactcagaattcagcaactaatcacaggtggttttctaatttggcctctggacatgtctcactgtttgtatttctctctcctgtcaaagtgaatgatatattcttgaaaacccccaatttcttgaaatgggtgttctgttcattcatgggcaggggtcaggattgaagttcatatatgaaacaactggggatgtagataggaaagaatgtctgctgcaagagtgtatgaagggggattgtcatttacaaaaaaaaagtacctcatggatggaaggattcatgaatagataatggacataggaaaggaggtcaatggaggacacataacagacatgctatccaccatttatttgtgattttgtaagagggttctcttctttgtcttgttcagatattttcatgtgtgtgttttagtgagaatctgagtttttaatcagtaaagtctgatgttttgatatcttgatgttttgatggtagactcttgagttcatcttgtccaaatcttctagcattttcaaggatgaagcctctgtgggatctttgggcttggggctgaatttctcaggcataaatacctaatggccttgtctaagagggaatagatctgttctgagtgtccccaaaaaagttgtcctaggaactgatgtggagaagttacagggagactgatttccattccttattggggaaaacgaagcactcagaacatacaaggataaatgggctgccaccagaggtgaggagtctcttgtcactggagaggttaagatagaggctcaagaacaatgcaaggaaaatggaggttttcaaacacaaagtggatggtggtatgagacaatgtttaatgtccttctaactccgagagtccttgattctggagaggcacaggatgaacatctgttgctactgctgagtatacacactcttgcctctgagatggcgtgaccagcagaaaagaaagctcagggctgtggcttcagaattcatggaaacagagccactgtcaagaaggaatctgctcagagcagattctgagttttcacactccacaaatcctcagatttagtgggaagctggaaaaaggaactcttaattccaattgaggagaaacaagaaaacattacaaatcagtttcccaagctgagaaggattagccttgaccccttgggtctgcctctgttgccctcaccagtttaccttctacaacagtttctcaggaacatgtgtatttccccattcagctttcagcattgctccacgccacagcataagcatagatcccaagtccacaggctccattttgcaggtcatcttctgatcctagcaaatgtcctttccccatagttgtcctatgcctttgggctttagtctatcccaggactaactgtggagaaatcattggtttgagagtcaagagagcattggtttgggagctttaatcctctttctgcttcacactaagtgtgtcatcttggctaaatcacttggtctttctgcattttgttttcttatttataggatgaggaaattagattaaatggttttgaggtcctttcttgttctgatatgtccagtactcactggaaaattggatctataactgatgggtttagtaatctggtcatttcttgctctgaaaattgtagtcagcaaaagagatcatggaagaaatcactgtaatggtagtaatagtaacacatgccatttgtattgtgccttaggtttaccaggtgtttccaaatacattagcatatttgatatgtgcaggactagataccttgggacctgccacactccactttcaagatatgtattagcttcattagaattaaagggacttgaactcaggacctgcagcctattcttctttatccacatgtctctggtagggctacatccagatcacaccatgacttcttatagagcaagagaaaataatattattatatcttcctttgcctaaaatctctccacttattcttttttatgattctgcaccagttcactgggttattctatgattccatattttttttaaaaaaaatcatatttaaaatgaacttacaatgtctgaattttcctggccttgagtcacagaagtaatatgtttcagatggctgcccaatatgtattatcatgtaatacatatctgtgtccttttctgggatgaggaaggcttcaacttctggcactgagaactttgtattacagacacaggtttagtttctagcttagtcatgcctttagagtttagtagcacaaatccatgcaacccaacagaatacatggtgagggcctagtatgtagaatttgaaagtagttcaaatttgaattagaagaatgaagctaggacttatttggaaaaggagatagaaaaaaaatgatcagaaactgtggggccttattacctttgcagtaagttatcttcttcatgatatatgtgaattattttatgtgcagattgtgttttgggattgtcagatctaaacttatattcttgctggctaatgtgctgatagccaggtctgaaacttgatgtgctatccagacacatatgatcagaaaagatctagagtgcaaagaggtgcctgaggagcaaaatgtggttttaatgttgtggaaagatcacttgcaagtatataagactgtataaagaagaggactgtgtgcaagtggggtgaaaaaaaaggatacgtgaatgtgcatatgactgaatagggaggaaggtcagggctagaaaggaggctacataaaaaggggcaatggagaatgcacaggaaagacacaggggaaggtcaagtcgagcaaggtagaaacaggagtagctagagccattgggaatccattttgaaacaagaaggagttttgaaagggaataggaaagtaagtgtcttgaagtaaaagataaatatggatggagaaagaagaaattctggatgatagagatgataaaaatatttattaagaaatgaagtcaggttcagtgtatgaaatggaaaggaatttttcagaattttaagaaaggggaagttcctcttggaaaagatatagcaaccatcggggaatgaccttttcatttcagaagtggatgaggaaggtggtgtgagcatcaggtatattctggaccatttcaagtgctggtgagaagaaaggaactctttgcctgaactgggcttggttttccaagtgctgctttggaaatgaagacccagagatgcagagcttatggtagttcataaatcttcatgttctattatctttcatctgccaataaagttcattttcaataatgtccaccattgctgtgcccagaataaccacaggcaaacatcaaaacaatacgcataagttagacaagattaaatcttgtctgatatctgcacaaacagatatgcaccatgttggaaacatgtgttttcctagtcccatccaggcttcccacaagaaagccatgatgtgggtctaaaccatatgttttgagtaaaggagaatagaagaaggggagtgtccgcaaaatggaaagagatgaagatgttccaaggaagtatgctgaaacagaacagtgaatgttttgcccaaaactacaaaaataaaagaaaaaaagaaaattgcaatacatggctactaagtctttgatcataagtcgaatttatagacctggaatttgccatcctagtctttcctttttagtaagacttctgtcctctggcagtgcatatggtaggtctctaatgtttcttcatctccaggaagatgcagatccttatttttgctgggaaatccttctaaatagaaatgtaacatttttataaaaacagattaatgtgtttttcacttagtaaatgttttcaagagctgaattgagaaggaaagagactggagtggttaatggtgatttgatttctggcattctgagttttctgctacaattagctgcattacttggtgccaaagagcagtggggaattgttgagttgctgtatcctttaaaaaaaaacaaaaaacttgttattttgaaagaacttaaggctcacaagatgttacaaaaatagtagagtggccttaccctagatccagttttccccatttataacatttcacttagtccattttcggaaccagaaaattaacattggcataatgctattaactaaactacagaccttttttcaatttcgccagtttttccacacatattcatttagttgctggatacttttaattcttgctgatttgtaaactggccttgcttggatacaacaggaaagatactatctggataaagttctacagttttagagagactattaacacattaatgtgttcctttgtcatgagcaataccctgcctacactgcttctaaattttctgatttgtttggctgtttggcatctgaaacaatccaagacaaacttagaaagattaggcaacacaaaacacagtaagacctgttcatagcttgttgtctagaaaaccaggtagcaggatattctagatgcttcctgctgcttctacgtgagtaggattagcactggggacaaaataaggagtttagagtaaaccagtatttcagtcaagagttagttggcacttagttaatggcactggaaatagcttgtggagagaatagaatacaatggtatagactcctaatgtttgataaaatactattttcagagtggtagagaggttttatttgcctaaatagccgttattaaatggaataacaaccacattagaccaaattaattgcaaacacagcggcaacctggggagaagttgaaactccagttttgtggattacagttttgagttttatgattgacatttttaagtcccctatttaaggggtcaagattataacaatgtgtgtcttactaagtttctaggtcattgtgagcacttgataaatatttgctgaatgttgtttttttgaatgaacataagatagaaacaaaaacttctcatccagttaactagagtgaatgtagggagaattgttttgcttgtaacatggagagtttattttcaagtgaggaaagagaaaaaaattactcagacttgttcctggtgaagtgcattctctgtttgtatactttttgatggagaaattgatctatagaactgcttaattttttgaggcatttagacagcaatgaaaggtagttctccacaggacaccgaatcaaaaggagagaccagactctggcctcatacccagcctatttgaaacaagctatctagtttctcctgcagacaccttgtcaacaacatgcaacagtgtcaggtgccttgcaggaaaataatctgagtcccaagctagcctgtgctcatccacaatcacaatgaacatgtcaaggaagaatttgcagagactcaagggaagcacaatgggataaggtaatcactttcagtgaaaaactgttttcttgaaaacaggcttggacacaattgaaagctggcttcctgcaaacacaccaagagtctgtaatctagcctatccattatatgtcctttattattcatgatatcctattcttctaccttgttgcctggtaactttttctgaggactgagtttctgcagcgatgtggtgcactcttcctgtgatgaggaaacatctgggcccccttctgcaggctttggaagatgatgtgtcttgtcaaggggtaaagggcaaatggatttaatttctgcttaaaactatcatagacgttccaaatagaatatgtaaaatttctctgtattagaaaaagaaacgtgataccaattgtatattttcttttctttatttattctctgtaagtctgtcagatgataaattgtaaataacaatgattaaagagtcatgctactgatggatctccctttctgtataaacagtgccagttctgggctttgtaacctttgctctttatagtctttcattcctggggaagtgatggggcatgggcccagagctggggtgtatgtggtatggacacctgtttgtggggctttccagcaaaggattatttaaatagacctctaacatatgagttgactgtttattgggaagaaagcatcttggtctctgacatatccaaacatacgagacactgggattttacgtcctcacattaattagtccagttctggggaatccagtctagaattaactggtgatcccttatcgttatggttacagacttgtcttgtttgatacacagaaatcctttttaaatccaaatatagtctgtctcagactacctgcacatgcacaaaccaaaaaaaactatgaaaaccagaatttagactcagtcattatactagagattagaatgaaacgaccccaaacaacccatttcttacctggtctctgagaataagtttatacttttagttttctgagaatatttctcagaatatgtgagttttctgagcacatttttcagcatggggtatggtagataaatcacagggccaaggtttggcagggatagatgggatcattgtgtaccctattgttcttctgatttccaggagaacagaatgagcccatgcaaaacataaacttatgatgattaaaaaaaacacacctatccattcactcatcaataaaaacatattatgatggttatcaagctgtgtcctatgagtgataaaatatttgtaaaatataaaattaaatggcatctattttgaa

SEQ ID NO: 127248 - DNA, 718 bp, Homo sapiens
  Payload ID: 4906
  Gene Symbol: DDR2
  Gene Name: discoidin domain receptor tyrosine kinase 2
  ENST ID: ENST00000415555
  CDS Start-End: 275-718
gctccgcgtgtgtgccccaactgtcctggaagcttcaattggaaaactccaaactttaagttttgcttatagcttcagctcaacctccatcaagggagacctgcaagttgcctggggttcagtgctctagaaagttccaaggtttgtggcttgaattattctaaagaagctgaaataattgaagagaagcagaggccagctgtttttgaggatcctgctccacagagaatgctctgcacccgttgatactccagttccaacaccatcttctgagatgatcctgattcccagaatgctcttggtgctgttcctgctgctgcctatcttgagttctgcaaaagctcaggttaatccagctatatgccgctatcctctgggcatgtcaggaggccagattccagatgaggacatcacagcttccagtcagtggtcagagtccacagctgccaaatatggaaggctggactcagaagaaggggatggagcctggtgccctgagattccagtggaacctgatgacctgaaggagtttctgcagattgacttgcacaccctccattttatcactctggtggggacccaggggcgccatgcaggaggtcatggcatcgagtttgcccccatgtacaagatcaattacagtcgggatggcactcgctggatctcttggcggaaccgtcatgggaaacaggtgctggatggaaatagtaacccctat

SEQ ID NO: 127249 - DNA, 693 bp, Homo sapiens
  Payload ID: 4906
  Gene Symbol: DDR2
  Gene Name: discoidin domain receptor tyrosine kinase 2
  ENST ID: ENST00000433757
  CDS Start-End: 1-514
catctttatcctcctggccatcattgtcatcatcctctggaggcagttctggcagaaaatgctggagaaggcttctcggaggatgctggatgatgaaatgacagtcagcctttccctgccaagtgattctagcatgttcaacaataaccgctcctcatcacctagtgaacaagggtccaactcgacttacgatcgcatctttccccttcgccctgactaccaggagccatccaggctgatacgaaaactcccagaatttgctccaggggaggaggagtcaggctgcagcggtgttgtgaagccagtccagcccagtggccctgagggggtgccccactatgcagaggctgacatagtgaacctccaaggagtgacaggaggcaacacatactcagtgcctgccgtcaccatggacctgctctcaggaaaagatgtggctgtggaggagttccccaggaaactcctaactttcaaagagaagctgggagaaggacagtttggggaggtgagttgattctttgattcccttatagctcgaagaaggtggttggataaaaatgatcagtagaacaaagagtcccttccagaggtggattcacaacagaatgtctcttccatttgtctctccttgcattgtcctctggatttcagtattgggtcaacctaatctttgtcaaatagctgtggagttcc

SEQ ID NO: 127250 - DNA, 656 bp, Homo sapiens
  Payload ID: 4906
  Gene Symbol: DDR2
  Gene Name: discoidin domain receptor tyrosine kinase 2
  ENST ID: ENST00000446985
  CDS Start-End: 267-656
aaacagagaagagctggtgatagctccagagctcagagaaaggaggtctctttacaagaagtctggctctcaaagcctccatcaagggagacctgcaagttgcctggggttcagtgctctagaaagttccaaggtttgtggcttgaattattctaaagaagctgaaataattgaagagaagcagaggccagctgtttttgaggatcctgctccacagagaatgctctgcacccgttgatactccagttccaacaccatcttctgagatgatcctgattcccagaatgctcttggtgctgttcctgctgctgcctatcttgagttctgcaaaagctcaggttaatccagctatatgccgctatcctctgggcatgtcaggaggccagattccagatgaggacatcacagcttccagtcagtggtcagagtccacagctgccaaatatggaaggctggactcagaagaaggggatggagcctggtgccctgagattccagtggaacctgatgacctgaaggagtttctgcagattgacttgcacaccctccattttatcactctggtggggacccaggggcgccatgcaggaggtcatggcatcgagtttgcccccatgtacaagatcaattacagtcgggatggcactcgctggatc

SEQ ID NO: 127251 - DNA, 558 bp, Homo sapiens
  Payload ID: 4906
  Gene Symbol: DDR2
  Gene Name: discoidin domain receptor tyrosine kinase 2
  ENST ID: ENST00000458105
  CDS Start-End: 1-501
cttaaagttgatgacagcaacactcggatcctgattggctgcttggtggccatcatctttatcctcctggccatcattgtcatcatcctctggaggcagttctggcagaaaatgctggagaaggcttctcggaggatgctggatgatgaaatgacagtcagcctttccctgccaagtgattctagcatgttcaacaataaccgctcctcatcacctagtgaacaagggtccaactcgacttacgatcgcatctttccccttcgccctgactaccaggagccatccaggctgatacgaaaactcccagaatttgctccaggggaggaggagtcaggtgaggatgatgtggtgggcagggtgtcaagggagaaacctcagcaagcatcaggtaggtatgacacgcctgctcccagttcattgcatctatttttagtctctgctaacctcctgagaagtccacattctctttctagatttggtctgccgctgctcctggcctaatttgagcaactctcctttgctactgaatataagatgtgtggagggacccacatacca

SEQ ID NO: 127252 - DNA, 1979 bp, Homo sapiens
  Payload ID: 4907
  Gene Symbol: DCBLD1
  Gene Name: discoidin, CUB and LCCL domain containing 1
  Uniprot ID: Q8N8Z6
  ENST ID: ENST00000296955
  CDS Start-End: 126-1745
ggcagcgactgcgccccgtcccggcgccgcgctcgtccgcagaggaggcggcccggcccgggcagctgcggctcgggatccgtcgaggggaggccgagcttgccaagctggcgcccagcggggtcatggtgcccggcgcccgcggcggcggcgcactggcgcgggctgccgggcggggcctcctggctttgctgctcgcggtctccgccccgctccggctgcaggcggaggagctgggtgatggctgtggacacctagtgacttatcaggatagtggcacaatgacatctaagaattatcccgggacctaccccaatcacactgtttgcgaaaagacaattacagtaccaaaggggaaaagactgattctgaggttgggagatttggatatcgaatcccagacctgtgcttctgactatcttctcttcaccagctcttcagatcaatatggtccatactgtggaagtatgactgttcccaaagaactcttgttgaacacaagtgaagtaaccgtccgctttgagagtggatcccacatttctggccggggttttttgctgacctatgcgagcagcgaccatccagatttaataacatgtttggaacgagctagccattatttgaagacagaatacagcaaattctgcccagctggttgtagagacgtagcaggagacatttctgggaatatggtagatggatatagagatacctctttattgtgcaaagctgccatccatgcaggaataattgctgatgaactaggtggccagatcagtgtgcttcagcgcaaagggatcagtcgatatgaagggattctggccaatggtgttctttcgagggatggttccctgtcagacaagcgatttctgtttacctccaatggttgcagcagatccttgagttttgaacctgacgggcaaatcagagcttcttcctcatggcagtcggtcaatgagagtggagaccaagttcactggtctcctggccaagcccgacttcaggaccaaggcccatcatgggcttcgggcgacagtagcaacaaccacaaaccacgagagtggctggagatcgatttgggggagaaaaagaaaataacaggaattaggaccacaggatctacacagtcgaacttcaacttttatgttaagagttttgtgatgaacttcaaaaacaataattctaagtggaagacctataaaggaattgtgaataatgaagaaaaggtgtttcagggtaactctaactttcgggacccagtgcaaaacaatttcatccctcccatcgtggccagatatgtgcgggttgtcccccagacatggcaccagaggatagccttgaaggtggagctcattggttgccagattacacaaggtaatgattcattggtgtggcgcaagacaagtcaaagcaccagtgtttcaactaagaaagaagatgagacaatcacaaggcccatcccctcggaagaaacatccacaggaataaacattacaacggtggctattccattggtgctccttgttgtcctggtgtttgctggaatggggatctttgcagcctttagaaagaagaagaagaaaggaagtccgtatggatcagcagaggctcagaaaacagactgttggaagcagattaaatatccctttgccagacatcagtcagctgagtttaccatcagctatgataatgagaaggagatgacacaaaagttagatctcatcacaagtgatatggcaggttaactccgttgactgccaaaatagcatccccaacgtgcagccctccgcatctatcagcaggttgccccggatggatctcagagatgaggattggaacaccatgttctttcccaccctaacaacaacaaagggcagtaaattaaagtactctttgtaaggtacagttaccgattaatctagagataaaatattttcttaaaaatatatttcattaaacacctatgctgtctctataaa

SEQ ID NO: 127253 - DNA, 3626 bp, Homo sapiens
  Payload ID: 4907
  Gene Symbol: DCBLD1
  Gene Name: discoidin, CUB and LCCL domain containing 1
  Uniprot ID: Q8N8Z6
  ENST ID: ENST00000338728
  CDS Start-End: 121-2268
cgactgcgccccgtcccggcgccgcgctcgtccgcagaggaggcggcccggcccgggcagctgcggctcgggatccgtcgaggggaggccgagcttgccaagctggcgcccagcggggtcatggtgcccggcgcccgcggcggcggcgcactggcgcgggctgccgggcggggcctcctggctttgctgctcgcggtctccgccccgctccggctgcaggcggaggagctgggtgatggctgtggacacctagtgacttatcaggatagtggcacaatgacatctaagaattatcccgggacctaccccaatcacactgtttgcgaaaagacaattacagtaccaaaggggaaaagactgattctgaggttgggagatttggatatcgaatcccagacctgtgcttctgactatcttctcttcaccagctcttcagatcaatatggtccatactgtggaagtatgactgttcccaaagaactcttgttgaacacaagtgaagtaaccgtccgctttgagagtggatcccacatttctggccggggttttttgctgacctatgcgagcagcgaccatccagatttaataacatgtttggaacgagctagccattatttgaagacagaatacagcaaattctgcccagctggttgtagagacgtagcaggagacatttctgggaatatggtagatggatatagagatacctctttattgtgcaaagctgccatccatgcaggaataattgctgatgaactaggtggccagatcagtgtgcttcagcgcaaagggatcagtcgatatgaagggattctggccaatggtgttctttcgagggatggttccctgtcagacaagcgatttctgtttacctccaatggttgcagcagatccttgagttttgaacctgacgggcaaatcagagcttcttcctcatggcagtcggtcaatgagagtggagaccaagttcactggtctcctggccaagcccgacttcaggaccaaggcccatcatgggcttcgggcgacagtagcaacaaccacaaaccacgagagtggctggagatcgatttgggggagaaaaagaaaataacaggaattaggaccacaggatctacacagtcgaacttcaacttttatgttaagagttttgtgatgaacttcaaaaacaataattctaagtggaagacctataaaggaattgtgaataatgaagaaaaggtgtttcagggtaactctaactttcgggacccagtgcaaaacaatttcatccctcccatcgtggccagatatgtgcgggttgtcccccagacatggcaccagaggatagccttgaaggtggagctcattggttgccagattacacaaggtaatgattcattggtgtggcgcaagacaagtcaaagcaccagtgtttcaactaagaaagaagatgagacaatcacaaggcccatcccctcggaagaaacatccacaggaataaacattacaacggtggctattccattggtgctccttgttgtcctggtgtttgctggaatggggatctttgcagcctttagaaagaagaagaagaaaggaagtccgtatggatcagcagaggctcagaaaacagactgttggaagcagattaaatatccctttgccagacatcagtcagctgagtttaccatcagctatgataatgagaaggagatgacacaaaagttagatctcatcacaagtgatatggcagattaccagcagcccctcatgattggcaccgggacagtcacgaggaagggctccaccttccggcccatggacacggatgccgaggaggcaggggtgagcaccgatgccggcggccactatgactgcccgcagcgggccggccgccacgagtacgcgctgcccctggcgcccccggagcccgagtacgccacgcccatcgtggagcggcacgtgctgcgcgcccacacgttctctgcgcagagcggctaccgcgtcccagggccccagcccggccacaaacactccctctcctcgggcggcttctcccccgtagcgggtgtgggcgcccaggacggagactatcaaaggccacacagcgcacagcctgcggacaggggctacgaccggcccaaagctgtcagcgccctcgccaccgaaagcgggcaccctgactctcagaagcccccaacgcatcccgggacgagtgacagctattctgcccccagagactgcctcacacccctcaaccagacggccatgactgcccttttgtgaacacaatgtgaaagaagcctgctgtggtactgagcgtcgggctgtcacaaggcactggaagaagggagcctgctggtccagagtgtgcgtgtgtatcggtgtgtgtgtacacttgcatgtgtgtgtgtgatccagtaggatcctagagacaacctgtcatactgtttacaaaattgtgcagctggtttcgtgctgacccttagggtgcgtctgttgggttttgttgggctagaaaaatgaaaattttcagatggcgttttcattcctctgactgatattgagctgctttggtgttaaaggtgtaatgtgtacagagttgtatttaacaataataaaagtaacttaagtttgctctatcagattttagttctgcacagaggttaagtgggaaaatgcagctgttgcaaaatgtatataaatagtatgttcatttttttcagtatattatctgatactgtgttagcagcaggtctgcttaaacctagtcttgttgttattgagtcatttcctctcctttgataactagaactgaaagcatttttaacattcttctcctggaagaaatgaattacttgaagcatgaaaagcacaccagggtggttgtttatttagcaattatgactgtagatttaaaaacaagcaaagaaacaacacctcagcagctgcccgtttccttagtctccacttcagagggggatgcgaagaggtcggcccagctccggtgaccatgaaggtggcacaggaattacagtgtgaatggctgtgtcagatgttttcgtacctcagattaaaaatattgctgaggtcagacgccacaattttcatgactttcttcagaagtagcacattttcgtgacttccgctgtcctctgaaaaacaaagttatttggaacatgttcatgcaaaagtgattctgaccaagtctaaatcgagcttttctactgacatgaaactgttggaaactgatctcattttataagaaatgattttcccctcaaggaggcgtctgtaattccagaacagtccagacatcagctgtacctcatgctcagtagtttttatttgagtttcttttgtgagttaactatgggagatttaacctcttttgccaaagagggaagtgtgtgtgtttttttaatagaaaatatggaccaaaaatttttttccctgaagaatgtattataaccctatttgtgtggttattacatcctgtgaaatgtatatatgttaaaataatgggggtgctggaaggtcatggcagactagctgctggttagtgtggaggggaaatggtttactttgtagagtttacatggttttatgcgcacactaattgtaataaactatgccaaaccaaa

SEQ ID NO: 127254 - DNA, 574 bp, Homo sapiens
  Payload ID: 4907
  Gene Symbol: DCBLD1
  Gene Name: discoidin, CUB and LCCL domain containing 1
  ENST ID: ENST00000424717
  CDS Start-End: 1-300
aacaaccacaaaccacgagagtggctggagatcgatttgggggagaaaaagaaaataacaggaattaggaccacaggatctacacagtcgaacttcaacttttatgttaagagttttgtgatgaacttcaaaaacaataattctaagtggaagacctataaaggaattgtgaataatgaagaaaaggtaatgattcattggtgtggcgcaagacaagtcaaagcaccagtgtttcaactaagaaagaagatgagacaatcacaaggcccatcccctcggaagaaacatccacaggaataaacattacaacggtggctattccattggtgctccttgttgtcctggtgtttgctggaatggggatctttgcagcctttagaaagaagaagaagaaaggaagtccgtatggatcagcagaggctcagaaaacagactgttggaagcagattaaatatccctttgccagacatcagtcagctgagtttaccatcagctatgataatgagaaggagatgacacaaaagttagatctcatcacaagtgatatggcagattaccagcagcccctcatgat

SEQ ID NO: 127255 - DNA, 6122 bp, Homo sapiens
  Payload ID: 4908
  Gene Symbol: DCBLD2
  Gene Name: discoidin, CUB and LCCL domain containing 2
  Uniprot ID: Q96PD2
  ENST ID: ENST00000326840
  CDS Start-End: 364-2691
gcctgccagctagccggagccgcgggtgagcgcggcgagcggcgaccctggtgaggagcgcggcgcgggaggcacgttccttagctccgccgcggccgtcctccgcggctcgaggactccgcttccttccctcccctcccctgcgctccggcctggggtctcggcgcggggagcggagggaagggacgaaggaggagtaggtgaaagcggggtgaggggcggaagggtcccggcgcggggtgaggcgagggctgcctcttgttctcccgccgctgccgccgtctcctggtcgggtgccgcggccagaggcgcgcggggctgccgaggcacccgcactatgcaggcagactgccggccgccgcgatggcgagccgggcggtggtgagagccaggcgctgcccgcagtgtccccaagtccgggccgcggccgccgcccccgcctgggccgcgctccccctctcccgctccctccctccctgctccaactcctcctccttctccatgcctctgttcctcctgctcttacttgtcctgctcctgctgctcgaggacgctggagcccagcaaggtgatggatgtggacacactgtactaggccctgagagtggaacccttacatccataaactacccacagacctatcccaacagcactgtttgtgaatgggagatccgtgtaaagatgggagagagagttcgcatcaaatttggtgactttgacattgaagattctgattcttgtcactttaattacttgagaatttataatggaattggagtcagcagaactgaaataggcaaatactgtggtctggggttgcaaatgaaccattcaattgaatcaaaaggcaatgaaatcacattgctgttcatgagtggaatccatgtttctggacgcggatttttggcctcatactctgttatagataaacaagatctaattacttgtttggacactgcatccaattttttggaacctgagttcagtaagtactgcccagctggttgtctgcttccttttgctgagatatctggaacaattcctcatggatatagagattcctcgccattgtgcatggctggtgtgcatgcaggagtagtgtcaaacacgttgggcggccaaatcagtgttgtaattagtaaaggtatcccctattatgaaagttctttggctaacaacgtcacatctgtggtgggacacttatctacaagtctttttacatttaagacaagtggatgttatggaacactggggatggagtctggtgtgatcgcggatcctcaaataacagcatcatctgtgctggagtggactgaccacacagggcaagagaacagttggaaacccaaaaaagccaggctgaaaaaacctggaccgccttgggctgcttttgccactgatgaataccagtggttacaaatagatttgaataaggaaaagaaaataacaggcattataaccactggatccaccatggtggagcacaattactatgtgtctgcctacagaatcctgtacagtgatgatgggcagaaatggactgtgtacagagagcctggtgtggagcaagataagatatttcaaggaaacaaagattatcaccaggatgtgcgtaataactttttgccaccaattattgcacgttttattagagtgaatcctacccaatggcagcagaaaattgccatgaaaatggagctgctcggatgtcagtttattcctaaaggtcgtcctccaaaacttactcaacctccacctcctcggaacagcaatgacctcaaaaacactacagcccctccaaaaatagccaaaggtcgtgccccaaaatttacgcaaccactacaacctcgcagtagcaatgaatttcctgcacagacagaacaaacaactgccagtcctgatatcagaaatactaccgtaactccaaatgtaaccaaagatgtagcgctggctgcagttcttgtccctgtgctggtcatggtcctcactactctcattctcatattagtgtgtgcttggcactggagaaacagaaagaaaaaaactgaaggcacctatgacttaccttactgggaccgggcaggttggtggaaaggaatgaagcagtttcttcctgcaaaagcagtggaccatgaggaaaccccagttcgctatagcagcagcgaagttaatcacctgagtccaagagaagtcaccacagtgctgcaggctgactctgcagagtatgctcagccactggtaggaggaattgttggtacacttcatcaaagatctacctttaaaccagaagaaggaaaagaagcaggctatgcagacctagatccttacaactcaccagggcaggaagtttatcatgcctatgctgaaccactcccaattacggggcctgagtatgcaaccccaatcatcatggacatgtcagggcaccccacaacttcagttggtcagccctccacatccactttcaaggctacggggaaccaacctcccccactagtgggaacttacaatacacttctctccaggactgacagctgctcctcagcccaggcccagtatgataccccgaaagctgggaagccaggtctacctgccccagacgaattggtgtaccaggtgccacagagcacacaagaagtatcaggagcaggaagggatggggaatgtgatgtttttaaagaaatcctttgaagatgatgctgctttttacaaagcatcgttttaaagcacatggccttttttttttaattattagtggtagtaatatatagaatgtattacataactgtcactgaagtggttggggaaaatgtggtgactgaggtacaggaaactactaatcttgccatcttgctttaaggtgttatggtggcacagttactgctcgcctgttaaatttcaaatgtcctgtttgatactactgtagaacactatttttaatacagaaaaagctccctataatgcacttcagagaaattaaaaatcacagagtatttattaccaatgctgcaggtacattaatgaactcgagatggctctgtaagcctgactggcaataacgcacggtactgttcttgaaatacctaatggcttgaaattctagtctgtttgtgaaagatgggtactatcatgatttcctcttctattcctatattcttttctggattttttttaataattagtgatataagcattgtttttattgcagccatatccacttatccatcttaagatctgtagctgggattttctgacttgtaatgagcagggggattgctttttcactttgtgacactctttagagctttaatgcttcacagtatatggcctggtctcatccttgcgtgttccacttgaggccctttggtgtcttgccccattcttgtgtttataaaatgtttgagtatttctgatgagtgatgcttgccttagtctcatgaattcagatcccttcatgtcctttaagtatgctcctcaatgtgtaaacaggaacaactttatgatttgaaagctttaaaggagattcttctcccacccccaactttatttgcaatgggatttttcctaggagagttatgaaaagttgaaggcttctaagggaatactgtaaacatgacccacttatatttatcacagtgaaaggcaaaattattcactcagaagtaatataaattacctctttaaaaagtaaccagaatttgtcctttttggttttatacattcacaaacatatacatttttcttgagtctcaaggtattttatatttttagtcagaaaaaataatttttcatttcagttttccataaactgttacacaaaatataaacctaacgtgtatttttcaggactgcgtgatcgtgcactttgtgtggtaagaggtttgagtagtcctatatgtcacctagggaacagacattatagcttactagcaaatgaatattcatgccttgtttttgatacctcctggcagcttccatgtcaccacttgttcatacctgcccagagctagttttagacatggcaaaatagaaatcatctgtaatttattagctaacaatgtaaaaccatcttttaaagccttcagactgtcaagacgacatgagcagctcaccatatgataaaaatacataaatttgacattccctcttccataaacctttgtttgtagatttaatgttgaacagtacttttccataaagttctagtcacttctgttggcctgagccaccagattatgatgttgccagaattcactcaatttgaataaagatgaacagtatttgttttcttgtttccatgaattatatcagtattctaaaacatcgcttcagaaagagaactgtttatttctgcaggcttcctgtccttttgtggtatggttttttggccttattttcactggcttttccttctccaaactttgaggcgtgatttcattcattgaagaatcaatacatattttgtttcaaaatgtttgaaacaaaagacatagatggtagacttttattaaaacatatatggatgtggaaagcacatatattaatgcagtcatcccttttcaggtgggaagagagcaaaccagttgattttttaattcatccttagtacacagagaatatacttttcctcaagtaatatacctgtttgaagctttaagagagatgtttttggtaactatttcattttcccaaagaagtttgctattcttgtgttaattgtgtatacctgattgttttttcctggaggtttttgttgttgttgtttagttttgggtttttttttttttaagaggggcaagtgttttctgaaatgatgcatattttaagactcgattcatattgccactgtgctatccttgaactaccaataatttttataaaatatctagtttttactacttttatataaactttactttccagatgaagagctgagcctgattcaaatggtttttctgctttatacttctttttagttcattggtttttatagtagaggttttctattttttttttttttttttttactacatttatatgtctgatacatatacggctttggagacaatcaagtaacaactgaaaatgtgaaagtaaccatatctgacaaaattcccttgaatttttatcctttgcttgcaacatttaagactcaaagtcactggtatattggattaagttttttcctgttaatgcaattatagaaatacatcggagacacaacaaatgtggccattacaggtttcataaaattacactgacttggctgttacttgatcttaggaaacagcacagtttaagatattgtgaattctgacttatactttattaaatgctgtaaatctaaatagatcctgttggatgtgatgggtctagtccagtttatttaagttcatgtttcactgtttgcactttgcattgaacaatgggtttattcgctgatgtaaacggttcgagtgaagaattaatgcagtaagtatgacaacacatacacacttgcctctccccatctccagaagaggggagcagagtccgagcttatctaaatatgaatgtggccacaaagctgtggaaggtgacaaagcttaaacacctttgccctggctctgcattgtcacctagagagcaagaggtctatagaaacatcatgtcacatgaaacgattctctgctttttggttctgaacttgaagtccctaaactgcaaaatctaagagttgggtggttattaaaatgcttttaaagtcaactgtggcaccaattctaatgtaatccaacttgtgactgtttttttttgttttgttttgtttttgtgtgtgtgtgtgtggcactgggaaaagtggaaacaaacatgtattgaaatacatattggaaataaaaatggtttgagcgtcagtgatattctcccagaatgtacttatcttacctcggcatgtactgtagtcactcagtatttgtatatgttgctagaatttagattgtaaaatagtgaaattttaatgtgttcatttgtttttaatgtatatatgtcttgctcagattatttggtttaaataaaacaaccttgaggtttgtagcttttccttatactataaaatgccagattcttctattttaacctca
